United States Patent Application Publication US 2015/0376612 A1 - sequence listing, part 53

SEQ ID NO: 125320 - DNA, 1041 bp, Homo sapiens
caaaaccctgtctctactaaaaatacaaaacagccaggcgtcctggcgcgcctataatcccacctactcaggaggctgaggcaggagaatcgcctgaacccgggaggcggaggttgcagtgagccaagatggcgccactgcactccagcctgggtgacagagtgagactctgtctcaataaaaaaaataataaagggcacagacaagtgggatcaggatactttgaaatgagaaaaataccctctttttcagaaagtagaaagaaccacaatgagataatagtattgatttttcttaactatcagatcacctcttgaaactgaagaaagaacatttaagatctgaggaaggtattggaggttcaaagttgcatgtggctattatgtgaagaaattaactagataggaatttgatccatgggtcatgttgaacgtacagttgatgacagcccagcgtggtatttcttcattttagagtgatatttcccatattatgcagaggttaaagattttggacagattaccagaacagagacacaggccctgggaactattgatgcgtaataggtttggcttctgatatgtgtgatcaagttttttattatttcatgcttacattgttcagcctttgattacagtcagtgcaatgttaagactctgcagtgcttcccactaagacatctctcttttagtttcctgtgggccgcatccacagacacttgaagactcgcaccacaagccatggaagggtgggtgccactgctgccgtgtacagtgctgcgattctggagtacctcactgcagaggtttgtacaggaatgtctgttgtatatggccatccagaaggtgcactagtctcagtgacagaaacccatggaatatatttgaaaaaagacatattatgctcactggggcttttttgtttgtttgtttggagacagagtttcactcttgtttcccaggctggagtgcaatggccagtctcggctcactgcaacctctgcctcccggattcaagcgattctcccacctcagcctccca

SEQ ID NO: 125321 - DNA, 7186 bp, Homo sapiens
ctaccgcaatgccatcaccgtacccttcaaagcctggggcaagttcggaggcgccttttgccggtatgcggatgagatgaaagaaatccaggaacgacagagggataagctttatgagcgacgtggtgggggcagcggcggcggcgaagagtcagagggtgaggaggtggatgaggattgaaacgggcagcttcccctacaggcctccacccaaccaccatccccttggctagagaattccctttcctgctcatccccagtgagctagtggagagggagcaagggaggccgcagagggaaaaaacaaaacgtaacacagttaagagaaataatcgtaagagaacagtgacggacaacttgagaaaagcagtcaagttccaaggaactgacagcaacctgcaaagaggaaaacagcatctcctcacctgcgtaaaattgtctcagcttctgttgtttctcaactgaggttcgtaaacccatcaggataatccctggagggaatagatccttgcacatccagggcaagaaacatgtccaagttacccagaccattgataacagttgcatttaggttgcacctgggtaatctggcataaaagatctctctaggcctcactgttgcggtgtctatcccttcacctccattgaaatcagcattttggatctaggtcttcatggaatccttgagaagagaggcctttacaattacccagttctgagggttcaggttcacgaaaagaaatgcaacttgggataatcatgaacaggttaaagataagatttcaagaagccatctaagaatacagaaccaaattggatccatttttttaaaaaaatggttttgcatggaacctggaccaaggcaaatgtcttttcttcgcagaattgttttccaggatgccagtggattcagatagcaatgcttggagtagaatccgttactaaaatagtttcaaagttgacaaaaaattttcaaagataaaagcagttttacattgggggttgctgaggtaggcacaagaaaaagtcaggcataaagcacaaggcagactgtttgagtggattggttgctgctcactaaagttgttcccctgatctctaaatatggaggtcattaccaagaaatgctttggtatgaatgagagccagatctccactgtgtgagccagtgaattatggctaattcggctgttacagccactggttggctggattttaaaccataaaacttgaagattacctacaaaagtaacagtgtggctataagcctgagctttaatggatatacatcctcacagaaaagttggaaataaccaaaactgaagtcttaatttaccttcagtttaatctgtggatttgttcaaatactaaagatcctcaggtccagaattccagcatcatttattcttttaaaatttttaagaacttgatccattgtatcagtacctcacaatcagagttggcaaatgatggatgagtgattcaagcagtgcacccggtggaagctgaaatccatctgtgaatggaactgaagtgaacgtgaatatgctgactatatcctggaagcatttttataccatcttgaaatttcaacaaactggcttttgccagttaatccagctgtctttcaagaataaaagttggggttttcaaggatcgcctcttctatattttaaatggattttcagtagaaatgatttttactaatcaagttaatcccaccccatcaaaaggtattcctagaaatgtcatagacctaggtaactttgaattgaatgggagctaacgttctttccaaagttttcaggtattctttgtgtgacaccttctcaaccaggaggcaagtaaccccgcctccacaatcttagtattttttttaaactgcatgcctgccccttatttgagctgcctttttaatttattgcatatcctttttattatcttattttggtattattcaatctatacaatctttttgtatttattgggaaatgagtaatatacaaaaaggttttcatgtatttgtggctgagagggcgggaaataattgtgtacataaaattaggcttttttaaaaaaatagattatgatgcagaatattgttgatcttagattaaaaagtggaagagccacaaacattggtgcccttttcagactatttctctactctcatcatccacagtagaatttttaaacagatttttttaaagcttttcttttaaatttttctccgttgcaaagaatgtttcctaaattgtatgggagcaatagtatttttgatgttttaatgacatccgtatacttgtactgtattttgtactacaaggcagctgtttttcaataatgtcctgctgtatttacctacgtgttttgagtgtctatttctttgctgcggagaacaaattcctaaatagttttagtaaaggagctgagaagctagcattaggtttgcagaaactatttaagtttcaactctgaggcagcaatgaaaatttaagttgcagctattagttgattgctgtaactttttcattttcaaaccatgtacaattcttgtatagaccaacttgttttcttgcttcagtggtggttctgttgctcagctgcagtgagccagttcaattttgcaaaggtgcagtacctctcctttttaaggggttggtttattcttttttctttttgtttggctgaattgcagtaactagccttgcctttctattctgtagaaatgacagggtcttcacaatccttcaccagtggctactaagctataattagctgaatagaaagaatgtggaagtggtctgaggcatatagagtatatgccaagaacactaccatatatggcatcagctttggttaccagagaaattttcttagtcattagaccatgtaacagtaatatatcatatgtaaatctttagatatcaatttgaaaatcctccaaaaaaaggagcaaagaatgcataagctatgtgttggcaaaagtaatttatattaaaattttgacctgcctatgtaagattaagtggtaatgtcatagtggtgggtttttaagtcttaaccaatctctaaggtttgtttctcctgcaagggatggttcatggcctctcttcccactgcaggaagattgcagaaggctgtggattaattgtagcatttcactgatcttcactccagtcactagggacaatagaaacctgcaaaacacagattcattcgtaaatattattaatagcttattaaaggaaatggtctttgttaattccagtcagataatggcattgtacagacatgggaaacaaccaatttttttgtttttcagttgttgctatgaatgattttgagcctttttttttaagcttggcaaacatcccagctaatcaaaatagtcatattcctgagaagtaggaaactaaaacttcttttcatataattgttagaaggtttgtttcccaaactaccatagttacaaaggtgaaaagccaaattttaggaacagaatcaaaagaataaaaatctgtgaagagatcctactactcttccttctatgttttggttttggtttctattgtccctatcatttcagcaagtggaacagcagcaagtttttcagtgcatatgctgcacaagaacaaaatataaatctgtatggcaccaaaaatcaaagtgaaaaccaaaccaaaaacccaaacaccctatgtaactatcggaggcatatacgtggtataaatgactgtagctgtgatacacacatggctacttgtcacatcactttccataattatttactgcaaaatgattgagaggcttttggtgcaggcagccgttaacctcctgcttcctttgttacctctggattactttgcagtaaattgcaggtcttttaagagatttaagcttcagttttctcaaaacaaaacaattatcctgtcttatctgaagatgcagggttgtgggcaaaagaggctggttataataatgccctcatattgagtggtctgtaaacggctgcacacttcaggcactgtagttgctgaagatgctttgttaaatgtgaccttgactggctttacaggggtgtagaatgtaatctacacaaggtgactttgcatctatcttgctcttgaggtggatgaaattgagaagctggagtgtgtaagccatgcacataagtattcttcactgtaaattttgttttcatttttaacccaattatggtactttatccaatgcacaactgatctctcagtagatattcatttgaaaatagtgtggccttgatcagtgagaaagggaaggagaaaagtgacttttttgcttatgtagaaatgactcatttgctgagagtttgtctttctgcagcactcttggtatatagtgatcggtctcctttttgattggggaaagttaatgtttttgaccctggagttaattcagttgagttatcttatatttttaggaagtatcagaattgctctgatgaataacaaagttgactgttttgatgtccaatctcaggttttagaatatagtggtgtaaagtcccactatttttaattcttaaaacaactttaatttcgtacaccctaaaagtcacatgcataaggcctgttcagagagcagagcctccatctttttgctccttttctactttgtacttcacttgaaaaaatatcaagtgactttacattgtatatttccattgtaaccctgacatttctcaaagataaagcactttttgatcatgaaatacatgaaatctttgtgtgatgtggatcatagtttctcaggctcccttagataattgcttatgaatattgttctaactctgtgtaagaagagtagaaatctttgctaatgttagaaggtttgtattattgatccagaatgcattttgctagtttccaatggatgggagagtaaataatgctgcattcacaatttaataagttactttcccttgagccttaaggtaactttttctttcctgtcaactacagcactgaagttatagtaagtgaatgagattatcagttttcagggttggttttagagtactgtaaatcaattagctgtcttcctaaagagttacaactcccattcagtatactggataatgggtgtgtgggtggggctggggagggcgggagatagtttgtagaaaagaaaaaagaaaaaaaaaaaaacacatttaccttaagaaaatacagacaaaaaagaataaagtatgtgtcatatgctccatttgagattccaaatgcggccgggcgtggtggctcacgcctgtaatcccagcactctgggaggctgaggtgggcgggtcagttcaggtcagcctggacaacatggtgaaaccccgtctctactaaaaatactaaaattagccgggcatggtggtgcatgcctgtagtcccagctacttgggaggctgaggcaggagaatggcatgaacccaggaagcggaggttgcagtgagccaagatcgcgccattgcactccagcctgggtaacagaacaagactccgtctcaaaaaataaataaataaattccaaatgtaaggtggaaatggcagattataacttcatttcccccatttttaacttagaaaaaacaaagtccttaattttcaagtattagccccccagaagtttcagcagatagctggactcttgaataatgatttcttttgatatgtctgactttgctatttaaagtctcctttcccagccctcagtcttaaaactcagttttattactgacggatttaacagactcttacttgaaaattgtccaattatcagtactgaaaattagatttggaaaatgaaaaaataataaaatcgcatcaagaaaacttattaccttagagattcccaattgatatctgtacccctgatccaagtaaggcctttatgaatgtattttatatttcctaaagaaatagggaatatgccatcagtgtaatcacctctattcacagtcatttaatttgaaaatctaactcatgtctcttgaattagacattccaattgggataggtagagtcatgttaaaacaatagaatagcaactgccatattggtagtttcactgctcaatatgatttctaataagagcagagctttattggaagctaaaactcatttttctccatagatgattctaacagtttaataaaaaagtataattatactttaagtgtcaacagattttgagtctagaagcaaatttcattttccttgtgttatatctaatatccattgacatgggtaagaaaactaattatgtctttttagtatgatgaaatgtgggcccagagtattggaaagaaagcaatagccctattcagtgtccactaggatggatattgcagaaggcatgagtttgtccttttttcccccttaccttaaataacacttcaatagctaactttttccaaaatatccatttaggccatctcttatttcttaaagccaaatatttcgtccccagtcttaactctgagttgcaagatcaggctggttggaagaatctttatatttagaaataggatggtgagtggtttgtttattctcttgtaaaattcctttttcagagacataactgcagggagagtcccaagagaactgaagaactggattatatcattaaacacatttgtgttgtaggaatttgggagtttcattttgaactgataagatattagacataaacccttgttccagcccacatgtgtcatccctgtgtacaaaagctctctggattctttttttttttttgagacggagtttcgctcttatcgtccaggctggagtgagtgtagtggcttgatctcagctcactgcaacctttgcctcccgggctcaagcgattctcctgcctcagcctcccaagtagctgggattacaagcatgtgccaccatgcccagctaattttctgtatttttagtagagacggggtttcaccatgttggccaggctggtctcgaactcctgacctcaagtgatctgcccgcctcagcttcccaaaatgctggaattacaggcatgagccatcacgcctagcctactctctgaatttctaaaagtcagtaggttgaccaaaaagtctagaaactggctttaagtcagtatgggacgtacttataaagagtccatggttttgcacgtttcggtagacaag

SEQ ID NO: 125322 - DNA, 1267 bp, Homo sapiens
taaagcactggctaccccttttcacttactatcttttcaagcatgttctaccaccttggaaggtaagaggttagtaccttcttccagagcagagggcaggcattcttgctgtgcgttgtgaaagggtagagtcctgcgctcctttcttgtagtagtccaatggctcatgcaggtgcctctgactcccctatgggaactggggcttgggagggtggtggaaaatgctgatgctctggctattgctattgttttgaataatcagtggtcccttgtccctaatcgaggaattttgtattttctaccagtgtccatgaaactgggaggcgaccgtgttagctgccagttcctgacagccacctctcaccagtggcttcactctgtgtccctgacccagcacatggcacaagagtgcctgccatccgtcagtgtttctacagcagcaatcccaagatgctggagctagaggggacctgacctgagagaagataccttcagtggctgccaggctgttccttggaacctgtgcaggggtaagtgtgcaggaaggtctgacctggcaagtcacttcactcctgttttatttagagtcacctggctaatgaaaagtattttgaccttcccgtatggtaagtcaggtgattgaatcccagaaaggttcattgtcttcaagctcacaatactattttgggacaaacagttgtctagtgtttggactcatgaaccctgattcttgagggtggtattttactgcttttgtgatttggtttcaacatatatagtcttttctccggagttaccttaggtcagtggccagtgtttcagcccctggaaagggcatgggctgccactgaggttggtcacaggcctctcagctcatggtgggagtgggttcaggagttggtaagtagggttcagttctgttgttgccaccgatggcaacaggggtttgtaataatccctagttgtgtcaattatgtcacttaattttcacaacaggtctctgaagtgtttctcatctcatttttacagatgaggcctgcctgtgttaatacacctagtgaggagtggagctgaatttgaatgcaagccttggcaccttaattgagcaagtttgaaacctcgcttgttgcccttctggaaggagtcaggaatttccagttctgggcctgggctgtgggtctggcagacagacctctggccctaggtttgggtgccaggttctctgcttccagaatgagaagctttgctgtgcaccaggacctgggcc

SEQ ID NO: 125323 - DNA, 1210 bp, Homo sapiens
gtggctgaggtgacggtctcaaagtggaagagcttactgtcacagcaactcctttgcaagatgccccggtaaatcacgttgcagagaccccaactctgccttcctggaactaggcctgcgttttctctgaaccattatttcatggggaaaatgaaatctacttcatgtgcctggtctacttactccttcagaagtgatttctgagccgtaagatacatgagaaaaaaatgaaggggaaaaggcagtatttatattaactacatgatgataaggatgtttctggtcacagtgaaaagccatgctagaattgtagtgtcatagaataatgtggaagtttagttcgtgttgtctgatctatttaataatttaataaggttatctcttccaagacaccttcccttcttcctcagccagaaaggatctttccctgagagtcattagtagctctgggctcctggaaccaagctcaggtgcctaattgaactctggtctcttcccacagcccccagcagggactggtgcttagtgagagtggactgccagattccttgagtgtgggggatttgggtgaatgagggtagcaagcctccagcgtgcttgggtctgcggtgaccctatgcattccttcagtgcttgctagaacagttttgaaacggtttgaggccttgccctgctccatccagagcaaggttatagaaatttcagacaatgacttcctccctcctggatctagtgtcctgggccttgtatagatccgtgccatctaatgtggtagccacttggcacacatgattaaattaaatttggagttttatttcattttcacactagccacatttcagatgatcagtagccacaggtggccagtggctaccatattggaccgcacagattagagggcatttctgtcgctgtggaagttgttttggacaatgctggtgtgaaaggtgaagggaatcctgagtgtttgctgtgctccaggctcagtacaaattttattttattatacacttaaagcaaaagtcttataaaagttgaggatgaagccaagagtggtggtaagggtaggagttgaaacagtgaagaggaataacagggaagagtcctgccctgagagactcatggaataggatatttacaaggcaaagcaaagagaaccaaagtctcagttctgcagaggagctgagtgccccaggagctagtggagggt

SEQ ID NO: 125324 - DNA, 1047 bp, Homo sapiens
taaatgctttataatcttcacgtcttggctatcattttctttttgatgtgtgtgtgcgcacttttatccacaagtttaaagcagacctcgataattcctaactatgattttactaccctgaactctgcagggaagtgtcctttaattgacagctactcaccaccttgtttgacagagtgccccatttaaaagtcctgtttgaaatagaatgtagccaggtggccttcagggagtcctgtggtgctggttctctactttctcaactcattgtttcatgttagcaccatgcatgtctaatttaggtgcagtataatttgcggttatctacaaagatgttttaagtctggaaaatagctcaagatagtgattcagcctgcaggtgttagattagagatgcgtgctgcgcacagaagagggaggagccaagcagtgtaaaaggagttagctggaaaggagaggtgctaacccggtggctgcttagtagggaccatcaggcccgagtgtggatgatgctgagctttgcggaaagtgagccatgtgctctgtggaatgccgggatccaagagcgcgctaaggactgatgacctcattgtgcaccgcttacaggagtacctggcccatctacctgtgtgtgataggcaaggatggaattgagtgatttttttttctagagctgtctatcagctttggtagaaacatgaaacacccagcaaatagggagagagagagagaagcagtaagactgtttttggggtacaagtgaaaaaacagtaaaattatcaagaattttccagttgggtaatgaaaaaatttaggcataaacaggttaattattaatttcattttctcactagaggagataatcagttgttatgtagttgcttaagccaggggttttgtgttttttctgtattctgccacttgtcttagcttgtttcctgtagacaagccagacaaggagctttggggcatggattcttctccaggtcatgacttaacactacctcgtgtactctgccagttgcaagctggcagaaccttcctgct

SEQ ID NO: 125325 - DNA, 1139 bp, Homo sapiens
gggaaagaattgcataaaaaacatatgctccacttgttgatgctagcactggccacaccttccacctgccttcctggagttctcagaaatgaagtgtcccagctgagctggaaagagttggagtgatgttatgttttatcttctgtggggaatctcccccttctatcattgtcttgccagataaggttacctggcttctatgtgttgtaggaacaggtgaagaacaaggtgcctccatgccagaggctgcatggcagcccagccccaccgtgccggcctgcgtgctggctgtggtccctcaggcttgtgtgctgttggtacctttctcaccagtctggcagtcagtgatccctgttgcatgggggccatggtagtagttttggctacttctgtttgttaaccataggtacaacacaaagcatttgtaaataatgaactccaatcattgccgtttctgcctgcagcctggaattgtctcgccatttaaacgagtattcctaaaaggtgaaaagagtagagataagaaagcccatgagaaggtgacagagaggcgccctctgcacactgtggtgttgtcattgcctgagcgcgtcgagccagacagactgctgagcgactatattgagaaggaggtaaaggtaagtcgtcatgggccacaggacgtgcctgccaaacgacagtgacggtcatgcttgtatccaccagacactcttgagtttataagacacagccacacaaacaccttagtagttgattatcccacccattgtcttgtctatgctgataaatttaataattggataactgaaaacccagattctgtctgctgaccccagtttatttttttctgtagtagcaatgccaccttctttctctcgaagacttggctgtgtgagtagtatgtgctgctccaccagaagagggttaaagagctgggagaaaactcacatctcctgtagtttgcagttgaaaagagttacctggtcaaggccatgaccttgcaggtctaacagtcaccgcctagaattcagaccatgtgtttgaggctcatcattgggtctcaaaggcctgaggccaaaatactgtgcataaaccatgtgacgtgcataagttgatttttaatccctcccctaaaatga

SEQ ID NO: 125326 - DNA, 1031 bp, Homo sapiens
ggcccacaggcaggaagcagggcataggtggtcttggtgggggtggagggaggcgtgaagaaggaatcagggtctgggggaggggaaggcacagaaagatcaccctgagaacacagctcggggggtgggtctgggcttgcgtgcccaccctcctggtccctgagcgctgtccgggcagctctgggtgacaggagggcctggcacgtctcctctcccatcacaatccggggctccagggtggccgggagaggagcctccgtggacagagcctgggaagacaggccctcagggaggagcatggggcttgggccgccctcccctgggtccgcccaggccgagggtgccccaccaggccctgcatcccagctggctccctcgggctggggccgggcacccggcttgctgggcaggaacgtgagggccaggtggctgggccctggggtcagagcacagggctcccgccggtcccctcccaggatggtggtggcagcggccgcatcgcaggacagatctgtggagatagagaagatcatgaggtgcccctggatgcatctcccaggcaagggccaggcccggggagatgaattccggctgcatagggcccagaggaaggtggatccaggaaggcaggagagaaaagagaagaccctctgcacgctgcgtttgagggagaacttccaggagttttgacagcagagagcagatgctagtggtttcctagagaggggttttgagggaagtgttgctgggagtcatgaacagacctgtctggcggcttttctcaaggacacctcagcaaagaactagcatttcagcctctctggggagactggattgcagtttccattccacagaatcagtgtggttcagctgggctcggtgggaggggctggtggtgggaatctgccaggcagtgccagtcccatcccatgacctcccaatagatgcgccacatgaggcaggtggcaccagcacgacgcgcgcagctcgaacactctgggcttcatgcctcgctctgcctcctctctctg

SEQ ID NO: 125327 - DNA, 2256 bp, Homo sapiens
gcctcgaggtggccacgcagtatggctgggtgctgggtgagggctccccctggttggcacagggcctggcattgcctgagtctaacgggactcttctaacccaccccgtctgcagcaagtactgacctagggagctgcagggtgtcagcctgggctccccacagtcccatctttgttcatctttcctgtgggggggtttctgagggatgtcccccaacatgttctcatcccacaccccttccccagatgctgaggtgctgctggacagtgacggcgagtttctgcccgtaagggactttgtggcacctcaccttgcccagccaactgggagccagtcaccacctccagggtctaagaggtaggtggccagggacctgttggccatgggggcaccatggctgttggactgcatattctttgctttccatctttcccctccgaggggctgggagagtggaagcatgtcagccacctcttcttccttccaggctagcgttcttgcggtgggagttccccaacttcaacagccgaagcaaggacttgctgggtcgctttgttctggcccggcgacacatagtggctgcaggcttcctgatagtggacgtgagtacctcttgggcaggtggtcactgcacagggagaatccccaacccacgctagagaggggatcaggtggaactgagccagcaggtatagacacatgccctgcccgtggccccgggcctctcccaggagcccagggagggagtttactgtggatcctagctgctccagcctcccctctaaccttcccagcatctcaccccgtgggtgaacccaaaaaggcaaccaagcctgcttattcagcttaagaggtgggcagggtagggcccattcacagatgagcagcttgaagcccaagaggctgcacagctgttggggctctgagtgcagctgctctgcccccttggtcagcgcctgttgtcaggaaaagtaggaccagtggaactggcaggagcagaaagatgcaggtcttgggcctgactctggtttcacacctgggagaccttggttaagatcaaaggtggtcaccttccctgggaagggccagtgaatgaacatgtggcttcatgagccacacaagggttctgtttgcttctttgggttgttgtgagttttttaactgtttaaaattcagaagcccttcttgggcctccgagtagtttgcagacccctccagcactgacagtgctagcacctctccccgcccgcactgcctgcagttcatgggctctgccttgaagacttggaggccaaggggcaggtgtgcagagctgttggtcagcagaggtgttgggtgaggggtcaatgtgaggacagcaggcaagcaggcagagccactggctggaagggatctccttgcccatgtgacctgtctcccctgcctccttctaggtcccattctatgagtggctggaactcaagtctgaatggcagaaaggcgcctacctcaaggacaagatgcgcaaagcggtggctgaggagctggccaagtgacttgtgccagcagcatggactgcgtgcctctccgccggaggtctagctgtgggcggccaagaagggtcacccttgaggacaaacctctgtgcaggaccttggccagagtggggagggtggccagccactctgagggacagaacgtcctcttgtgtataataaacctttaattttggtgttggacccctggggccttcccaggcttggtcaccctctgcactgtcagcacttgtctgtctgctttgttgagcagggcgtggttctccagtctgccctgtgcactcccccgccacgcccagcccaagagggctgctttagggacagacctgggttgttacctgcctgtctctcccagcttcttccctccatgagtgcttattcacatatgccggcctcttgcgtaggggtctgtatcagccccagcaggcaggtggagtcctagaattctgaacctccagagcagaggagcttcccagggaagctgattggagattcagtgcatggctgggggttctgatggagctgtggctactgaaccacagccatcctgggaggctttctcccatcagttgtctcacacttagctgagtgaaaggcaccctgacagcatgtggtgacaggtgatgtgagggctgggtgagcacttgggaggcgctggctctgggagaggagaagatcccacttggctgacaccacggcaccaagagccaaactccatcg

SEQ ID NO: 125328 - DNA, 3603 bp, Homo sapiens
ttcacgttgccagaaactgcgagattggtttgttagagaacagtttaggggttggagcttctctgactcaaaaacaaattattttcctggagaaaagccagtgtgttttgttttgttgtttgagacagagtctcactctgtcacccaggctggagtgcagtggcacaatctcagctcactgcagcctccaccttccaggttcaagtgatcttcccacctcagcctcccaagtaggtgggactacaggcatgtgccaccacacctggctaatttttgtaattttaataggcacagggtttcaccacgttcaccaggctagtctcgaactcctgacctcaggtgatctgcctggcccaagtttttaatacctaaaacttttaatgtcgttgcaagtaaaagtcacgaatgataacaaaactgatcttagcaagcgtaagtgccaccttctctgccatcaggtgacatccatcaggctcaactttttctctgacctcttgtattgatttgacagctttacttgcagctgaagtctacgtgcccactacccagagctgtagccaggaccatgtaaaagagtgtggtctctctttaatcaactacattaggtcaaaacttcattggggaaacttggagaatttcccttgccactctagagttcttgcttgcaagcaattgcaaatgacctcagccaccttgagcagaaatgtgctatttattgtagcctagaggatcaggctcagaggtgtacccttggatctggcctgtgcctgaggggtgctctggctctgcaggtgcttggcagccatgtcaaattcagtgcctgccctgtctatggtaggcactggcccagaagactgccacagaaacagtgactcacaggccctgttactgtgtcccaggctcagggataaatttggttacagacaccaagcgtctaggcctcgaggctgagcaaggctgtgaggagcagccaggcactggggccctgttacaatggagtggggaactgatactgtcttctctgaagagttgtagtaaatgctcatgaaacaaggttcagagaggtagcctccagctcacacacaggactgacagtgccacatcatttctcctgtgtcctttctctgcctagattgcctcggtctggcatggtaccctctcgaagctgctgggaagcctgtatgctctgggcatccccaaggcctccaaggagctgcagtcggtggagcaggaggtccgctggcgcatgcggaagctcaagtacaagcacctggccttcctggcagagtcctgtgccaccctctcacaggagcagcactcgcaggagctgctggctgagctgctcacacacctggaaaggcgttggacagaaattgaagattcccacacattagtgaccgtcatgatgaaggtgggacacctctcggagccactaatgaaccgcctggaagacaaggtactgggcctgaaagcaggtggcacccagcctgcctcccctgggctttgggcttgttctttgggtgacagttgtctgcagaggggtgcgttgtgtgcactgggatcagagccctgggagcttctgtctggagcctcaggcatcacatggggcaggaccagagggctcggagctgcaacaggtggttgccctgtggctgcattcatcaagcaccacttgctcctcccaacacaggcgcttccctgattgcacctttatctttcccccaaaccccatcacagcacgatcttgagaggggggcatggcaggcagctcctgaagtaacacagctactgcccaggcctggcttctggctagaactctcctggagatgtgctaacccctatcggctgtagccctgcagtcaagtcaaattcagtgcccgtttctgtcatagcgggggctggcccagatggctgccacagcaagctccacagctcatgggccctgggtcacctaccctgggacctggggataagtttggctgtggacagtgctccaggtccaggggttccctggggtggatgaggaggcaggccctgcacagtggtcctgtgtttagtcagctcaggcccagtctgacaggggctgtcacaggggctgcactggatgggaccatgggacccctgcccccagctcatctctgccaccccaggccattgagctgacctctgcgcggctgtggttgacagtgcctggagttggtggagcactttggccccaatgagctgcggaaggtgctggtgatgctggcagctcagagccggcggtccgtgcccttgctgcgggccatctcctaccacctggtgcagaagcccttctctctgacgaaagatgtgctcttggacgtggcctatgcctatggtgagccctttggacagaacggtggagagaggggagcgctggccctgcagatgcctgcagccgtgtcaaattcagtacctgtcctatgcatggtaggcactggcccagaaggctgccacagaaacactgtgactcatgggccctgttcctgtgtcccaggctcagggataaatttggttacagacatcaaatatctagacctcgaggctgaggtggggtggagctgctgggtgattgctgactctctccagctaaaccctgtgatctgctctgtcctgaaggcaaactcagctttcaccagacccaggtgtcccagcgcctggccaccgacctgctatccctcatgcccagcctgacttctggtgaggtggcccactgtgccaagtccttcgccttactcaagtggctcagcctgcccctgtttgaggcctttgcccaggtgagccagggcctggccccaactcagagaagctggcttcctggccatctgctgggaaccattgccttagtcgggaaagtaaagccagtctgaaaatgctcacttgtgggggcaaatacatatttcttgcattttggcttattttgaaagggctgctattcagttctcaaaaaagtgtttgagaactgtttcctctgttctttcactgaccattataagtgcttccatccattttggggtagctgtagcaggtagcagcatggctgatgagactgagaatccactgagaactgtctactgaatcactgatccccctcgcaaagtggaactgtacagaaagatgacacctgcagttacgtttatgtgtgaccagtctaaactaagtttactggttggagaatatttctaaatcccttatcagaaagaagcagcttctaggtgtccccagcctctgtgggtagttgctgccaggcgaaggagtgtctgggcctgtgtaagtccttctctgttcccgacacagctcatgggccctggatggagggtcctgccattgcccctggccatgcaggctctcctcagactcagagccaggcaggaggacagcgtgctgggcagagagcttattctgtccctctgctatttctgacccacccagcacgtcctgaacagagcgcaggacatcaccctgccccacctgtgcagcgtacttctggcttttgcgcgtctgaacttccatccagaccaagaggatcagttcttcagcctggtagggcctctgggctcccactgctcgacctttatcctc

SEQ ID NO: 125329 - DNA, 3217 bp, Homo sapiens
tgcacataaaaatccagctgcaagtgggcgctctggagttccccagtctccactcactcgtcctcccagcccccacaggcctcaacgtcgcctatcccactccaccagcccagtcttccaccgccctaggaactctcctacgcctacgcaagcagggagggatagggtgacagcaccgacaacaaagggtcgtctcccgcactccgtatgaggatggcgtactggtcggggggcaaccgaagcctttcttcctaggttctttatcttttctaagtttcccatgacctatcgctccgcttgagccctcagcaaagatgtcacccgccgaaaggtgtggccggaagctggaggcgtggcttccggacgtgcggggcgaggctcgtctcgtttccgccggcgctccgagtgacgtagggaagcgcgccgcgcacctcatggttccggggacagttagggcggcggatggaggtcagcggtggtgctcgctgcgtaggtcttgtggcacggggagaaggggcggctgatcgtgggtttcgagtgcacaacacaggcgtggctgggaaggtcctgggatgcggtggaactggggagcaggctgggacgcggtgggatgccgtgggcctggccgtctgctcgttccgtgctggcttgccagtgcgcacgcttcctctctagcccgcgcggccaggcctggaagacgccgcccctgttgaccgtccatgaccccagcgagccagttttcgtgacttagtgcaagttgttttctctctgcattttagaactaaagttttggattgctgtttgcctaaactcaagtctggctcctgggcttccgtttactcggctaaactgctcttagggctcttaaaaaattggaaaggcggccgggcgcggtggctcactccggtaatcccagcactttgggaggccgagacgggtggatcacttgaggtcatggtgaaaccctgtctctactaaaaatacaaaaattagccaggtgtggtggcgcgggcctgtagtcccagctatttgggaggctgaggcaggagaatcgcttgaatccgggaggctgaggttgcagtgactcgagatcgcagcattgcactccagtctgggcgacagagcgagactccgtctcaaaaaaataagtcggaaagatttctacactgtgcttaggctcaggaagtggtagatgttgcgtttgggcaaatactccgactctctgatctctctctctttttttttttctttaagtggagttagactaagctttttacagctgctttaatcccctcatataaaaagaaaatgtgctggccatataccaagttccaggaagtggagaaagatcaaacgtacattctgctttggcagaaatgaggcctaggtgaacgttttatcttgcccttgtcgcatgtcttccctggatcatgtaatcaccgtagggagctagactagctgatagaattttttttctttttttttttttttgtgacagagtctcgctctgccacccaggctggagtgcagtggcgcgatctcggctcacttcaagctctgcctcaccctccctagtagctgggactacaggtgcccgccaccacgcccggctaatttttttgtatttttagtagagacggtgtttcaccgtgttagccaggatggtctcgatctcctgacctcgtgatctgcccgcctcagcctcccaaagtactgggattacaggcgtgagccactgcgcctggccgatagaattgttaaaagcaacatcaaggctatatgtaacacattgctggagatggcaacattgagtttggccttggaaggatgagatgtattttaaagggtcttatagggggaggaggagacccagataacaagccctgtaaggtgaagtggaagtgcaaggcctgtttaaaatggggccttgtgttgctgggaggcagaaaaagctaagactgagaaaatcattctgggccatgttatgaagtgcttcttattattggttcagaatttttgctgttagaaatttggtgggggggttttagtaggctagtgatgtaatctaccttggtttcgagaggctcacacctatgtctacagtgttaaaatatatccacagaggctttgggaatgtgaatttttttttttttttttttttgagatggagtctctcacccaggctggagtccagtggtgcaatctcagctcactgcaatctccgcctctcaggttcaagcaattcttgtgccttagcctcccaagtagctgggattacaggcgtgcaccatgatgcccagctaatttttatatttttagtaaagatggggtttcaccatgttggccaggctggtctcaaactcctgacctcaagtgatccacccgcctaggcctcccaaagtgctgggattacaggcgtgagccaccacgcctggccaagcccgtaatttttaatcctggttacccttgaaataaaaaaataaaaaaaaattaatgctgtctaggtcgtgtctgcagagatgccatcatttaggaggccttgggcaggacctgggaatctgaattattgaaccacatcctaggtgatttcaaattacaagcaggatggaaaccctcccacccaggctgtaatgttcctgagttttgatatttgatggcattctgtactgaaacaaaaatcctgtgagacttttgctttagaaaatactatcacatacctatggattgtcaagaaagacttagtctgattttacagatagagtggctttgactatttcatttctcaagtttgtgagtcaggaactgcccctgtagtagccccttctctctcctttttctcttcagggtttggaatcacttgctaggagtcttgtctctctgccacccaggacatcatggcagctcacctggtaaagcgatgcacgtgcctcctgagagaagctgctcgtcaggcccctgccatggctccagttggccgactgagacttgcctgggtagcccataagactctgacttcctcagccacctcacccatttcccacctcccaggttccttgatggagccggtggagaaggaacgagcatctactccctacatagagaagcaggtggaccacctcatcaagaaggccacaaggccagaggagctcctggagctacttggtggcagtcacgacttggacagcaatcaagcagcaatggtacttatccggctctc

SEQ ID NO: 125330 - DNA, 1051 bp, Homo sapiens
ggtggggggtgatagtggaagtgtggaggtggtggtggaggtgtggaggtgatggcaaagttggagaagtgatgatggaagtgaggaggtgatagtggaggtgtgggggtgatggtggaggtggggaggtgatggtggatgtgatggtggaggtgagtaaactgatgatggaagtgaagaggtgatggaggaggtgaggtgatggtgcaggtggggagatagggggagtgtggacaaagggtctcagttgtgaagggaggagagggcagatgtggtcaggaggttcaggtggacatctgcctagcagggaaacaggtcctacgtgtagggggctcttggcttcttgggtgatgcatgttacagttatctttccaatttcttatttcagtattcttacacttcctctgttgactggagagggtaaaaaatctgtccctaaacctggctttgagcagtgacattttgggctcagaatttgccatgtcagaatagtagctgagcattatgctagttgttgctgggtctggtatatgtgtgctcttctgtcttactctgttcatttcatgacagccctaggaggaagggattgttcccattttataggtgaggaaactaaaccttcaaagtgaaccaacttgctttagacactctgaggtttgcttgtttttttttttttttaaagattctgtttaaaagtatttattttattaaattgtggattccacttaaaaatacttttcatgcaagtatagtgtgcttagaatggtttgagtgttgcctatttgggattaatgctttacataaatatcactcaggtaggagatggtgtttgagggacctgaaacacttttccttttctgctgttttttgctggttcttctggatgttggtgtcaggcctcactgcccatttggcctctgaagacacaaaaggtcaatagaaactctcagtccttcttatgttgagcaccacagactgggtccctgcaaaccaacactcattcattggaaatgagttgaggtttgtgggtccatcagagtcagtcatcctt

SEQ ID NO: 125331 - DNA, 1031 bp, Homo sapiens
ttatcagtacacacatattgagagtcccacaggagaggagaaagaaaaaggggcagaaagaatatctgaagaaataatggccataaatgtcccaaagtttttggaaaacgttaacctacacatccaagaagctgagtgcactccaaggtgggtaaactcaaaaagacccacactgagacatgtcattatcaaactgtcaaaaactaaagatatgagaacaattttgaaagcagcaagagaaaaacgagttatcatctacaagggatcttcaacaaggttatcagctgatttttcatcggaaaccagggaggccagaaggcagtggaatggcatgttcaaaggttgaaataaaaatataattctgtatccggcaaaaatcacaagagcagcacctgctgttaccaccatgcagaatcttcttctcccagtgtctgtgtgcccctttccccctctgcccttcttcaggacccccgtgaccaatcctagttgacagtacacacagctccatatctgacttccctgcttttccatagttacatgtgtcacctttgatgttctctgcatgtttgccccttccctgaatagaatggagtctttctgagggcagtgaggtttgttcaaatcctttttttttgagacggggttccactgtgtctcccaggctggagtgcagtggcatgcttcagctcactgcaacctccacctcccaggctcaagtgatcctcccacctcagcctcccaagtagctgggactacaggtgcacgccaacacacctggctaatttatgtattttttgtagagatagggtttttccatgttgctcaggctggtctcgaactcgtggactcaggtgatccacctgccttggcctcccaaagtgctgggattacaggcatgagccaccatgccctgccatgaatcttttattcactgctaaatcccaagcacctagagcaatgccagcacatatagccctcaataaatatttgttgaataagcaagtgaataaatgaattagaatacttaaaaa

SEQ ID NO: 125332 - DNA, 1148 bp, Homo sapiens
cagctaaccctactcattcatcactgtgtgtgtggctgttttccagggaggggttggcctgtggacagcccatacacatgtctgagttggcactgagtcccagcgctgaccatggagcctggcacacaatggctatccccgcctgtttaagtgggacagtgccatgccagtgtgtcctctccgatggattctagactccttggcctgttacctgaagctgggggacctctgatggcgcccacatatgagaatggccagaggaggggctggggtggcctacaacaggcactttttggccagcaggagcctcatttggggaagctgagttgggctgggagcagggtcagtacctgggacagctggctttgggtttccttagggctcaactatctgtgcatgatggctctgaagagcaggggccacttcttaccctccccatagctgtaaacaggctccagaatccactcgtggggagatgcatctgcagagcaagcacaagtctgactggctgtcaccaggtggtagtgagtgtcctgtggggttggagggaggataccaagctccccaagacccccggcgcccacttcgcatatgcacagccatggctgagcatgaggctgcccctggcaggctcctggtggggaggttctttgctatttctcagcacatgattgagaagcaattgtcatgtcacctgggacaccttaaggtggattcttaggccagatccagaaccactcatcagagtcttagggataaggaatctgcattttgctaactgccctggattttgcaggccagaggctgagagccactctctaaagcttgtgctcgtatacaggccactaggcctcagaggtgggtctcttggcattctccactctgaccccatgggttttcctcacaccccaaccttccagccaagtgagcctctcgctttccctgcctgaagacctcggtttccgccatccatctccatgctcctgcccatgctctagcccctccagacccctgcacagtttgtaatggacagaatggaaacacatctttcttcacacagcagggaaagtgtttccctgtcctgggatccttgcagagtgacctgcccagactctatcaggggtggagggtgagcggtttctggagga

SEQ ID NO: 125333 - DNA, 1022 bp, Homo sapiens
atggggaaagggagaaggagatcaatgtgagcctggtcccagccctcaagactgtgctgaccacgcaagggtgtggcctgggcgggaaggtggtggcccaggtgcagcatgtcttgccagcgctctgtggccaccagtgtctagaggtggtggagccagcagtggcgctcacagcctctgtagcgctgtctcttaccatgtgccttgcccttccctgaaggagaaccactgtcgccgcatcaagattctcggggactgctactactgcgtgtcgggcctcacccagcccaagactgaccatgcccactgctgtgtggagatgggactcgacatgattgataccatcacgtaagtaccccgtggggctgagaggagtggcctggggcatctacacattgaaatcctagaagctgagccaccttctgccccatgtgggctcccctctcagggtctcgctttgtcctgatgggtctgtctgaggctgcagagaatgatgccagcattaggaggatgctgggttcaggaaagcatgaaaggatgcttccgtgattccctgcctttacatttcgtgtgtggctgtatttctttgtccacaggaatcctgcatattgtcaggtatgcatgagtcatacaaaaataaattagtctttagcttagccagataagacatacagaaaggtttggccccaatctagctgaattctctattaaaaggaagtaaatatgtgtgtttctcttcactcagcaaggtaactgggtctcagatgctctctgtgtggggagacaggcttgggatcggggcaggtgagtcttcatggaatgaatattacacctgtgaggccaggcctgcccatttcttggtcagtcttatgttgtcattgtccttatcagagactgggatgaagacacagatgtttttgtcaagttagggaaggtgtggagctggaaggctgagctaatgtatggagtgtagatccaaacaaacatctcaaaatgtggagaggtgggtatgctccaatgag

SEQ ID NO: 125334 - DNA, 1033 bp, Homo sapiens
atctgcatctggctggcaagcaggcatgggtccctgcgagggagcagtggcctcacagagccttatgttaatctgaactgtcctgatgccacactccacagtaatgaccaggtccacctgggatttggggactgccctggtcagggagggccctctaggaggccatgaatggaactcatgagtctggtgtggacatggtgcgagctggctgggagcatgggccagagccacccctcctgcctaaggccctcagcccacaggtgggcaggaaggctccatgtccactgactatgccaggagacctccacgctcaggccacatgcagcaaggacaagacccagtttccctggtgctcacagcctagcagtgcagaccaaggtggccccctgggaggatacaaggtgggccctagccccacgctctgtgtctgtgttgcagatctgtggctgaagccaccgaggtggatctgaacatgcgtgtgggtctgcacacgggcagggtcctctgtggtgtcctgggcttgcgcaagtggcagtacgacgtgtggtccaatgatgtgaccttggccaatgtcatggaagccgctggcctgccagggtaagtcggggatggggtggggaggggagggaggtgggtgatggctgtgcacccctgggctaaatccttgcttcaggttctgggctgtgctcttgagggcacttgtgtgagtgctcctggaggagcctgcctgtcccagccgcacctgccaaccagactccctgtggtgggcgtcccacccagcctggctgccagtctgtgctgggcccagctgagcctggcgcacatctacaaaaagctgtcattggaccagaaggccagagcagatgcgtgtggggacctctgcccatggcatggtgctgtcctcatggcttgttgtcactgcatcacttctctttttgctgtctttgatttcattttctcaatgtgcaaatggaaagtgctgggactttagagctccttctccacccccaagctccacacagccatctaggag

SEQ ID NO: 125335 - DNA, 1097 bp, Homo sapiens
tcagctgggtgcactgcccagccctccccatcctccccatgcgatttctttccttgtctgtagaaggggacatactggaaactgaacggggtaacaaagaccttcattccaagccctggttgtctttcctgaccagggcctccagccttcccccgcactttgcttcaggattccgagcatcacgtaggcttttagaggcctttggtgcggattgagaatggaacgttttggacgtggccctcccaatatggttttgtttgctgctctattctgggcacgttccccaatgcctggcttgaagtaggcgctgagcaaatgaatcccagtgccctggggtggctgtgtttgtcaggatggcattcccagtccgagaggcacaatgtgtctcattcacagcatttctccttgccccttgtgtgtttggacagatatttccaggcctgattctctcagatataaaaccggccaaaaggatgaagttcaagactgtctgctacctgctggtgcagctcatgcactgccggaaaatgttcaaggccgagatccccttctccaatgtcatgacctgcgaggacgatgacaaggtaggagcagccagggagcctgccatgctggagctgccagggactgatctctgtcctgccctcccaatatggcccccgtgccatttggctagatcagaattccctgttcacatgtggataatcttgtaaatgctgctcagagctgagctactttttatttcctgcaaaagtcattatagtgtacttttttactccttggcattctttgtatttgtccataatccatgtatttattcctgtttatccataaattcaagctaaaattccccacctgctgtctaaatggcctctgagggtattcattctggacagatgtgctaggccctccctccttaggtggatttcacactaaggctggccctacccacctgtcatccttgcccccagcgtccaagcctgtgcctcatctgtctgtgcctgtgcggcttcctggctccctctctatgcaggagctcgctgcctgcagatggccttcctctgttactctcggttagcagcccagccaggacgtcc

SEQ ID NO: 125336 - DNA, 1050 bp, Homo sapiens
cctcatgtgacatatggaagctgtggaggagaggctcactctctgttcccatcagccctggccagagtgagagactggtgaagccactccgtttgccaccgtttctctctcttagaaggagggggttggactcctgctcttgtaactctggggaatctctttctgcatgtgttggggttttatgagtttaggaacctgctcttactgggatgctgttctccccactgcaaacgtgtttaatcacctaatccttgctgccatgccatcactcaggggccataaaaccgccattacaggtgtgggaaccccaacactggctgctgagatgactcacctgccatctcaccaccagcagggcagagtcatgattattaaatgtcagattcccaaacccgaccccaccctgcagcggatctggctggagggagagtacaggtgcttttcttcaataagtggagaatttgatgatactcctttatttccatgatggctccagcggagggcattaagaacagcctcggaaaaactcagaaaccgctcatctttttctaccaacgttgtctacaccaccccgggcactcgcgtcaacaggtacatcagccgcctcttagaagcccgccagacagagctggagatggcagacctgaacttctttaccctgaagtacaaacatgtcgaacgggagcaaaaggtaagcaactctggttttcggcttccctggtgctgcttgcgaaggcgctgcctggctggaggaagccctcagccctgatggattgacttctctcttacacagtaccaccagcttcaggacgagtatttcaccagcgccgttgtcctcaccctcatcctggctgccttatttggccttgtctaccttctaatattcccacagtgagtatttctatcaacgaggtgaggaactcaccaagaagtcccggtttctggggttcgtggttgtgtttctggggttcgtggttgtgtttctgttgtatgctcaagcttcgtctcccacagttattgtcccaatgtgcccaacatggctgacattag

SEQ ID NO: 125337 - DNA, 1141 bp, Homo sapiens
agccagagtgggaagtcaggcctctctgggaaggtcacaaggcctggggttgttcacaccacaggcacaatacagagctgtccactcttgaactggaccgtctggggagaattgagaagctgcctctcactgcatggatagtggtggctgctggctttcaagcgtggttttttgctaagagccagaggcaggtcttctggagttctcaggggggccctgtgaccccctctccacaaccatggccagcatcggcttcttgctgcacctgtgcattctccacccctccgccaatggcttccagctcctaaaacacctggacattccccatcctgcaccggcactgtgtttgttcagagaaaacgaagggtgtcatttcttcttttccctgtggcatcgtggatcctttacatttagcaacaacagtgtgaggctccacttctgttgaatatgagcggctgtcacacccatgagcaagtttccttgatggaagatgctgtttctccggcagaaccaaccctccaggacgaagtttcagaattggctgatggtcgtgagtgcaggtgtccctgttgtaatttgcagggaaattgactgcaggtgatagtgttgacgtctgacgtctgacaacctcctatgtgcatgtctaaatagtcacaatgaagatgaaaataaggatgatggggacggggtccaggagggccactgggaaggcactatccagaaatagtggacagaggtctggcatgtggaaaccttggatctcggtcacagggaggaaggcagctagaaatgggagggaagcttctgggtaggcaccatagtaggggaatgtctaaagacccactgctctgagatgtggtcagagaggtttctgtggactgcagatgaggcctgagccctgcctatgctcaaagccagcagggttgggggtccgcctcctcactgctcctcaacagctgtaaccctttcctgagggccccgacttttcagaataggagcagagagaagcccagacttccttccctggagtgtagacctgtgtgtgggacctgctccaggctgatccctgtccgcacaggtgggtgatgtccttggctgctgccgtcagaggcagccccctgcacagggaggggctgatcct

SEQ ID NO: 125338 - DNA, 1030 bp, Homo sapiens
tatacagaaggattttttcccttagaaatacatacatacaaaaaaaatttgtcactttccctgtagttgtttattatgctgtagaatttgaggctaaatagtcttttctctctactgtgggtttatcttctagaaatgataaaggattttctatttcttaaaaacaagatttaaagactaaatttgttgatgaaaagactagccaatataaatctaaatggacagagggaaaaaattcaaccggaatgtaatacacatgtgaactaaatgttttctgttgctgacgtcttgtaggcttctgaaatttaatgagacttttacaaggtttaccttttttcctaaagtttaatttctaaactgacttaaatgttttttgaccctttggttatatttaagaagttgacttctctaatttccttgtcacgtttatttttaaatatctttctctttaaaagttgggatactataataaatattcagcaagtattttgcatttaaagataaaatcttcttatttggattttaatactttatattaaatgcctttaagatttattaaaattttaggttaactgaactctgcttttttgtcactggattaataagcaggcttgtatctgacataatagcttaataaggcagtgacaatttaaatttgtcatgagtataaattgaaaaatcataacaatttagaaatcggagattgaatatttcatggcatttatatttagtgttttatataatgattaatgaaaagaagcaaaacttaaattttttttcaaagatggataggttcaggccagatgcagtggcttactcctgtaatcccagcactttggggaccaaggcaggaggaccattgcttgaggccacagactaggcaacatagtgagatcctgtctctacaaaaatttaaaaattagttggggctgggcgcagtggcttacgcctgtaatcctaacactttgggaggctgaggcaggtggatcacctgaagtcaggagttcaagaccagcctggccaacatggt

SEQ ID NO: 125339 - DNA, 1508 bp, Homo sapiens
ctgcttcagccacagttaccatgaataaatgatctgtctttataaaggagagggaggtgaattcaagatattgagatgttagatttgactgggttgtcctttgactagaagatcaccagataaagaaaatgtaaactacctaaaccagataagatgatattgttaaaaattttttttggcccagcactttgggaggctgaaatgggaagattgcttgaacccaggagtttgaagctgcagtaagctatgatctaccatgcactccagcctgggcaacagagtgagaccctgactaaaaaaaaaattttttttcctttggttctcatgatttcacactgatgaatctgattgttttctctgagtcattttgcctctctcatgttattagggtaacctgataatagacatgttatcttagttatgtggtatgtaacagtgatcttctaaatgatgtgcatccatcactgatgctgaggatgatcagaaactattacaactcttatttattgatgtttacttttaatctacagataaatgataatacatattaatacttaatattcagattgccaataatatatatttggtgggtaaatatcttttggatctgcaaaattttcactgatagtttgtatcaggatcaaagcagtttcaagaacattaatctaaaagataagactttggcatctcatttctctaaaagataagtcatgcatgtccacatctcaggcaatttttttcagttttataagttttattcttgataataaaattcttttaacagaaaactcttgattgctatagacctctgctgtgtattcagtagtcactagccacatgtggctatttaagttaattcaaattaaataaaattaaatatcagttccttatttgcactagtcagattttaaggagtaagtagccacatgggcaagtggctaccatattggacagtgtggatacacaacaattccatcatctcagaaagtgttattggatagtgtggctacagacttttcttgctcagcaatcttagtctccgcatgttagtctcttcatgcattaggtagcatctataaaacatgccaaaaggaaataggctatctgtaaaagtgtcccaaactttttgtcttgtaaattagcttatcagcatacttggagcctcttgccttaataaggacttgatataaatatgtatcaggagaaagcctatcttatgaaggaattattccctttttatttgaatccgtgtttgctttatcttgggctcctgaaaactgatactttgcatttaatagcagcatatgcccaggatgaatgataatacatcttctgatacagagcttgaggttacagaatatcttaaattgttccaggaactgttgttatcatttaagtccaataatcagtaaggtttcaccctaccagaatacacttttttttattaactgtctggacttttgctgattacattgtccagaatgtggagtatcgcatttgagaagagg

SEQ ID NO: 125340 - DNA, 1079 bp, Homo sapiens
gtcttcatgccctagtctgcagcccaggcattaagaagaaaccaaggaaatttaagaaattactcaaggttcttagaaaagaagtataaatacgtttatttacatgttcttagagtatttacattcttagtatctcttttatctcagtatttccttgaaaaagaaagcaagctaagattaaaagaaattgaaaccaaatcctcgcaggtagggacctcctctgtgaggctctgtgctggaccctgggaatgtgtgcttcccaaggtatgaaaccccttggggaactttacagcaggacctcagtgagctgtttggcaggtgaggaaactaagacccagagaggagagggactttcctaaggccctggtgagtgacctgccagtagccacttccaggggagagcagagcatctgcagccaaatcattgcagccccaggtagctttctagaatagactgtggaccagatgggccacctgagctccctgctagggttacacattatagccctgtttgttgtagtagagaaatttcatgactctcaattgtggacttaagccgatgcctccagaccttggcatggtccacaggccctgggagcatgggctctgaatgtagcctttgatccccatagcggtcttacagcccctccaagttcattctgaagaaggaatggagtgagaatcctggctgcagatccagtcttgaatttagtcatatacttaaaattccaattcaactgttaacattccagcatccattttaagcatcagactttcttcatttagcactttttattataaaagggagatctgctggagggggatttctcctaccccacccccacccagggaaggaaaagctctttggcacttagaagtctgagccgtgagtgggactttggcattgtctgcatccatgtgctgctgtgttcacccggggtgaaaaggactcacttaggcaggcaccagcaagatgcacagggtctgtgtagaccttgagttttagagatgtaacggggacctagaaaacaagccaccaacatgcttgcatgattctgagcccctgaggcaaaacgctt

SEQ ID NO: 125341 - DNA, 1041 bp, Homo sapiens
aatgaataaaaacatgtattatggagtaaataatgaataaaaaatgggataaattaaatgtgaaatgggagaaaaactggcatttgtgtttcctgccgagaggaaaaagccagcaagagaagctccagggaaaggtggagcatctgagtccctgaggcagttggaccactgtccctagtgctggatgccctgctgaaaatgcagcattaacccctttccattccacagtttctttcacctagcatgggtgaggcccggatcagtgtttctcagaatttctttgagtttccaatttctgtttccaggatgggaggcattcacaccccatttggtaggtaaaagagaaggagaaactgttttcctccagcaccagcatcaggaagcagctgaggttattgattgtggctttcaatgatgccataagtcccattgctaatcatcccctctggcactgtgagaagctgaattattggtattggtttccctacaatccttgtatattagattttttgaaaatggccttttgacctttctcccacagacttcccaatagttatatacaacttaactgactgtattaaatatatctttactaaaaatatctagagaggcttctgtttctctaaatgagcactcactaatacagtatttggttttgagataaatttggagataataagaacttcattaatgggaattcaggactggttagctaaccaagttggtgttgaaggcagaattaattttatccagtggaaaactagacactggcagttgcaaccatatgatcacattagttataaccttaagttgcctggaataaagcagtaatggaaaccttagaagaaagtgaccattgtagtagaaaaattgctatgaaggtgttgaagataaaaggagtctggagtgagcaaacattattactactcaggagagtattaaaaaaaaagaaacagttttgagggtttaaatttccagaacaaggcatggtcaaaaagctagagaatttctacatctgtccctaaaacatcaaatacctct

SEQ ID NO: 125342 - DNA, 1047 bp, Homo sapiens
tgctccttgccaccttggggttcctgctggggaccatgtgtggttgtggcatgtgtgagcagaagggaggatgaggaaaaagagaagaaaccccggtactgacaagctgtttttgagtgccactgtttgccatcatctaagccactgaatcaagtgtatttcaggcttatttcaacattccaatgccctggttttcctgcttgaatctgttcgtggtcaaaggtttgggggaatttgtgaccctggaacatccccagagtgaaagatggagctgggccacatcagaataaggccttggccccatcctctcacagcctaggtgctctgcaggcatgctgactgtcctgattgcgatccagcccgaaattccctcctctgctttcaaaagtcaaatcccccattcttaggccacactggtgtcacaagctcctgtcagggagctggggtttgggaatgtgctttgtgaactctgctttaaagtgaggggccgaggaaaacttagaaacaggcagagttggaagcagccaaatcacagtgggtgttgtgtgtgtgtgcgtgtgtgcatgcgtgcgtgtatgcgtgtgtgaaagcaggtggaccattccactttttagctcctattgatgcaccaaaccaagtgcctcatttctgtgccaaatgtttgccttggtcgttgtggacctccttctctaacttgcggtggcatgactgtcaggaggtgctggcattttcagcagatcctcatgtgttgaccctgatgtctttagcagaggcctctagcatctcggtttttcatccactgcaggaatgtggccacagggagcagaggtttgtactttccccaagaggtcctcatcctgagacggtctctacccatgtttaacccaaagagtgcaggccaggttccttatccttctgatgaaggatgagagagctcatttagaagtcagagcaaactagggtctcagtattgagaaacgcagcctgccagggaatcacagagacatcggggtgcccgcgatggccctcatgaagccatgcctcgac

SEQ ID NO: 125343 - DNA, 1101 bp, Homo sapiens
ccattccttctcttggcaaccaggatttgaggacacatgcttccctcatggttgtttctcaagggcctctgggctccttacctataacagtagttgggtttcatattaatgtgactgttgtccatacccaccctgagaccagagaaggtgccttgggctccacctgggacacgagggtttaatactgctgcagggcgaatagaaagctccctctggctggtgggaaggcaaagccacaccaggcgggtctgctttgctctagtaactcgcttattctctgccttgacatgggagtaagtgcatccttggagcactcactgttcatgttttcagaattaggggcaaaggccatctgccttacatgcacccagcataggccacatgcgcaagttgttcataaacccagtctgcacatcagcaactgcctgtgtgttaacaggacacacctgtcccaatagttgcaactaacatgtgtctcccttggtgtcttccagcctgcaatgtgtggtacttgaactctgtggagatggagtccctcaccggccaccaggcgatccagaaggccctgagcatcaccctggtccaggagcctccacctgtgtccacagttgtgcacttcaaggtgtcagcccagggcatcaccctgacagacaatcagaggaagtgagtgcctagagggaggcaggagccgtccagcaggggcggggctgtcacgttcctcttgttcttccctagtgtgagtagtcatccaggtaaatcattagccgtctttgaggtcatgagtcacccagggtctgtctaggtatttttctgtcattaaatacgtcctgggaaccacataggaactcttagcatttgtttgcaaggctatttttcttagaaatcagtaaaataaaataaaaaaagacgtttggcgttttaaaattacacacatacacacataattgcaaatgcaaaaaatcttttaactcagttccttaaaaacactctgatactatgatcagagtccaatgatcttggaacctattgttttaacagagggtcatttcctttcaggtgagcgtatgaccttgatatgtactatttccgttggccaatttc

SEQ ID NO: 125344 - DNA, 1008 bp, Homo sapiens
gaattaataaatgaattgaatgaatttagttgatcataacagtgcatcctaatagcacttgtttttagatattaaaactttctcttctatcttgacttatcatttttaagtgcacttccatcttttaaaattacgtatgaaatgtatcaataactccaaatgttttttaagggtgggtcttcttagagtcaagacttcattcagaacttggagtttgtatctgatcatctgagttgggcatttatatatgaagcttaaattatgactgccttgagcttctttcctttaaaaatctcatttctgaaacacattgagagctgcgaatgtctgctgtccattacattaaccgcgattccaagccacggaaccaggacagcagatctgtcaccagaggagtgaggctgtcacagtgaccacccctcagctagtgtcgtcttcacctggaggattggctgcaggtgtttagaatcagtgcagaacaaccattgtagcaagacggtggaattattgcaatctctgatgacctccagcaatttagtgagttttctttcctaaactgaacttcatctgttgtcctaattcacttagagtcctagactcctggatgtgcaatgttctttgagatgatcatgtccaatttccccgttataaagattcaggaagctgaaactcagaaatattagcagacaactcacaaagatgggaataaacttgtaatgctctccagtttaatccctttttttaaatattaaggccattatgcctttgttccaatctctaaaacaatttctatttgtgttttaagcctcggttcttaattgtttcttgttgaagcagaggaatataatataatcctgaaaagaaagacttacttcttttcagtagccttctaatagatttcccagaaatgttgcagttgcattttttagcatatggtaggtatacttttttttttttatagagtcttatatgttctttaagttttaaaaatggaaaataaaagaaaag

SEQ ID NO: 125345 - DNA, 1992 bp, Homo sapiens
tgagttcatccaaattaaggagagaagaggagattctacttcactgacagctcccagatagctttacatcatggattttgatgaaagatttctatagagcaaagattctgtagtttaaaaatataaaaccctcagacaaagaaggcttcagggtcattgacatttaatttttacgtttctacggaatgggcaaaatgttgatgttgttgaacttagatgatggatgcactgttctttttacttttatgtttgttaaacaatatccataatgaaattaaataacacccacagcatgtcagggcgatgtgaccgtatgtcccactttcctaagcagtcacaacttcacataaaaatggtctaacttaatatataggtaaatgtgatttacttttcaaagtgtcattgttcatatgactaattcggtgattagaaaaatattttgttaggccttgtcatctctacttttattcagaatgtgatcatggtttctatgggccaaattattgtcccaaagagaaactcttgactctgcaaaaccattgcatgtcaccatctgggaattctgtcatcaaattgtctaactttgtcatgaggattcttggtcaggagcaggactcatttctgtattttcttgccccttcctacagatccattggaggaaatagcagaaagttctccccagacggcagccaattcagcagctgagctgttgaagcagggggcaggtcagtaaatgcagctccatttctacatctggtgactggggagaaaaaggactcactgacacaacttccttttgcacttcagtattcaggtttcctttcttttctgtgagccttgaaggaggtttccttttatagaagcttgcacagagctgggtggggtgcagttgttgggacatcagcaaggccttcatgggccggtctaactcaagcaagactaaattcagtggaataaatgtcaagccctggatttagtttgggggaaaatatagtaagacaggatgtgggtgatctgtctcggcaactgtaaatgtaaaaatgttccagagacatgactcaacaagtcacttgacatgagtcaatgatttgacccacactgccagcaaccccagtgagacatacaacacccaagaaccagctcgccagacagagcaggtcacttaaaaaaattattcatagagtttcttttttagagcagtgacagattcacagcaaaatggagaagaaggtacagagatacaccatatacacgcatagcctccccgctgtcaacatcccccagcaaagtgatgcacatgttatggttgatgaacctgcattaacacagcctcgtcacctgagtccctagtttagggacttgatatttaggttcaccttgatgtcatgcattctacaggtttggacaaatgcataatgacaggtaatcaccgttacagtatcatagtgaatagttttattgccctaaaaatcctctgtgccttttctgttcgttctccctcccccaccaaccccaagcaaccactcatatttttattgtctccatattttcaacttttccagtattgtcatatagttgaaaccatacagttcatagccttttgaggttggctcctttcacttagtcatatgcatttaagtttcctccatgtgtttttatggcttgatagctcatttttttttagcagcaaatatttccttgtctgggtgtatcagtttagtaacccattcacctactaaaggacattgtgggtgctttcaggttttggcagtaatgaataatgctgctctaaacacccatgtgcaggtttttgagtggatataagttttcaactcctgtgcgtagataccaaggagcgcattcctggattgtatggtaagagtgtgtttggttttataaggtacaggcaaactgtcttccaatgtggctgtcccattttgcattcccactagcaatgaatgtgagttcttgttgccccacatcctctccaga

SEQ ID NO: 125346 - DNA, 1041 bp, Homo sapiens
gagcgtcaccgacccccagcatcccgctgacagcgacaggggctgccgacaatggcttcctgtcccacaactttctcacggtggcgcctggacacagcagccaccacagtccaggcctgcagggccagggtgtgaccctgcccgggcagccacccctccctgagaagaagcgggcctcggagggggatcgttctttgggctcagtctctccctcctccagtggcttctccagcccgcacagcgggagcaccatcagtatccccttcccaaatgtccttcccgacttttccaaggcttcagaagcggcctcacctctgccaggtaggtgtgtttccagctggttggaagggcccctctgtccattcactggggaagggaagggttcagacctgcagctgagctggcatatctctagtgctgggctgggcacctggagaggaaatccagagccgttggggtacttttccattttcctcgtccaaaaccaagcactggctcaggcttttcattcactcttcttggcttctgtgtttggccaccttggattccttccagttgtagaaagtgcagacatttgcagtggttctactttccatgtcacttgggaacatggctttttgtaaataacaaattccttgtcaaattaaattaattcatccaaaacgtcattatgaaatatttcaagtgtataagaagcagtgtggtctatgggttgaacaacaccaaccttaccctctctttcctcactaccttcctatgtattcttaaaatgtattgcaaaggctcaatccaagcatcctgttgttctgttttgtgttataaaacagtcactgcctcctccaactcagtcatttcaaaggcagggttccctttccttagaacatcgctcgcttgcttgcccttggcatgggatttggacttctgggatcacagcagatgagaggttgcaagaagaaaagtgcccatcatggtcactgtttttaaattttgctttacagatagtccaggtgataaacttgtgatcgtgaaatttgttcaaga

SEQ ID NO: 125347 - DNA, 1045 bp, Homo sapiens
ggaactggtctgacagagggaactacacagccagagtgccccagagttggtgctaattgaatgataaacaaagccactttcatgggaattgctgggcttgctgttttctgggacaagcactgtgataacaggaacaaagtggattttattttccttcagcctcttctcatttggtgaaattcccaggcgccatgggagtgcattgagggcttctgagtcatggcatggggtcttctagagccttgaggcacggggactctgtaaacagggatgtgaagcaccagggattgcccccgtggctttgtgggaaccactaagagcaatgtcagtcatagaaacaggtactgcatgctgtgctgggtatgtgctcctctcttatatgactctttgaaagctcaaccaaccaaccataaggtgggcatattaaacttgattaataaacttttttttattccaaagttctgtgctgcttcttggcatgagaccctaggaactgatcaaccaactgtccacctactcctctgaaccagacccctgagcagtatttccacgtcatgctctgaacctctccctctaacctctaagcctttgctagttcattcattaattcacaatgtgaatgacatggagctcctacaggtgccagcccagtgctggggacacagcagtgaatggcaggagtggcccctgcccaataagcaaagaacccatgaggtggttttgtcagaatgcatgccacccatccttccaggatggcattcatcaaatgccacttgctccaggaagccttcagatgaagctccctccagatgaagcaagtctccctgtgggtcctcctgcagctcaagagctgcacctcacatgttcctccatgcagtagtaatttgcacatggtctcatctggctgacacaagcaggacacgcaggcactccctgtttcgcttttgtttctctcttccgttctccggctggtgtaggccatgttagtggaaaactggtgcccagcaaagacattttattttttatttttattttttaattttat

SEQ ID NO: 125348 - DNA, 1114 bp, Homo sapiens
gctcactgcaacctccacctcccgggttcaagtgatttctggctaacttttgtattttgaatagagacggtgtttcacaatgttggccaggctggtctcaaactcctgatctcaagtgatctgcctgccttggcctcccaaagtgaagataaggactttaaaaaaaaaaaacaaaaacaaacaaacaaaaaaataaaactaatcactactgaggaaactccaatacaaagtcttgcttttctaaattagaatttaaaaattcctagctaaataaaccctagaaatcatctaatctgatcccaattgaagtgagtctgtaaatgaagatcctgaaggccccaggggttgacaatgtgcccaacaccccatggtttatggcagaagagctcaggctagaacttggagatctgagctgtttctctgcagcagccccaattccccgcctagaaatgtaatggaagaaggatacgagagatttgatgttccatttttttagaactctctcaaataatggaaaaagatacttcctatttaactgcataataatcccgggatgtgactaggagggaggaaagaatggagagagagagagagagagagagagagagagagagagagagagagagagagaaatagttagttaggtggatagtctcacttacttctgaaagtttattgtgaatatgactgtgtatttatgggccaaagattgagactgtatttttaggtagttaacaaaactcaagtttcttcacttggataggagactataatattgacctcagctaaatttattttatttttcattaaaggtgatataaaacattcaaaggcgatttgtagttactaattgatgtatgagtgaataatttttatgccttatcaggaacacgggaaattgggaacacaggaaaatgctgattttgtttttaatgtcacatgtcctgattttttgctaagtaagttatggttcctgaggatgaactttgatgtttggatccctcatgaatgtttaatatgtctgacaactccttacacatttaggttgcaggttttggccaggctctaaggcttccgaagagcgagccagtggccctgcctgagccccgtgggt

SEQ ID NO: 125349 - DNA, 1106 bp, Homo sapiens
gagtctcactctgtcacccaggctggagtgcagtggcgcgatcttggctcactgcaacctccgcctcccgggttcaagcgattctcctgcttcatcctcctgagtagctgggattacaggcatgaactaccacgcccggctaatttttgtatttttagtagagacggggtttcaccatgttggtcaggctggtcttgaattcctgacctcgtgatccgcctgcgtcagtctcccaaagtgctgggattacaggcgtgagccactgcacctggcctttgctttttttttttttttttttttttgcccgttctacttcactctcatgtgctttcccattggtttgtggttttgctgttgcatcagcttccttctataggtcaaggctatgtaatgtacccagaccctggtcctggggctgagggaccagttctgagggatgcttgatgcttttacagttctttagcctttaatctttttgtagaatgccaatgagactcctccttccaggacagctgggagggtcgggaagtcctcagtgaatgttcatcatcaggaaaaccttggtggatgatgggcaggagggaagcttcagcagtgggtccccctccctgaactgctggttagagagaggcttgagtgctgtagacaaggaggtcttttatattgtgttgtgcattctaagtggatggtctttgggggaagaaaacaatgtagagtaaaatcaggacaatttggtctatttgagcgaaggtctttctgaactcccaagtgtttgttccctccttcccctcagagcacaatggttatttcttaaatttatttcctatgagacaggagtaattatgggcagagggacagatgagagcttcaagcattgtccagttctgtcccgggacagccctcttggagagagaaccacctgtggcagagactgtggattgctgtaaattatcttattaattggaacatcacttgttatattggagcaattatagcatgttcaaagctttgctggaaggccctccaaatgccgacacaccctgctggcatttcagtagtgctggtggcctctgtattcgtgagttttggactcagtggaatggagc

SEQ ID NO: 125350 - DNA, 1068 bp, Homo sapiens
gaccatgcatcaacatagttctaactgctgcgcactttgaccttctctcctctacccttctgtttccacttccctgtctttaaaaaaaataacatccaaggcaatcaagctgcctagttgatgtaggatcaggacaggaagcctggtgggtgtgatgcatggaaggtggtcttactgctgtcagacacaggtctgggatggctcgaagtcctgtggtctgatgagaataccatgcccattttgtttacattaggctcacctgagacaggtggcctctccctcctatcaggagggactgtaaacagaatgagtttacagtaagagtcaagggaccagaaggtccccgtcacacagcacactctgccttcttgctccgtcccattgctcactgtgattttaccaggagataacctaagaacgcaggactaagaaatcactggaatgtcaacttctcgttccaccacgagatagcagagtggcctgtggccttccttgagcagtgttctctgtggacatatgattcttgattagcctcaggtagaatggatagctgggtggagaaggcaggtgggtaccgggtcacccaagtaaattaaagttaaacagggttttacaaacgtggagtggaagatagaggaatgagggctcagctggcaggaggacgagggtcaccagtgggatgcctggctttcttgagtgaccaagtacagatagaaaagcttctagaatgctatggaactcatttactgctctgtggaggtaagaaggaaatgggaccaaagataaggcttgcttctggaagatgtgggtcttgggaacccctctttgtgcatctgttgatgggagtaatggatacacaaaaccacacggtccatcatgcttccaagctgactcctccaagtctggtttcccttgatagttttcccagtggtcccatcacttctgctgcctactagatttatcatcacgagaaaagtcccagtttcctttgtagctcatgctgcacttgactggaggaaatcaagtcaaggatatcttggtgacaattgaagggatacaggaattata

SEQ ID NO: 125351 - DNA, 1452 bp, Homo sapiens
gggggtttgattttggaggggcaggtttgggggcatggtgggcaggtcctgccgcttgtgccttgggtgatggctggcctgaggctgaaactaagcctggttgggtttcagcagggaggttgcaagaaattaaagttgggggaggaaaaagtgaaaagaaatgaaaaggaagcaaaccgcagcagtgagcaaggcggggccagggccgtctggaggcactgactgggcaggccgcccgcgacagccagcagcagctcaacaatcccgggattctttcccgggcctgagctctctcggccgccctctgaatgggcctctttggaggtggccgccccgccccctgcacgactccctcgggacaggccggaacacagagccctgcctgggtgggtgggggacgccaccgctgggacagggactcgggactctgctcaccacgtagggctgctggggacacagcccaaggagttccctctgtctggcccacatcctcccaggcccttccatggactgaccagggtcctgggtgccaggtaagctgtacattgggactcattgcttcttcctgctcagtccctacacgcctggtgtcttctgtgctcctggcgcctctggcccggatccagttgcccttgctgaaacttgatctcctgggctccagtggaggggggtggggaggggtatgaggtgggatgcagaggtcactgggccaggaatcctgggcaggacttgggaggagggctgattgttccaagagtccccttgtcacttgatgacagttctcaagtcgccaaggctttgggacaaaacgccccagcccttgagcctggagggctagtccttccagaagaaagtcatgctttgtctttgctgagattcactcagggctaacaaaagcctggtttacagatgtgcagcttttctggaacaggactgcttcctagcacagtgcattcctttactgaaactgataaagcgagcctgccccattccagggctgtcaccgcccccaccccagttccagggcccttgagggatcccgggcagcgggcagcaggaccttcagaggaccagaaggctgcacttctgagcacccagcacagttgtttctactaaatgccgaaagcaagcgttaggatcaggcgctgggttctaaaatgagatttactgttgtctcttctgtggttgaagcaagcaaagagagtatttctaaacgagttcatgtcattgaaaaaaacaaaaacaaaaacccatgcattcactgaaagaacctgctcagattatgttaacagagcttctggacctaggggctttgtttcttcactgtcccttccctcccaaatgtctgaactggggctggggctctgtgggaccctgggagagtcagccaggcactgggggtagcacgggcagggctggcgcctgggcccagggtgggcctcctgggcatct

SEQ ID NO: 125352 - DNA, 1055 bp, Homo sapiens
cattctttttgacacacttgggagggtctgggattgtgagacttgcagaagggtcagatgtcttgagtcactgagagggctgaagaaggaatatgtagtctgcttcttgacatttgttactggcccgggcctgccccatcagagcctttgagggcattaccaaggtgccccccagattagtgtacctcctcaacagataggcattggccaggctgtcctacttaggccaggaaccaccttgttgtctgtttaaattctatcacattttagtgacacacatatgtagacatgttatatggtacatatgtgtgttatgtgtgcaggtatttatggctctgcctagattgaggcatttgccactttctgagcacttcttacaggccatgcacttatatatgcacacatgtagagaaagagcaaatgaacaagtttacaaaaaatcctgaaagccaggcaagtgagaattccatcatttggaatgaaagtaaacttttctgatgcttcagggccaaccaagtgtgcgatgggcgtcagaggtcaggtctccatgtgtcacctggcagagggatggtgtgagcagctcactggaatttgatttttccagaggagcatgagattgggttactgtgaagtcccagtgtcgctgaggttgtggagggtttgtgttttgtgtttgtttttaattccttctccgcaatgcccaagtgagcactccacttgagtctcaagaaccccagagtagagctcgccctggggtgctggccagcacgtaattctcaggaacaaacaagtacattcgaataaagctgaggatctcagtctgcagtgcctggtccctcggaggcattctagtatccctcttagttttgttttattggggcagagcctgttgctgaaaacagaacctgtgggtcaccctgactatccttcccaggccttcgagaactgccttgcatgtagtagagagactcacagtttgcaggagtggcaccgtctttgaggcagctttcacataaagcatctgaagttcctttgctaagtcatgtgcccagtcc

SEQ ID NO: 125353 - DNA, 1237 bp, Homo sapiens
aacaaatgaataataaagacatgagaaaaggtttcctttaaaaagtcgtggttctcgccaggcgcagtggctcatgcctgtaatcccagcaccttaggaggccaaggcaggcggatcatgaggtcaagagatagagaccatcctggccaacatggtgaaaccctgtctctactaaaaatgcaagaattagctgggcatggtggcgcatgcctgtagttccagctactcgggaggctgaggcaggatttaaatactgtttgaacccaggaggcggaggttgcatgagccgagatcgcaccactgtactgcagcctgacaacagagtgagactctgtcaaaaaaaaaaaaaaaaaaaagagtcgtggttctgatacatctcagcttccaaactatttcataattttttaaaaatataaacacataacataaaagcatctatttgaaggtgaacattgcaccagcattcagtagatttacggagtcatgagaccatcgcccctaggtagttccagagcatccttatcctataacagctttacaagtggtattcagagggggtttggggactttaggcttcagtgaaaaagattagcagttaatgttagtttacttcaagaggatgcctttatatattttgcaacttctattttgtgttcagttcttctggagagtagggtgtaggcattttaggggcctggcttccaagcatgcagcctcttctctgctgtcgattggaggttttgtgaagggctgggaggattgcctccatccaagtgccagtgcatgagactgatcaggagtggtagcatgtgaagtggtcctcattggctcacaagaggggacacaggggtttggttggtgctgtgcggacttcctggatttggtaggtttcaaagggtcatgatgtttgccacagggaggaagaaaagggcagtaccagtggcactggtccttaccctctgtagctctatgatcttgaacagtttgcataacctctggaagcatcatttaaatctaagcaaaataagaatgtgtgtgccatgcatggtattgggggcagtcttaaaaatgaagatttcagcctatgaatatgctagtgtaacaaaaatttgtcttaaaatttagttttttaattcagaatgcactttcttattgaaatagtttcagagccccagggactgatagagagacacagcgtgagaagaggacaagaggaagacagagacagagagattat

SEQ ID NO: 125354 - DNA, 1054 bp, Homo sapiens
ccatctttcagtgaaatgctactctgcactctacacttacagggactatgtatttatagtttaaatctaaactgtaggggacagtgttgttgggtttgcatattcagactatgtcatcaatagaaacattcctcttttaatagccggcagcaggtttttcctaactgccaaatgataagaatccctgggaagaggttttagaaaattagatcccagcccgacccccattttcaccaacacaaaaagaacagaatttggtcaagagtggggaccccagggatctgtgtcaggaataaccgcctgtggtgtttctggcaaggaaagattgggatggtgaatatttattgttgatgcttgaaataataggttttttccctctccagaatttctcattgctaagattcaaattatcatagtcgggccatgctctgcccaaggtcaccgcaggtgtgtggtcctcagggcactctggtcctgacaggacaccaggggtggcatgtgggggcctccttcccagctgggtcatcgtcagtcccacccagcattccatccgggcactgtcctttcccagcactgagagtgagtctgggtgcttggtcctatctccaagtggcctgttctggaaggagcatgctggcctggggaagctgcacatttccaaggctgtggccttgttcatccctgagagtctgagaatgccctgggtttcccatcagctgccttcagcaaccacagcatcttcccagagcagtggtgaccaggatgcagcatacagcacctttgagaagcagcaggcaagatttaaggaaggggcgcctcactccgccttgaggaagcgccctgcagcctgcttgtctcccttttaacaggctcctctgctgaacagcccctgggcgggagactcaggaagctgagcctggggcagtacgacaacgatgctggggggcagctgcccttctccaaatgtgcatggggaaaggctggtgtggactatgccccaaacctgccgccattcccctcaccagcggacgtcaaagaggtatgtgccacagcc

SEQ ID NO: 125355 - DNA, 1050 bp, Homo sapiens
tgcatccccttctcacgaggcccctgggtgcccccagtcaaggactggctttcctgctctttcctcagagcacgtgaggattccctgtcaggaccgtcccccaccctgttgtggtggctttggataaggtacgtcataggatgcacctggggctgaggccccaccatccccagctcctcctgtggggccggaatgactgagcgtcctcctgcctcgcaggctcggtgtccttttgcaccctgtggtgaatcccagatcccgctgggcgtggcggagtctcaggtgaccctgcgcaacttgctggctgggcagccctcagcacgtttccttatctgtccttgacgccggctccacccgtgaataacagtgagactgctaaatgaggaaacatgctggtctttgggagtggcagtgtaggggactttggggcatgtgtcccattttatactcaaggtcacgtggttcccgaggctctgggtgggtagcacccagtgtctggagggaaggaggcttgggcgaagacagctaaatgcctggtgtggggactgcccaaagagatgggcagcgtccagtcatgtgacctttggagaccatgttaccatgtcatgttttggtggacaatgagcgtgtcaccgcgacaagaggggcacaagactgtgtaaagaaaaagccactgcctgtccctccctccacagagaccccagctgcatggagtgggtgaagctgcacatcacctgcagatcaccggggtctgtgttcactgggggtttcaaggggcctgagatttctgcactgagtactcatgacctttgtaaggagaggatgcaggatttttttttttttttcctggctgggaactggcagggaagtaagggcagctcttccccagcacctgggcctcaggctgggagcagggtgggcacaggtgtgagagatcagggtgtgtgtgccatgggtgcagccagatgcaggtgcccccctgccccaccccagggctttgggagctgccctttgcccgtgaacatccctgtgtgggagcttgggttttgt

SEQ ID NO: 125356 - DNA, 1051 bp, Homo sapiens
ctggcatttctcatgttggagggcttcgttgtgtggacgtatcatttcccttttaaatatgcctttttagaagaaatgccaccacctagccatggacttcagtgtttcccagtggaaagaattttcaattttgcaatctaaaaaatgggattccccccttccgccttctgttgcagttttgccggcgcctacccgttctcttagaatcagggttagacatgaagacagcacgactgagggagggtgggcctgggaggggaaggctcttccctgggttggtcttgatatgtccgtcagaaccctggctaatgatttcctaacacattacgctgtaaaaaactgcaagttgtgcggctctttaaggctatgccctccacgtggaaggggctggtcaatcagtcctgtttcagttttgggagaagactcctaaaaccatttctgggagcatttcagctgggaggagtgttggggcatccttgtcatgccaccctgcctccttttacacactgtctcgaaaagattagtgtgtgtgtgtgaatgagctgaagtctggaggcctcaagctcaccgtgaagcagtctttgcctgttatttgttttcactcctaggaatgcaagggagcttccagaacctatcaggcacacctgtgtgatgtcgcgctttattcctagaagatcacatcaagataaatcagtagcttatggggactttaccttctagtgcccagatagaaaatgaaagaaggcatgttttaaaataggtaatgttctagcatgtcatgagttttcacctgttcttattttttaagttaattaattaatttatcatttgagataggatctcactctgtcacccaggctgcagtgtagttggtgtgatcacagctcactgcatccttgacctcctgggctcaattgatcctctcacctcagcctccagagtagttaggacgacaggcatgtgccaccatgcctggatcatttttttttttttttgtatttttctgtagagactgggtttcatcatgttgcccaggctggtctggaactcc

SEQ ID NO: 125357 - DNA, 1917 bp, Homo sapiens
ctgtcattccagcttgcctgagtaactccctctttgtatgtcatgtgctgggagttggaaggagcctggagagtcccccatgagtagattattggactttacaatacagccgtatagcaaccacaacaccacagcagggtagcagtccctgaacaataggtccaggtcgatgcattaaacaaatatatttgggaaattctgagtttactaaaaaggctctaatgggaaaaaactatctgcagtatcatacctgacttacttcaccaaaccttcttaaaagaagttacttggaaacattaaaatcagaagtcttttctcctggataacaatctcatgtaggtttggaggaggctggaggcatctgagtgtatgtggagaagaggactccacatacttaggttaacatatagtagtctcttggcttaggttaacatatagtagtctcttgaggttaatatgtcttccaattgattgaattcaatccttagtgattccctgttcttgctgcaaagaaacagttataaggcctggaattttcgaaagccacatcatattatccaccctcagtttggctgtttttaaattacttggtaaactcattactttatttttttatttatttttttgagacagagtctcactctgtcgcccaagctggagtgcaatggcgtgatctcagcttactgcaagctccacctcccgggttcgcaccattctcctgcctcaacccagtagctgggactacaggcgcccgccatcacgcccggctaatttttttgtatttttagtagagatggagtttcaccatgttagccaagaaggtctcgatctcctgaccttgtgatccgcccccctcggcttcccaaagtgctgggattacaggcatgagccgttgctcccagccaaactcgttactttgagaacactttttttttttttttgagatggagtcttgctctgtcgcccaggctggagtgcagtggcacaatcttggctcactgcaacctccgcctcctgggttcaaatgattctcttggctcagcctcccgagtagctgggactacaggcgtgcacctccatgcctggttaatttttgtatttttagtagagatggggtttcaccatattggccaaggtggtcttgaactcccgacctcacgatctgcccaccttggcctcccaaagtgctgggattacaggcatgagccaccgcgcccagcccaataacacattttgattttgattttagatactctttaatgcgttttattataaaagttatttaattatcattttgaagtctaaggactttcatatctcaacaacagaccagtaaaattcagtgcatatttgggtattgacaatacaaatttaaagtatttattaatctattcatatttgacaggcatctggggccattggtccatttttttcatagcttcagaactaaaaagatgtcagaagattaggtataagcaaaactggttaccagtctccccagagctttttaaaattgggaagtgaccttcttgtaggaaccctgccacacatgagcaactgtccatgagcagtgatgaatggacactgaagggttagccgcagcattggaaacagggcagagtgagccatgcccttcctgggagctccgcttcctcttccaggacgtgcctcttgtgctaggtaagcaccaagctgggagatggagcaagccttgagacttgcacttcatttagtgtcaaaagcctgcacagtgtagaggtggtctctgaacagcctgcatggcaggcttttggatctcagtccaagactttctgacctgatagaaatcccattaaaagatgcttactgggccgaggcaggcagatcacctgaggtcaggagttcaagaccagcctggccaacatggcaaaaccctgt

SEQ ID NO: 125358 - DNA, 2018 bp, Homo sapiens
tcaaaaggtgaagaatcccagagttcaaaatgacaatttgttttgcatggaaaggtagaagtgattctagcacctgaagatgtttatttgaatgccttttcattggcatcctccagagtatatatagaactttgtgatgttagaggaatctttgtccttgtttattgtaagtcatattttgaatccatttatttgtttagacagatgcacacgcccattcagagggtgtgaggctcactttcatccctgactgaaagcctctctccggttttctcccccgcagtgctacacacgcagggccctgtcgatggcagcctttacgcgaaggtgaggaagaaaagctcctcggatcctggcatcccaggtggcccccaggcaatcccggccaccaacagcccagaccacagtgaccacaccttgtctgtcagcagtgactccggccactctacagcctctgccaggacggataagacggaagagcgcctggccccaggaaccaggaggggcctgagtgcccaggagaaggcagagttggaccagctgctcagtggctttggcctggaagatcctggaagctccctcaaggaaatgactgatgctcgaagcaagtacagtgggacccgccacgtggtgccagcccaggttcacgtgaatggagacgctgctctgaaggatcgggagacagacattctggatgacgagatgccccaccacgacctgcacagtgtggacagccttgggaccctgtcctcctcggaagggcctcagtcggcccacctgggtcccttcacctgccacaagagcagccagaactcactcctatctgacggttttggcagcaacgttggtgaagatccgcagggcaccctcgttccggacctgggccttggcatggacggcccctatgagcgggagcggacttttgggagtcgagagcccaagcagccccagcccctgctgagaaagccctcagtgtccgcccagatgcaggcctatgggcagagcagctactccacacagacctgggtgcgccagcagcagatggttgtagctcaccagtatagcttcgccccagatggggaggcccggctggtgagccgctgccctgcagacaatcctggcctcgtccaggcccagcccagagtgccactcacccccacccgagggaccagcagtagggtggctgtccagaggggtgtaggcagtgggccacatccccctgacacacagcagccctctcccagcaaagcgttcaaacccaggtttccaggagaccaggttgtgaatggagccggcccagagctgagcacaggcccctccccaggctcgcccaccctggacatcgaccagtccatcgagcagctcaacaggctgatcctggagctggatcccaccttcgagcccatccctacccacatgaacgccctcggtagccaggccaatggctctgtgtctccagacagcgtgggaggtgggctccgggcaagcagcaggctgcctgacacaggagagggccccagcagggccaccgggcggcaaggtgagctgggtctccatgggaggtgctccacgggaggtgctccacgggaggctaatgtgtgatgagaaatcagcctagtaggttagcttttggcgaaatccacaagggagggacatttcccttgcagtttcaactcttgtgaattttggcctaggatccaaatgctgtcatgctggtgtggtcccttggtaggagatttggaggatgggaagaaccaggcagaagacttgctgttaacgtcagtgcaggggcagggacagcatgctctctgctggaaagggccggtcatgcctccattgcagaatgggcttaacagtgaaaccattcttccttcgtgaatgttggtggatttacaaagaaagcatacttacttctgtccctgcggtataggtcagggctttgtggaagaatgccaggtacttcagtggggctgaaggttggggatgaagaagactactgagccctcagacagctttgg

SEQ ID NO: 125359 - DNA, 1741 bp, Homo sapiens
tctattattattttaagatttctactactaataaaataggattattcataccctccccccaggagagggactatcctgtgccttaccatttggtacagggccttctaatcaggtactgttcttagcatacggggcagggagctagctgaaggattccacctcagactgattaataagcactttttgacagcattttaatttagattagaagaattgttttacaactcattattgggcttttttttaagtcattgtgccaatttattttaactcagatttagggagaagagtgtgggaagtcatatagacttagcagcgtgaaatctgtgaccgtaatgggtaggctcatgctctgggctgagtggccctgcagtgtgtgtcctggctgcccgccaggcgtgggagggactgggctgatggccatacaacaccttccatcgtggggaggaggagtagtttctgtcattctcacggagcagaagccgtttatcagcacctccttctcacacgctgaaaacagcaggaaggatttaccaggttctttcatttgttaaattttcctggtaacaggaaatctaaacagaaaccaaattaaattgatgtttactcagggcctataaagacactcacccgtgtgctatgccatttaattctcaggtcaacctttacatagaaccatctacccacaccctcattttatagcggggaagctgaaggtcaaggtgaatgcaccagttggtagaaccctaagggtggactcaggatggagctgggatttgaaccagtgtccatctgatgccagagcttcttcaagggaccactctacttcacagtcacctagtgatggcattaacaaatgcattgcattttccatttttgaaattgtagaggtgatatttgcacatgccttatagtttagtccagtctttccagtctttccctttgtttaatttgcacagagctgggcgaaataggttttttagtctctgcctagtctgaagcctggtcactcactgatccctggtcagagcaatgtgagttcaatgccacctctttgtgggcagggccactgacagagcctccaggtgtgtgccctcctggtgctctctgggcaggtgggcagtgggccagcaggagcacacaggtttcagggccagtgcacctgggttctaggcccacctccacctcctagcagctgcctgaccttgggcaagttatttattctctttgatcctcagttccttatagataaacaaggaataacaacataggtcatactgtgagaattagagaaaatgcacgatgctcctgccctgtcaataaaaggtactcagaaaacagtagctgtcactgagactgttaccttgaattaatcccatggcatatgttctgtcatcactttccctgccttgaagccttggtttattttcagcattttatgtagcatttctactcccagacccttcctcccctaggcttgactttaggatgggagtcagggccactgcagacgggcccatacccctgtgtccactctccccactccccacttctctgcgtgctttcccttgggcactgttgaaacaagaagaaagcctggcgtgggcgcgttttcagcaccacaccccaggaccccttgggactctgtcccaacacgttgtcccagtgttttcaaaaaggccagcagctgctgaccatggtggtgcatcaacctggagcccggggctgtgaggcacatgct

SEQ ID NO: 125360 - DNA, 1051 bp, Homo sapiens
aggttctcctcctgcatccgcagctgaagagctatggcatccctgcaagttacttcctcccactctaagattaggttctgaatttgcagaatgagggttgattcagacttccccatgctccctttgagatggaagcaaaatgttaaaatatgttatttaatgatataaaaagatggaaggagcagacgagtggcaggaccccaccttttagaactctgtccttaccccaccacctcctcacagcagtgtcagccctaatagcacatcaggtgccagagacagagtggagacttaaagccctgcagcctccctcatctggtgggggctcctcaccctgcctgctcctaggagctcatcagggcaccaggaaccccacccacaacccatgtccaggaaccacaaatgggagtttagttggctatgtcatttctgtggtctttctacatcacttttccaaaccagaaccatattatcagtagcattctctcatcagttaaggagggtattctttaatgatggatcagcgcctttgggggctgcaaacagcagggtgcgggctcctgtttggtttctcattggcgagactggcagtcagccatgcagtgaccctgcttccacacctctgttaggtgtcttttctagtcatgattctctttttattgctcttatcctgcagcttttgcattgagtcttagaaagcatagcaatggcagaaagtgtttagatgaggctctttcctatgtgcccagtgtagaggtagcagtttcataggtgagaagatagacgatacagaggtcagaagacagatatttacccagccctgccacttggagctgtgtgggtttgagcaacgaaacgccagcctcacaggtggcaggaggataaaggagactggaaatggcagatagcatggtgccatttgcttgcagctgctgtttgccagggctctgtctcattaatctttgtgcccctggttccaagcacactgtggccagataatgttcaaatgttccctggatctctggcccatgcttcctgcttcatgggcaaa

SEQ ID NO: 125361 - DNA, 1073 bp, Homo sapiens
atatgctgtgtgcagtgaacattcacgctgtactcttagccacatcccgcacaaaagacagagagacagctcccaggagatggagcatgtgtggcaaagattttccgcctggttactttgaagaaagcaaaaggaggctgaaactgtgctttgtaagctgcatgggttggtgctggctcctggacgtcagttcagaacactcaggagtgaaggcagaaacctggtgagggactcccaggaggagcttctttctccacctttcagcctctggagttcaaatttcactcaacctgagtgcaccaaaccccaccctcttatttacattgccctggcctttttggcggaatcaaagtccctacatagccaaggagatcttttaccttctacactagtgggaggccaggtgcctgggagggaggtggcacgcccccgccctcctctggcatgccactgtcctgctgtgaaagcctgtgtcaaggaaaactgggctcagaggtgcagactgagagagccgctgggctgttttgaaggaaggtaagcagagagcatttgtgtgtgtgtgtgtgtgcgcgcgcgtgcatatgtgtatgtgtgtctgtgcctgtgtggtgagtgtgtgtgtgcatgtgtgtggcttctgtaatgctacaaagacctgaaactgagctgtgtgcctgctgagatttaccaacttgccaagacttccagaggaaaagagctggtactagccaggaggagagggcgttatggagtggaataatcagcagaacggatgctttaaccgggcaagaaggaatgtcgctcaggacttgtccaggaatgcctttattggtttgcaagctggaggagtcttaacttactgacttctttttggggaagagtcagtgatggtctgacatgctgtttgcaagctctctggccgcctctgtggccagccggcgtgggtggcctcagataaggccaacaggacctcctcttttcctctgggcttgggcccctgtgttttcagttaggagtgcccaaaagggaactgagctgcccagtcagaggcctgagataggcgcctgctgaat

SEQ ID NO: 125362 - DNA, 1891 bp, Homo sapiens
agaaagttatctaaagtccaaagagtcaaggccagggcctcaataaaatgttgatggtttcccaggagaagccacagaaatgccggtgatgagagtgtttgaacctggaccaagggaggcatggacgtttgggggatgggctgggaagtgaggggcaatggcagcccgcagggctggagaacgctgtagccaggggtaccagtttccagagagaaatgagttttgggtgaaagtgttctgaagtggagtgcaggaggcacaggctgccccttcccggcctctaggcacacagctgcccctccagagaccccctgggacgggcctgtctgcccatgtgggtggggaggggcctgacattggagcagggatcacacaggctcagtgtggtggacaggtagggatgtcagctcaggaggatgagtccttggaaagaaagttgggagaggagcaaacggtggagacagtggggggagaatgggtggtcacgggctggagggacctgcatttgttgaaagttggtggtgtcatgttttcaaatcagaactttctaccagaagctatctgaatttagatgtcactttcatgtgtctctccttatgaggaggaacttcacaggaggccctgcgtgtcactttctgacctgcagtccaggtaatggcctcctcagaagccacaccctgatctgtctaggtggacagctttcttttggcctggaaccctgcactagagggtgcagcatgtgatcacagtgtcggtttcattccggtgaccagtgcacagaagagagtgtcttctctctccttgaatgttgtgtgccccaggctcccttgcagaaatcccctgtctacctggggtcagagcctgcctctgtccccagacgctttgtataaaacctgagtgcatgtgcgagcctcgggctggttgccgttgctttctaaatatgcccttgttaccatgtggtttctagcctgagaatgttcttactttttatttgttgagatcagattcatagcacataaatttaccattctaatcattttaaagtatacgatgcattgatttttagtacgttcacaaggttgtggaactgtcgccattatctaattccagaacatcttcatcaccccaaaagaagccctgtactcattagtggtcactcccagttcctcctttcctcagcccctggcaaccacgaagctactttccttctctctgtttcccattccggacatctcactcactggagtcgtgcaatgagtggccttctgtgattcgcttctttcactcagcctgtgttccagctgcattcctgttacgctccatcctttcatggctgtggtgtgccactgtgtggacacaccacactctgcctattcatttgttagctggtgtgcatttgggctcgtaacactttttgtctagtatgaataacgttgcctgtgaacattcttgtctgtgttttggccctaggatattcttatacctctaatctttcccactactttttgaaatttccacatcttttctcatccttctaattggtttcccattctggaattttcttctgcctttagggagtcccaaataggagtggcactaaacatactgccaacctcctgtcccgcttgctattttcagagatattcgggaaactcaacaagtcttttcttcattagctgcacagtggtcccttgaacgataattgaactgtgtgagtccacttatatgcagatttttttcagccaacacacagattgaaaatacggtgtatttaggatgagaaatctgtgtatatggagagtccacttttcctatactcaggttcctcgaggtcgactgcaggatttgagtatgtacagatttagtatactcacagggggtggtgggggac

SEQ ID NO: 125363 - DNA, 1618 bp, Homo sapiens
ttggctcattggcacaatcatttagggtgcttgagctgcaccctggggacctcatgaaccccagcttgagttcagatcacatcagggtgattctgaacacttgtctaaatgccaacaccctctctgtctccctctctcccttcctccttctttgtatctctgtctctaaattacagcatgcacataatcatttaggatagtacacacagtaatgaccggctgctgctttttggaaaacaaaaagctttaagttgcaacatggagcattgagatcaaagaaaagctatcacaatcagttgttaaagtctagaaaaaagagaccatggaattctatttttcggatgtgttccaaaacagggcacattcacgtggtctgaaagggtttaggtgtggcctctctgaggactagcgatagtggtgttcagagctgcggttccacaggagcagcacagggaacacattgaagcctccagtggagccccgcacccagcagcagcagtgtggtgcctctgcctgcaccccagctgtctgcaggcgcctgtgccccagggctgaagttccactccaaagcgtgaactcccagccagagtccagaggggaggccctgctgtgccggcctccgcggagtgtgttccttgccgggaacgtgtgtcccccgctgcagctactttgttttgttttgtctctctaacccaggtgaaatgctaccacaagaaataccgctcggccacccgtgacgtcattttccgcctgcagtttcacactggggctgtgcagggctacgggctggtgtttgggaaggaggatctggacaatgccagcaaaggtgaggcgcggagctggcggccctgtgcttgtgggcagctgcggttgaacctccttggttgattctttcactatcccctttaccctctttccaaaattcagcctactgacaaaattgttcccaaagtaggagaaaatgatcattgatccctgggggaaaaaaattatggataaccaatgaaactgcctatactttctgtatcatggggtgtctttattgcagatttgggagtggtgctgtactggttggaataaaggacaaagtcagtccatacttttccggttaattgtctccacaaatgtgttaaaatacattgtttttttcagatgaccgttttcctgactatgggaaggttgaattagtcttctctgccacgcctgagaagattcaaggtgggtagcttggtggaatactgggtggtccttgctgacactggtgaaaggtgcatgatggctacgctggggctgtagtactagtctcctgcctttgtgcatatttggagatttctgtgattaattttatttaaatgtaggatattggatagtggaacaagaaggcccacttgtgtcagtaagccccagaagtggcgtgacttgctcacaaccactcagccaggagagccttgggcatgactggccattcttgtaggagtaaggtggtattgcattgtggttttaatttgcatttctctgggggttagtgatgtttagcattttttcatgtgtttgttggccatttgtatatcttttgaaaaatgtctgttcatatcatttgcccactttttgatgggat

SEQ ID NO: 125364 - DNA, 1022 bp, Homo sapiens
aaagaggtttaatatgaaacagggattgtgtatgatgaggccgttaggatctcaagccagcaaacaaagttagcattaaaatacacagagaaacccctgaagggagggccacgtgatttcaggcagcagttgttctctgccagtgggatagaccgctctttctttcactgtggagccttaggagtatttgaaagcttgtgctgtgaaaaataggaatcttacaggagaatcatatggggcctggagaggaacctgtttgggacaggccgattcccatctcctgccactctgtacctcctgggcaccgtggcctgccttctcctcccttctggtatgtggagggagctgggattgctgcgggaggagcagtgtgtttgtgtgtagctgctatgaggagcagtggggggacctgggggagcatcctggattcctgaagagggagggcaggacctggcctggaaggaggccctgcgctgggcggggcggtactgacgggaggggcacggtgagctgcggttggggatattccactgtgccccttatgtggcccgtactggagcccacagctccctctgttttcacccaggacactccctgcctgccaggactgagcccacagctgcctcctgaggagtttcctgactcctgtgggcaaatgttggcgcccatggcagcacaggctgcgtgagctatcagctgacatcgtgttgttgtttttatttttttaaatctctggttcccttaaatatttataaaatttgagagcaagactggcttgaattggggcatctcttttccttttcccttccctaaccacttttcactccccatttgcaaggcactagtggaggcagacaggcacatttgaaggcagacagggaaaggtgggtgctatcatctctatcaatgggggtgcatgtgtggatttacccttggccagaaggacctccctctggggatctctacaatatgccccaggttgaagcatttgatgggtggtcagtgtagtgagtgtggggcat

SEQ ID NO: 125365 - DNA, 1041 bp, Homo sapiens
gtgtccccactctcccagtggtgatgacttgaaatcatgattctgtgttaaaacagtaaccctcacccccaaaaaaagtaccctgtaggaagaaggaaaagtagcttttaccttaacactggggtcccccacgcctgggccgtggaccttatcggtctgtggcctgttaggaaccgggccagcgagcgagcatgaccacctgagcctcccgtcagatcagcggcgccatgagattcttataagagtgcgaaccctattgtgaactgtgtatgcgagcgatctaggttgcacactccttaggagaatgatgatctgaggtggaacagtttcatcctgaaaccatcctccaccagtccatggaaaaatcatcttctgtgaaaccagtccctggtgccaaaaagattggtgaccactgccttaaggcatttagttaactttctgaataaaactattttaattaaagggacggaacaaatcttcattcttgattctctttcattctagagcccctcgagatatacaacctggaaattaatgtcctaactcggccactcacttctgagaacccctgtgttctgactataatttgcattcttcacatgatcacaggcctcccagagtgtgggtgcagaaatagaatatttatgtatcattaatagccaaagtgtgaaatacagctggtgcaattacagcttgattaatgatcaaaacaatgatttctccagataattttgattcttatgtgtgttggttcttggaggagattagccattacatttttgccttttatctttcttgaatacaaacaattcatacatttaaaataattttaggaaaattttttatctgaaataaggtaagcttttaaggcatatgtatgactttcagcatgcatagaatcatagaatgtaaagatttcatggccttggaagacccacttctataaggcagtagggtgactcgagaaatagcttttcattgtattataaataccctatacaaagtttttgaggattttcattaatttccctgtaaccccta

SEQ ID NO: 125366 - DNA, 1288 bp, Homo sapiens
tagtgggtcagctgtgcagttggccttgaggtcacaagccatggaagaagcccagtaagaggcatgaatgtgacccagtctcccctgacgcatctcatgaacccatctcctcctcctcctttaaaatgaccccacaggaaagcacacagcatgtagctgagggtgagggccctgagccctccttcctgtcccacttagatgagcacagcacacgactggggatcacggccctgtctccacatccccagttccccaaaggtgcacagagtatatggccgagggtcagcagggccctatccctcctcccttgtcccatgcaggagcaaatggcacatggctgagggtcagggccctgtcctctccttcccagtcctatgcaggcacacacagcacatggctgggattcaggacccttgcccttcctcgccagtcgcatgcaggtgcttgctcagaggtttctattgtctctgaagtacatctgtgccttcaggtccccctggtcattatggccagagtgaccttgccaagctgctagttggttttgaagcagcttggcttcacttcaggagcctttggcaccctttggataaaggtcaaactgtgttgctctgcaggcttctaggaccgggtccggccttttcctgcagcaaccctgtggctccatgcactgctttcccagacctcaaaggccgcaggtgcagtctcctggtctcctcgtcgctttctgtctttctgattgccaaattcctgttcgttctgtaccggtcatgcctctacagacagttgtgcctttctttcagtgtgccggccctttctgaagctctaccaagccatgcagcctgtgtacacctccgggatctagtgagtgctgctgctgctgctgctgctgttgtgggacctggacggctcagggaactgcagctgaccctcagctgcctgtcccgcaggaagagtgtgggagggttcaggtcagagaatgccaagaagccaaagaagagtccagtggggaaaatcctctcgtggcccgtgctccagcatcacgccttggccctccctcctgccctgcacaagtgtctttgggctgtcacactagttggctccattaaaggacgtgggggctggaattttgaggggagagtgggccatttgctttttggagtatggtggccccttggttttcaaggggtattgattccaggaccccctttgattaccaaatccgaggatgttcaagtgtgttttataaaacggcattgtcttgaactcctgacctcaagtgatctacccg

SEQ ID NO: 125367 - DNA, 1324 bp, Homo sapiens
gcaggaagtcataaaacaaacatcgacttcacctagatgcctggtccaggtgcacatggggcactgagaacacccccagggaacaggtccgtcttagccgcgtggtcactgcagcacatggccaggcagtgtgggactcagggtgccactgacaaactggacgagctgaggaagctgatttcccagtgaccagggctgccccgtgctggaaggagggcggaactgctccagaggaggtgactcaggcctctcaatccgggcatttgtggttcctcacttttactcaaaaccagggagccaaaggacccatgaaatccacaatgcgtaaaatttgcatgattaaacatatacaattcatgcattcctctgcctacgtacaactgagggtgagaagtcttgttgccagggtagaaagtaccctgcaggagaggcgtgtgggagctgcctggaggtccactgaagtctggtcatcagcctcacagggtccccacgtctccaggctgagcatctgtcctctgcgactcttgtgaggttttgccctgttctgagagagcagaagagaagtttgctgccaggaagatggaaatactgacatgccctgtttctcactacgaattgtaactgaactgaagcaaactcgcttttctaacattttcctagtgggtggactataagtagggctttccttttttgttaatgtttaacagaaatcttctcttgtttagtttgtttgtatacaaatttaactgcttgaataagggactgggtgtgaattgccagcgtaagtgagagacttttgtcttaacacaaggtccatgatggccgtttctggcttagggtaggatggttgtaggtgctggcaacacagtcacctgccacttcctgcctcagtctgccatggcagtagagagatgcacagattgttaaatattgcggagtttttgattgtttgggtttttcttgcaaagagtacagtactttggtggagacagatatggaaacacagattccatgcaaggtgttgaggctacagtggaggttatgtgggtgaagtggccatggtgagggacctcagggcaggggccacgccaggcagggcaccaacaggcaggacaggccagggaagcgtcagagagcttggtaagcctccggctcatcctgtggtcactgctgccacgtcatgcctcatgaggaccccagcagtcagatgctcctagtgtagaagcttccctcttgaccaccaaatgctcatggaagttgtgtgcagtcagtgttggaagcatgaggccgactcctagaactcagaaaggctgatggcccacat

SEQ ID NO: 125368 - DNA, 2449 bp, Homo sapiens
aaccccagtgccctacagccttctcaagcccagtcctgggagtgacatactggcggggcacaggctggcccacttgtgtcccgagggtgcctcttgggacttcatgggggtgtctgttgactctcctgccctgggttgctccctgcatccatgtggtcctgaaacttgagtctgcctgcttgtcttgcacagagcccacttaaaatggtcttctttatttaggacgtagggtggccaagggacagttttggacaccagccctaccacctgcctgctgagaagcctcagttggttcttctgcaagctgggtattcagcactcttaagaataatatctttagataaggagctgttatttcagatgagaattctgaccctgcactatggctcccactttgagcacagcatattcctgcgggggaaatgaagtctaacaagggacaggtggattgggtgtgcacaggtgcagcaaagggtgaagccccttgtgggagctggtcgctttgaacagccatgagacacatcccccgtcaagtacccacgtggtgtgggctccactgagttaactctctttctctctctctccccttcagcgccgaccaggcccttgacaggtttgcaatgaagaagttttatgatgacaaagtttcagctttaatgcagccttcccaaaaacggtatgtatagatccccaaagccagagtgaagaggtgaatgaaattttacatataaaaatgtgaaaacagaagaggcatctcctctgtcccgacacctaaatgaatagtattcttgggtcatgccaaagactgtgaaggtggtggggagacttgtccctcccagaggttaaggacttagccatcctgtgtgtctgtggtgagagacagccccctatgctgctggcttgcactgacaggtaaagggaggacttgctccagttggcattttcctctcttgcagtgagtgagttttgatttccattattatgttggaacttggttctattggctagaccaggggtcagtgaactatctctgcaacggactagagagtggatattttaggctttgcaggctacaggatctttatcgcaactgttctaacatgaaagcagccctgggcaatatggaaatcagggaatgtggctgtattgcaataaaactttacttacacaaacacattagcagttgcacttggccaattcttgtagctcatcagttccctgaggccacggagtatttttctgtcatgctgcccatctctcccttctctgctcctgggcgtggcccctggaatgagctcagtaagtgatggggaatagtcatggtggggtgcagaactttctccttttgctgcccaccccagcaggctgaggtcaagaacctgagcagggctggctgagaggcagtgagaaggacccacagctggctccccatccaggtgcacttacttcctccacagatggtgacacttagagccaaccaggtagctccatggcatatttcaaagcccacagcagggaatttgtaggagaattgccaaggtgattgccaaatggtgttccgttttggagacaggtagttgcacacccgaccttgtgtatgcaagttttgatgccttgtatctattttctccagtgcaactgagggctatgtcagcagacatgggggtagacgggcagaaagggatttcaagcatcaccagaggcaccttttccttttgtcttgctatttccaatggcatggctctgtttctcttgaaaccgggtgtgttggaggaacatgggctagggtgtaggactgtggtcagcaacagggcccacatgcaatgcaagttgtgtgcagaaaacctagcattttctaaaatattttagttaaacagtcacttgggttttttttttgtttttttttggaaccattaaatgttatttctttgttgaacagtttccaaaatcgtgacattcatatgacctcctgcatggaaaatgaggtgtaaatagggagtaacccatgcagaatgcttggcacacaggaagtccagctgtcgtcttttcttttttttgttcttatttcttacggcaccagcagcttgtttataacattaaaagaatatggaaaaagggggaagatatctcttcattttttttttcttttcttttttctttttttgaaacagagtgttgctctgtcacccaggctgtagtgcagtggtgcaatcttggctcacagcagcctcaacctcctgggctcaagcaatccttccacctcagcctcttgagtagctgagactataggcgcacatcaccatgctcagctaattttaaaatttttgtggagacagtgtctcactgtgttgcccaggctggtcttgaacccctgagcttgaataatccttctgctgtggcttcccaaaatgctgggattgcacgtgtgagccaccatgccctgctcttc

SEQ ID NO: 125369 - DNA, 2014 bp, Homo sapiens
tataggccgggtgcagtggctcatgcctgtaatcccagcactttgggaggccgaggcggggggatcacctgacatcgggagttcgagatcagcctgactaacatggagcaagcccgtctctattaaaaatacaaaaaattagccgggcatggtgatgcatgcctgtaattccagctacttgggaggctgaggcaggataatcgcttgaactcgggaggtggaggttgccgtgagccaagatcgttccattgcactccagcctgggcaacaagagcgaaactctgtctcaaaaaaaaaaaaaagaaaagaaaagaaaagaaaagaaatacttgctttatacatccataaatagtgccacaaaagtgattgataatggggtgaatgtcaccaccatgtgtgcctgttttggctgaggtgttgtttctttgtaggtgaattgctgtcaaatatagttttatgcaagaggtatactagtagccataccattaataattgcacgtgccaggattcagctgcaaagagtgtatcaagtgcccgcattgagtatctataaggcatgctcttgactttcactgacagagagaaggatgctcctgggtgactttcatgtatgactgggcttatcagaattgtgacttgaatttgatcagtagtttcttctcaagaagttagggagctacatattagaggccctgcctttttggctttatatgattccagatcaggggttggcaaatatttttaaaaacagccagattaggccgggtgcggtggctcacgcctgtagtcccatagtcccagcactttgggaggccgaggctggtggatcacaaggtcaggagatcgagaccatcctggctaacatggtgaaaccccatctctactaaaaatacaaaaaattagctgggtatggtggcgggcgcctgtagtcccagctacttgggaggctgaggcaggagaatggcgtgaacccgggaggcggagcttacagtgagccgagattgtgccactgcactccagcctgggggacagagcgtgagactccgtctccaaaaaaaaaagagccagattgtattttacacttttcagtccccgtggtcttgctgcaaatactcaaacctacccctgcagtgagagtgaaagcagccctggatgtaggtaaacagatgggagtggccatgttctagtcaaactttgtgtttggacactgaaatctgaacttcaacacattttcacatggcatggaatcttatcttttcaaaattttttcttaatagttagaaaatgtaaaactaactcttagctcacaagttgtgggaaagtaggtaatgggcagaagtagctcctgggctgtggtttgcaatctgctgttgtaggttgtaagagtatgttctagaaggtggcactctgtggccctgggtgaaggtggcctgtccaatagtttctgcttctcctgctggtgttgctggtctgtgggctgggctgttggtgtctgtggttatggtttgagtgagtccttttccagaacttctgcctgggacagtggttcctttatgtgtaatgagggtgggctgcggcggtgtatgtggagctcaggtgccggcagtgctgccagtaagctggaatctatgtcccatcatgctgagctgtgtttgcagccctgatcattgtcagcccgtgagcaggcaggcgttcacttctgtctgacctggataattaagtcatgctaattgctgcagctcctggcacagttttttccagcctaattgggtaaaatgacaggcagctgctgtgttggtcagccctcctgggcttctacagctgctccagttagcacccactcttactgtttgcacccagcgtgcgggttccctgttgcagagactccagttgcactgggtactgactttcccagacaggaaggctgtgggtaatgctggccttaccaccaaagcaggctctctattgttttgtccactagtgagtcttttcctgttctaattacatctctgct

SEQ ID NO: 125370 - DNA, 1006 bp, Homo sapiens
ggcctcaccactcaatactgccacattggagattaaatttcaacatgagttttggagggggctaatatttaaaccatagcgaagttttctctttttttcggtgatggaattcatcagttaagtgatcaggtcctgggcttttctttgtgggagagtttatattactgattcaatctccttacttgttattgttttgttcggattttctgtttcttcatgattcagtcttagtaggttgtatgtgtccaggaatttatgagtttgttccaggttatccaatttattgctatgtacttgttcatagttttttatgtttctttgtgtcttaaatggcatcagttatgatgactgctctttcatttctgattttgagttttctctttttatcttatctaggtaaagatttgtcaattttgttagtcttcagaaaacccaacccttagttttgttgatcttttctattgtttttctagtctctcctttatttgtttctgctctgacctttgttttttccttcctttgctaatttggggtttagtttgttctttgttccttcaggtacaacattaggttttgtgttttgttttgttttttgagacggagtctcactctgtcaccaggctggagtgcagtggcgtgatctcggctcactgcaacctccaactcccaggttcaagtgattctcctgcctcagcctccctagtagctgggattacaggcacgtgccaccacacccagctaatttttgtatttttaatagagatggggtttcaccatgttggccaggaaggtcttgatctcctgacctcgtgatccacccacctcggcctcccaaagcgctgggattacaggcatgagccaccgcgccctgcctgacattaggtttttttatttgagagttttttgtcttttaacataggcatttattgccataaaccttcctcttacaactgcttttgctgcatcccataagttttggtgtgttgtgtttcaatttttgtttctc

SEQ ID NO: 125371 - DNA, 1167 bp, Homo sapiens
ctgcatcatgtgtatagatttgttaagccaccacaaacaagagacaaaacatttccatcagcatggggctctcttctgctagtatctctttatggtcatactaatccactcctttcatgataattttcattttttaaaaaatttttaaaattttttcaaattttactttaagttctgggatacaggtgcagaacgtgcaggtttgttacatagatacacatatgccatggtgatttgctgcacctatcaacctgtcatctaggttttaggcccctcatgcattaagtatttgtcctaatgctctcattccccttgcccctcacccttcatgatcattttcaacagcaaagtttgggataattttaagactgagtcaacataagttgtggtacatatatgtatgtatattctatatgttgaaatattttgcagccattagagtaacaaagcagaaacatgataagttgcctattttaatactagttaacaatagtagagtatagaatttatgtataatagtatctcaattatgctaaatgtatacagaaaagagactaagggattcatgaaaacattgcagtggttatctttgagtggtggcaggggtagtgacttttcctacttcctggcaactttctgaaatttccaacagtcttacactatttctacgactttcatcataagatagagctccttgtcctcgtcctactgacaaaaggaaatcaaaggaaaagcaacacccccgtgtggccactgtgggccactgtggacttgtgtgtgcctcaggacgctcagagctgcagttctgcaccgagtcactgtgtctttagcacatggtggtgattttctttgtccaagcaccaaacttaattagagttttgaaggtgcttcctccttaagtgctgcctttccaggagattgtctctgaggtgttgtccgcacggtgtgggagatggctggctgcactctccaaactgggattttaacccgagtggggagattttggcagcagcttgggcctaggactcctgtttgtgatctcactggactgcagccccgtccacacaacctgcaccatcagcaactcaaagacctttctagaattgtcaccccagctgcagaagagcagatgagcccctggaagaagaggcatcacatgggcagtat

SEQ ID NO: 125372 - DNA, 1050 bp, Homo sapiens
tgctcacaccatctccgcttcctcctggccccctcccggtgccccctcgtgccgaccttgacacctcagagcagggttgaggctcccactccaggagtcccgcctggaaccctgttcctgctcccagtgtaaccacaaagagtccttcccgccttcgtgcttttgcatttgagcccatgcgtcactgctctgagttgctttctctctgtgcgttccctgaccgcagcttgcggtaccccgtcatgccctgctaggaaaattcaatcttgtgcccctccccacactgcccgctgttatgggaacacagcacagaggctgcacacactgtaaattcccgtagctggccgcccaggtgctgatgtgaacacccaggggatgagtgtccgtcgtcttcacctttttcctagaggatgaatgtctgctgcctccttaccctgtttctgatctgcccactgctctctcgcaggcccgtcatcctgagtcccaccatggaggagggccatgggctggacctcacttacatcacggagcgcatcatcgctgtgtccttccctgccggctgctctgaggagtcctacctgcacaacctacaggaggtcacgcgcatgctcaagtccaagcacggggacaactacctggtgagcggtgggcggctctgggagcctttgggcaggctctgcagcaggcactgtgtagggatgggcactcacagaacactggtttacacatgagggagaagctcaagggcctgggctcacacagctgtccgtggcgccttcgtcctctgtctctctgctgccacgcctggggaggagacttatgtgtctctgtaggtagctttcagggacacacgactgctgaccgcagggatggctgttgccttgtcctgcactcatcagtgaggctggctccccagtgccttgggacatgtccccagccagccacccttgcgctcccatgctgcatccctcgtatcaagagacaaacttgtgactctcctcctgagccagaaattaggaagacaaattaggtgggcacccaagaaaccag

SEQ ID NO: 125373 - DNA, 1943 bp, Homo sapiens
gggttggattctcctgagggctttctcattggcttgtaggtggccgttttctccctgtgtcctcacatggctgcccctctatgtgtgtctgtgtcctaatctcctcttctttttttttttttttttttttttttgggacagagtcttgctctgtcgcccgggctggagtgcagtggtgcgatctcggctcactgcaagctccgcctctcaggttcacgccattctcctgcctcagcctcccgagtagctgggactacaggagcccgccaccatgcatggctaattttttgtatttttagtagagacgaggtttcaccgtgttagccaggataatctcctctttttataaagacaccactcatactggattagggccaccctaatggtgtcattttaacttaatcacttctttaaagatcctgtttccaaactgtcaccctctgaggtcctgggcactaggacttcaacatatggatgtttgtgggaatgcatttcatccattaacagatggtaccaggcattttgtcagtctccagtggggaggaggacggtgctacctttgccagatatggtgggtaataaatcataaacttgaagttatggtcttgattatggaacagatgagtcctctcttccactgccctgcccctccttcattaatcaatcagtttataaatatttatgtcctggggacctctgatgcaccagacactgggccctgtgtggggatatggaggcctgccgtggttctcttgtgggggaatttacattctaggacactccagtggcatagtccacttggggcctgagactgacctgggaggggatgaaggtgcttgcagagaggtttggaggtgccgttttctcctctgctgtgttctctgggacactggtttcataactatccagacacttcaagtctctttacctttgacaagatagtttcttttttggaaaggggataaaatatgcttaaatagaaaaagatggaatgggtttcatgttttgtatgtttcctcttctctgggatgatgcatgtggtcctggaagtcacagcactttctagaggaagtcctagtgatgtggaccccaaagcacatggcatctctgggtgtttatcccgaggcagccactaaggatgttaacattttaaactatagaatgtttctcatagcatcattcataagagtgggaaatttgagaccaaaaaacatgctgttaaagagggattatgttccatctggataattgggtactatgccactgttaaaaattgcagtgcagaagaaaatatagtgatatggacataaagcaccatttggcttttaaataagtatgggcggaagaaagtcgcccgtacttatttaggggtccatcctatctggctaaagttggttatcttggggtatgggagggagagagaggctgattctgtctgcttctttttgtatatgtctactttctgaattttctataaccaagtaacttttatcataagaatgaaagtaggtggtacttgttatttaaaaagctggttctcagagctagcctctcaagggcagtgaggccctgctcttcagccacaggggtctacacaggctcctcagatggcctgggacctacatgcctggggtctgactcccgagctgcaagcctgcacctgcgggaagggatggggggactgcttgttcctcatgcagaaggcttcgtctgtggttggcttgtgctcacaggaggtggcttgagcagccccgtttttcacagctcatcccagcgcagactgattttatttcatcttgttttatattacattttattttattatcattttcagatccaatttgtacaggacatctaatctctctgggatagaaatgagggagaaaaaaggttggggcatccaggaggcacagctgttctaaatgtgagccactgactcatga

SEQ ID NO: 125374 - DNA, 1014 bp, Homo sapiens
tcaaaaacttcagtgtttgcagcagtaacaaatccttttttgctcacatttcattgatttctgcagtattttattaagctctgcaattacaataactggtacaactggcatttgcagggttgggagcagacgcagtggtcatttggtcagcttttgaattgacagaagaaacacagtgcgggactgcagagcccagcctgctggcttcaggcatgcagtgggcatgcagtgcccggctcctcagtagtaacaatgatgttcctggacaggggtggtgaggaaggccctgggccccttcggtcttcatctagttcctacttctgcactgctagagtcttggctgactgagcccctcagtgggagcggggacagccaattctctagtgctccattgtggagcccagccagctggctcaggccatgcattccatattgtctcatggaacgaacagggagacagcagatccatggttggtgggaagcctgtagaggtggttttggagtgacctcatttatgtggtccttggagggcaagatgcagtttcattctaaccagtaagcagaaaagactcacacatgaatgtggctttgctcagcctggttcagcttccaatgtactcatttcttgacatacaacacttaatgcggggctcactgtcttatgtttacacctgcctgtgtcccctcatctcactgtaagcttcccaaaggcgggaatatgctctttcccgttttttttcaactccagcattgtcagtgagactggacacattctaacagctggaaaataaattttgaagttaattgctcaataaacttattttctcatggcgggatctatagatctgtaatgttaaggtatatgatgcacataaaacctctctggtttagagcacatcctccttcagctttattggaagttactaggtggaggaagagctgaaagtagttggatatcttgtgtcttgatgctcctgctgttcctcctccttcaatattttggcatgcccatca

SEQ ID NO: 125375 - DNA, 1032 bp, Homo sapiens
ggccaggctggtctcgaactcctgacctcaggtaattctgcctgcctcctaaagtgctgggattacaagtgtgagccactgtgcccggcctaatttttgtatttttagtagagatggggtttcactgtgttgtccaggctggtcttgaactcctgatctcaagtgatctgcctgcctcaggctctcaaagtgctgatttttttttttaaatgtctgcagttggagagaagttggcatgtgacaaggagacgttacagattccaggtcagaggaggcattcgtttgtgcattatttatattacctgagtgtattttacctgcaaaagggatactcatgtagaaaaccacacacaacaacatctccaacctacatccacttgggggacagccagcgtgctgtgggagggagctggcttggtccaggagccagggtctaggctcaggcccctcctgttatacatggccttgttttctaaccttctgttttcttatcttcaaatatgggggttgcttggctatgaatctgtggtctcctgtggctcaatagtcctattttagagaagcaggtaccatggcggtttcctcaggtcactgaaggcatcttgagctttttgggcagaaacttcactcatactgtgtgttgctggggacccaagtctgggtgtcagtctgccagcatcaggacaactgttggcttcaaaatctgaaacttcatgggctcctggtcctcatagctgctgtgataattgtctcattctcctggtgcatttataacaggtttctttaaaatgtgcactttcccgagagtatcaggaaacaatttttgttaaaaaattaaaaagaaaaaagtccctgccggaaaccttgtcatatttggagactcaatcgtagagaaagaataaggagaaacatgtttaattggatgagtattttctactttagtgggaagtttttctctacttaactaacacttcgtttcccagcgtgatgaccactagcactccccatcccgtcctctctggccctcaggcc

SEQ ID NO: 125376 - DNA, 1004 bp, Homo sapiens
gagcttctggtgatgaactgtcattcgaactgggcgggattgtgaggcttctgtcaccccagggctcttccaggaaaggctggcagggcccgcgggtgccctggagctgcctgcaggagtcaggcactaagtcagtgggagccaaggttggaaaggaagacccccttccattccatcctgaatgactccatgggtgagtgggacccaggacggctgcccttcagagctcagcccagttcccagagacgagacggtgagatggttaccaggatggtccctgccccttggccccggcctctgtttccagctgctccccttagcatctgcacaattgcctagtgaggccatcatgaccctgtgggcacagtcttctgggactgatgcctgtggttgtggcacccccaccctcaccccttctccccacaggctgaactttgatccacacttttcctttgatttcaccgtctcctctcacgcctaaaataacatacaggcctttggctatttccaaagggtttctgggaactgcgccccagtgaggaggcttcccagcagccttggccttcccttcaggcagactcctcatccacagtcaggagcccacaggtctcagttcactgacctgctgagaaagacgaaaaaccttcaacacattaaaaaaaaacaaaaaacaaaacacacccgtcaatgtgagcctcacacaagcaggcgctctccctttgtagctggaatttgaaagtggtgggttggatactgttcctgaagctattgtcccacctctgcaggtggagggaattgtgaacggtcaacagcagggaacatattaaccctggtgtcagcttacatccacccgggagcacaaagccttggctaatgattaaaaacccactccggctaggaggcctgggctgcaggtgtgtggctcacagacactggattcccatcagccctgaccattacctgcgtctgtggttcagggttgctgcatttctctgcgctgggga

SEQ ID NO: 125377 - DNA, 1083 bp, Homo sapiens
gtgtgaggtgtgtcttgtgtgtgttgtgaggtgtgtgtgttgtgctgtgtgtgttgtgctgaagtgtgttgtgtgtgtacatgcctgtgttgtgtgtgtgtacatgtctgtgttgtgtgtattgtgtgaggtgttgtgtgtgtgttgcagtgtgtgttgtatgtgtagtgtgtgttgtttgtgttgtgttttgtgtatgtgttgcttattttgtgtatgtgttgtgttgtgtgtgaagtgttttgtgtgtgttgtgaggtgttttgtgtgtgttgtgtgggttatgtgaggtgtgtgtgctgtgtgtgtttatgtgtgtgtgttgtgtgtgaagtgttttgtgtatgtgatgtgtattgtttgtgaggtgttttgtgtgtgttgtgtgtgaggtgttttttgtgtgctgttttgtgtgttgtgtgaggtgttgtgtgtgaggtttttttatgtgtgttgtgtgtgtgtgtgtgtgtgtgtgtgtgttgagacttgctcagtatgttttacttgaactcagaaagccagacagaggaagtgaccagagcaacaagaccaaccaacacaaggacaggacagatgtgactgtcaggaagtcttgcaggtcacgtgctgccatccctgcctctgccccagtgaccgtgatggagtctcatgaagctatttgattctttcagaaagaatgctgaccaaatggatgatgaggagcttcagataaatgaaatcactttaatggtctccattttattttactgaaaaattaagcaaatttccaacaaaacacccacactttccacctgtaaattactgggtgtggggcttagtgagctgagcatccagtgatctgggacagtggatccaggtgacctatgtgggtctgttctgccggccccagcctgcagtggtttctgcatgcatgttgtcacagaaggcttcccacaagtctctgggtatgcatttcttgtcctcacggcccataagtccaggtatttgactggacagtggttatttcctgcttatagattgtttccacccctcagtaaacttcagaaacacagacacgggtctatacaccacagcaga

SEQ ID NO: 125378 - DNA, 1588 bp, Homo sapiens
cccacatcacccagacactaaggggcttctgctctctggggtgtcagtgcccctgcaggcccctctgtgacctgcccttagacctggctgctcttctgctctgtcctgtgctggcggcccctcccacacctggagtttacctggcacttgtacccacccccaggccctcctctgctctgcagctaacctgaggggcatgacccctttggagaggttctagaatagcttcatcccagcatgttttatcgaggtgagctgccgggtctgtcaaaattcctggagttgtgctggctgagggcatgattgttttgaaacccctgggcctaattccctggtagggcagaaagaaggcagtgatgagccttgccagccatacttaccgacatcccaggacaggactgtaagggtgtctgtcatcttaatgacatactgtgtgagggttctttgtctgcaggcatagggtgcctttgtggctccccggggcatttaagacacaatggagaaggaaccttttccgtgattgtggcgcattgaacccgtggctatttacctgtgatgttcgttttcatattcctggtagcagaatcttctgtttactgcagcagcttacaaaagtgggatgtgaggttagattaattcatggactcaaaatcggcacatagtattgttgagaaaggagctgggaggcaaacctccctttgtgaatgtcaacttggcatatgttacatggacacagggttggagcttcctgggagccagtgtgaaaaggaaaccacaatgattggcatgtgcctttctggaaggtgggaagaaacaagaatcagcagagaaaatgtgcgacgtgggaaattatggagggtgtagactaaggcatcaggggcatgcaccacgtctccatgagtcgagcagaatgatgattttggagggatgtcagaggcaagctattgcagcatagcctcattgggacctctggcttttagaactataaagggacaattggtgtctttctgcttacattaccgttctatgggctgtggtcttctgggtcatagagagaatgcttcaccattgttcaggtaactactgtccctaaggctgggagaggtggccgggctccttacaggggagtcacagcctgtggtccagctgctctgtaagtctacgtgtatgtgtacacgcagtgctcacatgcgcacacaggcacagaatgtagtggtaggtgtgagcatggactagagttgggttgagtcccatccggggtatgacactggtgagctgtgtggccctgaatggagttctttcacttttctgggctccactttcctcttctgtaaaatgaggacgccaccagctcttcttggggtcactgccaggatcgaatgaaataacatgcttagatcctcagtgctagtgtgacacagggaagacacgtgatgtgtggggaagagcctggttggttgtcctgtgaaggtgagttggcagtgcggttcttctggtgcccacagcctttgctgtgtgccattcattgttgatctggttctcctgatggagagaaccagtctgatgagttccagagcgtgtcccctgc

SEQ ID NO: 125379 - DNA, 1022 bp, Homo sapiens
tttatatgtgagtgtatatatgttatgtaattgtttatatgaaggtttgtatgcatatattatgtatataaatgttacacatgtgaatatatgtatcttgtatgtaattattaatgtgtgtaggtttttaatgtagttgttatatatctgagggtatatatatgtggataatgtaattgttacctgtgtgtgaacatatggatgtgtgtgtttattatgtatgtcagtttatgtgtatgtgaatgtgtgtgtgtgtgtgtgtgtgtgtatttccctgagatgaacatgcatgagtccactctgtactaagctctctgtggccttttcaacttgccttgaccagctggcccccaggtgtggtccctggacctacagcctcagcattgcctggggacctatagaaatgcacattctcaggccccagcccagacgtactgaattgctggggccctgcgatcggtgctttaacaaaccctctggcaaggctgatcagctcaagtgtgggaatcctggctgtgggctggaactggggcagagatcagcccgtgggcgtgcagtcaggggtggccttggcaaatgcctgcctttctgggctgctctccccgtgtggtggtgtggggtcatgagagggcctttgatgccaagacacccagttccctcacatctttattttgcatggagctttctcccctaaacagggcagtgctgtcttcctcctggcatggaggagtaaatggaaggatggacgtggcagcccagcccagcctgagcactcttctgcctccctgctgggtggccttgtagaagcagacccccccatttagcggagcttgggcaggagggtttccgcctgcaccgtgtggcttctcagggcagaaagcacagaatcttttttttctttcctgatcctgtctgggctgagtcttctggcactgtgatccttggcattttggatgggcatggaattgctttcagataatactgacatccccgatgtcacctgggttgtcactgtgccctgt

SEQ ID NO: 125380 - DNA, 1097 bp, Homo sapiens
ctctcctgactgtgtttgagccaccttgcctccgttactttctttatctttcccagggagctctcggtcttcagagactatggtggagtcaaagtctcctctccccgtctcttgtgcggaatggaataaccaggttgacattgccacattcagactcttcagttctacttgtagaaatagttctagaaaagatggccccttgtgtagagaatgcatgcccctgggtgaggatgggaggagtggggtcttgaagaccaccaggcagagccttccacctccttctctgggccccgctcccaagctccccaagcacggaccgactcagaggtttccatccttgaggtctaccagttctttgtgaaagtgggggctaaattttgtatctatgagtgatttgcatttttctggaaggggaggccccatggtttccatgacattagcaaaaatgacagggactttccaaaagtgaacaaaaccctggactctcttaactctaaatcttgtcagtcttgatctgctacagctttgtagccagagtgaggttagagacagtttcattcagtctttgggagcctggcttgattattatgctaattttttcctggagaatccatttgcttatctgtttcttctctctttgaaaggtggtgattccctgcggtgtgcaagtccgactggaacaggtaagccctttgcatttctttggctcccttgttccatccaagaaaggactaagtcctttcttgaagctgctccctctttggggatcttttggcttcctctaggatccatgccctccctttgacctgtagcttgcattcacaaggctctatctgaggtcctttgaccatgctgcactggccatttgcatggttttttagagaagaggatccgctgcgcctttgcgggagctgcctttctatcagtaatagttaccttcggggcgaatctccctgggccgagtttccttggctataaagtgaagacagcacaagtctgttgtcttagtgataaaaacctggacagtgagggtgcctgggtcgccaggtggctgtggacagtgtagtgcagtggtttgtagactgacatccagctct

SEQ ID NO: 125381 - DNA, 1610 bp, Homo sapiens
gagagtgaatttaaaaaatgtattatagactgtatttttaagagagttttagatttatacaaaaatcagacactcaggccaggtatggtggctcacgcctgtaatcccagtactttgggaggccgaggtgggtggatcatgaggtcaggagatcgagactatcctggctcacacagtgaaaccccatctctactaaaaatacaaaaaattagccaggcgtggtggcgggcgcctgtagtcccagctactcgagaggctgaggcaggagaatggcgtgaacccgggaggcggagcttgcagtgagccaagatcgtgccactgcactctagcctgggtgacagagtgagactccgtctcaaaaaaaaaaaaaaaattggacacactcttcttcctcttcatatataaacattttccattcctgtggtacatttgttacacttgattagccaatattgatacagtcttagtaaccagagccctcggtttacattaggattctctcctggtgttgtacattctgtgggtttagacaaatgcagaatgacgtgcgtccatccttatagtgtcaagcagaatagcttcatggccctaaagagtctctgtgctctgcctgttcctctctccctcctaatccctggctttcactgaccttttcactgtcccatagttttgccttttccagaatgtcacagagttgaaatcatacagtatgtggccttttcagagtggcttctttcacttagtaatatgcatttaagtttcctctttgtgttttcctgccttcatagctcattttttttttcatcatgcttgacatgccattgcaggaatgctgatagtgagtttgaaaggcaggggccctgattcttcgcacatttcttgcctgcatgtcacatgtggagtgaggcaacaagatgcatgtgtgcactgagtagataccatgcttgaggggagataagtcacaccgctctgttaaccatggggtctccttgtccggctgtttccgccatcctgtaaggttttgtctgtgactccttctgtttccaaagctgtttttgttttgttttgctttacatttatttgtttacttattctctcatccattcatcaaactttaaaggggccctgagagaggacccctgccccagacatccgtctgagtcagagccatggtggagtaatgatgtgtcccagacacaggaacggccatgtgtcacatactccctgaggactggactgcgtaagataagcaagaggctataaatagttatcctggtaaaagccaagattacgccgccgcccactccaaaccacaagtacaattagtcagatctctgagattctctacgattctccttcggttgcacattttcagaaaactctttgagaaggcaggtgccagggatctggagggggcagtgccaggagaaagctaaggagtgaggtcactcaccaggaactgaatcctgtttgctggcgcctggctcctgagcggccccccagagcagcgcaatgcctgcctggctcccttagcccctgccctgtgccactcttctgagctcctcacgcgccatctcttaattctcaccatgaccctgcccggaaggcac

SEQ ID NO: 125382 - DNA, 1254 bp, Homo sapiens
gggcagaatgacctggagaacaagcaggaagaaacgattagaggagccaagcctccaggctttccctgtagctgccgggtgtgtaaaagcatgcttgacacttgagggtgctcgcttcagttcttttttttttttcttttgagacggagtcttgctctgtcgcccaggctggagtgcagtggcacgatcccagctcactgcaacctcccaggttcaagcaattctcctgtctcagcctcctgagtagctgggattacaggcacgtgccgccacgccctgctaagttttgtatttttagtagagacggggttttgccatgttgaccaggttggtctcgagctcctgacctcaggtgatccgcccatctgggcctcccaaagtgctgggattataggtttgagctactgcgcccggcctctcttcagtccttacttcatgtttctgtgaggttctaggaagctgattcacgtgacccaccatgactggaatttttgatgatttggaaaagatagaattgaaatttacatttattctctttatacagaatatgcatgtttatacagaatatgtagtgcatcagctatacccacacggctttagagaaactgatggaaaaatgtcactttctatatggctgtttacaaagtgaaatttaataagaaacaacaataaaagctgagtttggagttttattgtgttcatcaaaaggaaaacaatgtcggtcaagcacgaggagaactgagttgtcctttatttctcccaggacttggatctcccagaagtaagcagagagggattggttcaggtttgaagagttgatctcactccttactgaggaagatctgcacccgaggccctgtgtctgttagcactgggggtaatggtggccgggccagtgcaccttggatgaaagcactttctaaggcagaatgtacttgttagctgaagtgctttcattcaccttgggggatggaactgcagggctaagctttgttgtgtgtgcacacacacaaacacacagagacacatacaggtatacactcacacacggagacacacacagacacgctctcacatcaatacacacacatgaggcataggcatacatagaaacacacacagacacacttacaaaactcagtttcacacatgcacgttcatacattctcacaagcacacacgctcacaccccctacacttttacactcccatgcacataactactgactcacccactcatatgcaaactcacaa

SEQ ID NO: 125383 - DNA, 1028 bp, Homo sapiens
acccatgtgaccttgggcttcagtttcttcctctataaaacaggaattaacccctactaagaggactgcggagaactgaattcaacagctccccaagcacagggcctggtggcttctgcaggagtgctcttttccccttttaataccttaatctgcatcattgtattaggaatcactgtagatgtctacagtgtcagttgctggaaactactctttctgcagttgtggtactgacgctagtagatttatttcatgaaatgttgcctaccgctagcataaatcactatgcattttatttattaactgttaaatgacaagaaagtatatatattttctaaattttcttctgagaatggggtctgctcttttaagcaaacaaattccatttagtgggcttaattagtgcctcagacttagcctgaggcccacctgaaagtggttccatatggctaatggcagagccgtgggcttaatattttctgacactggaatccaagtgcctcttgctcgatgctgccttggttctggccagctctgtgacctttcccctgactggctgcccttctttctactccccccagcctcctgcatttgcacaggctcaccctgccttggctcaccccacagaggacttccgtagtcctggcccacatcgctgcagccagggtatctgggcctagggcagagctgggtgctgcaggtgtccctgcctgcttggtcttggacttctgatgtgatttcccacaagcccctgacgagcaggtacagatgcatccccagccctccgcctctctcacctgtgcctggcgttctgtactgcgtgtgcgtggactctcccactcagactctgtttgcgttggccaccatcgcttttactcccgcttctcttgaaacacgttctggccggtggtgtgcagatgagggtttataccctgctgggggtgcagcgggctgattggcagcctctgctgattcccctggtgaaaatacctcacctccccccgcctgcttccaagctaccagcctga

SEQ ID NO: 125384 - DNA, 3029 bp, Homo sapiens
gcttcatttctctctccctgtcctgcaaggcctgcctgcagcatgcccgtggtgctcgtggggaggtttatgcctcatgatcacagctgcagcctctgggcagaagggcctgtgaaatccgcattggttccagctctgcattgcattgttagggcctccgaagggacacaggactcgctccgttcacacaatggcccctctggaaggattctcctataggaatttagacatgaatttattctgacagtcagttctcaggttggccggaagtggaagcacttccgaaatccagatgcacgactttctcacaaatttaaaggctcccatccggtctttcatggacactttaaattctgattcttaaggggcatcttccagtttctcttcttttttcagggatcagctataatttctgggcacacacgaatgcattctgctgctgaaattcactattcttctttagggatccagttcggctggacgtacataccccttgaaaaaccaatctgctcatgaccccttgaaaaaccaatctgctcatgaccgtgctcccaagacattcctacctgagccacctgagctgttgctaacagacaacagttgtaactctgctcttgcacaccatgtcctcactgccttctgtccacactgccgtgtgtcatatgtaaaaatctctctcgtgccagagagaggccacctatgggatcttcaagccagagactctgaaggattgagagggtttgaagatgtaagaattcttgctagagagactgcttgacacacattctttctctttttttttttcccagcctgcaagtattcctgccacaagaaatgtgaagccaaggtaagcattccgttgctttcccatgggactttttatagctgacttggccttcattgaatgatatgtgtgggggggcctctttggactgcagccacggaaagaaaactctttaggaaagccagggctggggtacggtgtatacttttcatctcaaggataaaccaaagagctttgaaatccacggttttgattatggaaaataattcttaagaatttgatttcagataagaattcaatagttgtcccctggccacatcaacagctccttctcagtggcacatggtccctggtttctcactgccttgtcatactgcctctcggtggagagagggcaggagcagggaggtccagggcattcccctggcctggagacttttctgcctcattttggagatagttgtgcatagacggattggggttttcagctgccacggaaacctgggaaccctggagtaaggtttagtgatgttcactgaggtttgtgagtctctagagaggttcaattgcccgatggcctctatgaccaaaggaggcctggctatgtcctgttgggcttagggttttggtgagtggggaagtgaggtggcctggaagtgccgtgtgggaagtgacagacaccccaaggaagaagcacatggttttctacgttgtcttggtgctcgcaccttcagatctcctggggatggtggctgtacttacggaatccccaagtatgatttgggtctgcagtcggggtgtcagcagtgttttgccccatctactgtttggccctgcctatgggggctctgtaggtgccctgacaggttgtccccatggctgtaggtccagggaagaggagttttagagtcttgggattttgctactgttacagacctcatgggtcagctgttttgatcatttccagccctgccttcggctccgagtggaaggctatgctggaagctgacttcatgttaccatgaactcactgcatgtgggtctgttttccatgtgaggactagggcggctggtttccccgaccctcccgatctcaggcatacacaaacacacacatgagtaaatacacacatgtgcatgcacataaatacacatgcatgcacataaatacacatgcacacaaacacatttgtgctcacacgcatacatgcatatgtgtgcacagaaatacacacacacacacacacacacaaagttggaagaactagactagtatagctctatttcttttctcccaagagactttttaaagtcttcattatggagaatgccgagcacgtgcaggagcagagaggatggcacagggccttgctgcccccttcctgaaccccagaccagcagcccctgtgacctggccacacctccttgctggctgcctccttcagatgtcatgtggggtgcacttctcgggcctcctgggggctgtgtggagcgcttctcctcttgctttccaccctgctctggagagggcttccccttttccagaggagtgggcatttcttgttcacacactcctaggcgtagctgatttctgaccgtggtttatttgaggttttttgtccacagataggctcctttcctggggtgctgtgcaccttcagtggtgtgggagcagtgcttctgaatgcagtggtgagtgggaagattgtacctttgggggagcatttcagacttggagagcttccccctcccctaggaggactgggatgtgttgtccctcacccctgttgtatggtgcctttgtccgcattgcttgcaccttgggtcggctgcggagtaggaggagggggtgggctgcttgtcctgactctgttgtgggcccagccacctctgagccacagccgcagagatgagcctgctgttgttccttccatttcttaaatgaagcctgtcgccggctgcttaagggattgaattctttggttcaaagtgtattccaaaatccttaactatcactgaatatggaatttctaacggcagcaattggcagtttgctgagggatggataagctcttattcctatcagatcacagtgtggggaaatatatccgtgttcattttttttataatacagctttgaaccacaggggagaaagcccctggcaataacaaagcaccttctcattccaaaaatataatgccgtcgttgttggggatatgagggccataactccccagctgctcc

SEQ ID NO: 125385 - DNA, 1015 bp, Homo sapiens
atgaacggggttgccctcgcgctgcgggtctcgggcacccactgctagggtcctagaagaccctaaagggctcttgtcagtgtggtttgtattcatcacgatttaccctattagaaatgggaaactgatgagtatttaaaatatttaagtcagttaaaagcaatggtaatgaaccaattacatgttaaaatgaacataagcttaataaaaaataactatgtttcaaaacaacaaaatgagaggaggtgcatttttttttgtgattctgttatgcagccttaatcaagaggctggttacccttgcatgcagtcttctgcaatgtttggtttgaagcgtcaaagacaatctagccccataaacatatctacttggaaaaggaggcattttaataggcttttccggccattgtagctatttcattttgattctacaccagaactcaagtgacagttgcttaaagttcagtttcactgtggaatctgaaattgtgtcagtagagtttttcctacgctgttttattaaaatccactggcctgtcttgcacaccaagtgcatcttttacccggtgtggaacaccacgcactggacatttggaaattattggtccactgacaatttcgcagaacttctaaatgttgacatatttgttatacaatctcaggaaaatccccacatttgttaataatattgttgattttaacagaaatgtcctaggagttgttaggccctggtgatgggtacaagtcttttttttttttttttttttaaagacagtcttactctgtcacccagggcacgatctcggctcactgcaacctctgcctcctgggttcaggagattcttgtgcctcagcctcccaagtagctgggattacagacatgcatcatcatgcccagctaatttcttgtatttttagtagagatggggtttcactatgttggccaggctagtctcaaactcctgacctcaagtgatctgcccgcctcagcctcccaaagtgttgagattacagg

SEQ ID NO: 125386 - DNA, 1086 bp, Homo sapiens
ttgacggtcaaggtatttcatgccgaggtaagtctgtgtttatgattctctcactgattaatccagagcaaaacaaacaagaaacaaaacgaaaactttttttcaggagtttccgaaagttaaatcatggaattccccttcttagtttatatgtcccccaaccccctacccccttacttagcaggggccaaccgtatttacatagataagtgctcatgaggacatttttacagaaagagcagagtttcccgatgggagaggaggcagcaatttgtaaattaatcatttattctcaggtctgctctgaagtgtcagtaactcaggttgtttagtttgactttcagatctgttactcaagtttgcgaatgaaatgtttctatctttagatttcgggttcattttggtatggcccctttcagatcctgtcactaaactaagccaccagcttgggtaccagatatttagacgtcaagtaatgaatggaacttgccaattcttttgtgactgcacattaataaatctagtaagagaggtgtgactgtaatgaatgtgggagtggtggggggcaggggctgcttggcggaccagtggggtacaccacacagagggagtcactaggaggaccaggtccttggagagtgcgggggctgctctttggcatcatttcatctgcggggttggggatttcctctagaaaatgtgcagagtctcagcctgtgggcttctgtgctgttaggacctccccctcagtgcctccttccctgcagacccccagcagatggtccctgatggccactttagagtagggtgcctgtgatggaacgatgcacgcagtcaaaccttaatgggttgaggatgtgaccaggggcctctaaggggctcttgggattcttttacagttcaaaggcctgagtgtgggtgagaagactggggtgcccctcctctgattcggccccttggagaagtcagtgctgaagaatgtgttggatgagtggtgggtaccggccaccctggtcgctaagtagaagccagagaccagggagccacctgtgtaattcatctagatctgcatccaaggcagagaac

SEQ ID NO: 125387 - DNA, 1040 bp, Homo sapiens
tctgacttctgacgggcaggagtggccgtggaggctgcggcgcgcggctgggacctgggccggcggccacggagagcccttggcccctcccgtgttggccatttcctgggacttgtgtccgcaggggactcgggaggcatcctccccccagatagccgctggggaggggtcagcggccaccctcgcccggccgagcccggctccccgcgggcggcaggggcagccatgaggctgcgcgccctgacccctgggccaccgggagggttcgcgcgcggaacccggtcgcgccggcgccggcgccaggtgagtgcggcccggagctggtgtgcatggccaggggcgcgaggcacgggcgccttcagggctgcacgcacgtgggctgcgccgggtgtgcactggtgcccgtggacgctgtgctggtgtgtacccgcttgtgctcatgtgtatgcgtgtgcccttgtcagtgcgcgtatgtcagtgtgtgtgcaccccgtctgcacgtccacgcgtgtgtgcttgtgagcgcgcgtctgtgtgtgcaggcatgtgtacgctggtccgtgcctgagtcctcgtgggtgcgtgtgtacccttgtgtgtgcacgcgcaggacaaggagcgagagggccagtggagctttgcctagtgggggcgtcttctggtaagcgtggaagagggttcaggcttagctctttctaactcaactgcctcttgaaaaggcttcttgggttcatttccctgcaatggaattgggatactggccattgcgcagacctgctatccctcgcgtgtttcttgcaaaggtaaagggcattttagctctgcaatgaagtgggggatgcgctgggatgtaggaatccttacaggttccctggggaccgcatgggttccagcggtgctctgtggtccacaggacggcctttcacggtgtttgaattaaacagagcggtgctggttggctccccgctaggttcagcctccctttccctaagttattgctgaattaaacagagcggtgctggttggctccccgctaggtt

SEQ ID NO: 125388 - DNA, 1029 bp, Homo sapiens
ggagaaaaataatgaaaaaaaaagaaatgaattaggtgtgccagaagaatgtgatgggcgtggggaggtttatgcagataaatatggtgggtaagaatgccgccccttttcaatgtctgtttaaatgtttccattttccttgtaaaagcactccaacacaagaagtgcatttgcagagaggccaaggatcgctcccggtggacacacggttttgtagcctccctctccaccccacccctgccccgctccagctgtgccttagcagacgtcattccctgttatttcagtctctgcaagtgcaagaatttagggtgataacagccatacttccattccatgaatttgcacacttcttactctctacttatctaacacacatgtgcacagtgtgaaccttggtctgctgacttaactttgcctgtgtggggtgttgtttctctcctgtctgtggacacttactgagttgagattcacaggtgtggaaagagcagggtctgcagtgcgaatgttttcgtagttctcattgtagactgtccaatgacttttcaaagtgctccccaaggcatgaattattccactgggggtctccttgcctgtagttttgaaccctgacccagccaaaggctcccctgctcctggtggctatgctggaactctagctccttccctttggcctgaggtggccacacccagggctccagccacatgacgttttgtgccctcacccacctcctccgtggtctccccatttgcttaaggaaacacctggagtgagacagaaccatccagtccatggctgtgccccactgggcctccaccttcaggacgtgcccagggtctagccacctgcttttgctcagttcccgagtccagcggcaggaagtggacaccaggccagccttctgcccgggagctcaggtgctagagcttgtctgccctctgtgcagcagggagcccaccttgcccatttgagaaagaagcaggggcactccgaggagatgcttcctgaaggaaccgggtgttttagga

SEQ ID NO: 125389 - DNA, 1024 bp, Homo sapiens
agatcgtgttcacaaatactgcatcggggactgagtgcacgtaagacactagccaaattttggagagatgtttgggttcatataatacataggcttcgtgcctgaagcacatcaattctcagatgagcaactgctcagatccctgcctggaggaggagtgggtgtggtgatggcagccacgctgtgaatactgtgggctttgttcacagccacagtgaggaggagatagtgtgtcccggtacaagttatcgctctatcagcagatccatctgtccttcctcaaagaggctgcggcccacttcagggccattgtgtcaaacagttggcatttggccttggccctgggtaaaacacatggcagggtatcacgtgggtgccactcacgactcccccacatctgccggggtttccataacgcactgttctgtttgcagctgcacgaatgcgatatggcacagcagccgctcatagacctcaggcttgttgccatgcatagaagatgcacaccgcagagtggaggccgcaggcagggaagtaactggcatgaattattgactgtgtgtgaggccctgtgcggggagattcacttgttccttcctttattcattcattcactcactcattcctttcatgcagctcatgttcagtgagtgcctgctgtgtctcagatacatttaaccctcactaactctgtagaaactgaggctcagaaggtgaatgcagggcgaggtagcttgcccaccatctcagcttggacatggcagggcaaggggcttccgatcacgcctctcagacccagagtctgcttgtctccattctgcctgctctggagcccccagttcttccagctgcatctcgaaggtgaaggaagacgatcccgtggcctgctcaggactatgtgcctgctgctgtggcctggctcgcctctccctaccctctcctgcaggccccagggtcctctggagtccaaggcttagtgttttgaatcactggcctttcctttgagaaaaatggggctccctgt

SEQ ID NO: 125390 - DNA, 1042 bp, Homo sapiens
caattaaaagggtctgattttgtttctggagaatggttttaatttggataaatggttcagtctgggaaccacatgccagagcctatgatctatgagtgcaattactcagggtttcctcggctgcttttctgagggaacggtccagaactgggctcgctctggtttggctctgttaaaacgtcgatgcaggccctgggcagttggagtgaggcggttcttgtgatcagtccttgaagtgcagccataatgccctccccataatgccttccccaactgatggtggttaatttttaccctctaagaatgtgttcacaattccaaatcaggaatgtcaacagcaggctgtcgttttcccctccttggaacatgttgaaccagaattactggcatcttttccaacgtgggcatttgcagaattggtgggatttgggggctcaaggaggaggcagactcatcctaatgtttctcctctggattacttgaggtccctggccgggcaggcctgcaggcccagagacggggtggtgggttgctctatctggagtcaactggtgtttctttccaagaggatgctgggctgggggaggtgagggactaaatcctgggcgactttgcagaaggacccgtcgcgatggaggggcagcgtgggcagaggccctgggcagggccacctgctgtgttctggagtagcaaaggggatttgcagaaggcaaagaagaatacaaagacacaaggtagggtgtttcaccctttcggagaactgtggcaaagccctggacaactttccatggcgcttgtagatttgagaccaatgccccagcgacctagcgggctggtgggaggcagcgtggagggcggcagggtgtccccagggtgggaggtggagagagtctgcacagaaatttccaagagcacagcccataagggaagaataggcttgctcgtgaggtgggtgaaggcattgccctgctggcttgtatcagggcgttggctcctgggtcctcaacaaagggcatattagcataatgaatagttaagttac

SEQ ID NO: 125391 - DNA, 2367 bp, Homo sapiens
gagtccaggctggagtccagtcgggccatctcagctcactgcaatctctgcctcctgggttcaagcaattcagcctcagcctcccaagtagctgggattacaggcgcataccaccatgcccagctaatttttgtatttttagtagagatggggtttcaccttgttggctaggctggtctcgaactcctgacctcaggtgatccacctgcctcggcctcccaaagcgtggggttacaggcgtgagccactgtgcccggccgatttttttttttttttagaaggcagtagtctactactcttttgtctcctgggcaaaatgaatgaaagattatactgaaggattctatgtctgtgatctagaaaattccctctggcagagggaggtgctcccagagctagggaagtgctcctcagagccacccctcaggggagagacctctctgtccctgtctccaccccagcgctgggcaggaagccctgggagccctctgcaaacagcccgccagctctcagcctaataacgcggctaacaagacccccttccttttactactcaagtacccaaggtggcttgggcactttctgtccctagtctgatcgttgctgaaccgtgcatgtatgccatcctgatggtctcccttttctggaagagagcgctgagacttagcgagctcaagtaacttgtgtgtgttgtgaggatactgagccttggatctgaatcccggtccgtcagcaatgcttggagttcttgccaagatgaggggtttgtgcagtccccacccacagcccagcccctggagtggccaggccaaggctcaggagctgcggcgtgcctgctgtctacctcagccagtgcgccagccccagctgcttcctcggaccccaaggctgggcctttctttactcttccttcctccctcagctctaattatggttcatgttagattgtctgcccttcctcttcctcttctcttttggggaaagataatagcacttaatacgccctttgcaggcctggctttgtttctaagatatcagaagaatctttaggaatctttcttccagctgcccaagcgagcggcaacctgtcggcacccaggaaggatgaatacgggtgccctgctgacgattacaagtgccactcctagccaggccatgcccctggggacaccggggacacctccaggtggactaaagtgtgtcacctcctttcattgtgtcttggcagccacagtgtgacgtggcacctcttgtgtgtagagtttatgaaactgctcctgaaaagtagagaccaattcgttgatgctttgaatacactggaatacactcgtggcgatactgaaagaaagaaagtcctcgggaagtgtctggccaaggccgttcactgccgtctgcagttgcttttctttttacaggagagcccgggctctgctccaggccctgggattatttctcgctggaggattcaggaatctgcgctctccccatcaccctggaacacagctgcagtgtgtaacatttcactcacttggagccacacaataaaaggcacaggcccacatctggctgtgcagggcaggcgggcaggagagtgggccctggggcacactgggccattagcaggggcatctgcgtcctggcctgtgcacattcctccctggagcgccgggctggctctgcaaacaaaggggcctggtcctggcattcttctccaccttgtaatccatcacctttcttagaggtgtccctgggcgcctacccctttcatcactggccatttgggaggtagatcaaaggtacgcacaggaggcagtgacataggccaggctctggcatcccacaaacctggggcagaactgtcctttgtcctgagaggtcctggggttattgtgactgtgtttgtcatttgtcacctgcagcctggggttgtcgttcctccacaggtttgctcctccactggttccggagctcaggggtgggagccacgtggggttttgtttcctccttttgggctccaggcccagtgtactttggtcctgctgaatttccatggccccaggggcctgaaaagcaccttgtggtccttctggagaaccacttcctcattcttggaggtgctaatctgatccactgggagggagctgtgtgctaagtggttgacacaggggaggccagcgtgatagagatgagtttttctccaaagatcaaggacaggtgtttccagtttgtctcctctggaaagacctgcagagccgggtggacagggctggaggaaagggggcctgtgtccatgtcttgggtaggtgctaagggagacaggagggctctacgtgggtgaagaatgcatttctctcttgtcctgcacgc

SEQ ID NO: 125392 - DNA, 1476 bp, Homo sapiens
attttagattttcttgaggctttggtctgtgcatattaattttttaaattgctttcatgctttcccttttgaatgaggtttacttgttctggtgattctggttcttctctctttggggcctgtgaggttatatttgcaaatcaatcaacaagtattaagaaaggcttttctgtgctgaggccttgagggccagggagggggtggggagtcgctgcagctggagggtggaggggcaaggccattacacagagatggaggtgcactgggtcctggtgggggtgtggtagcacagggggtggggggtgtgtacacagggaattgacaggaggaactggcagcaagcccgactcctgaccttaggaatagtaatggtgaccccgaagacaaagtaacaggcataccgattgagtgtttgcctgtgctaaatgctttgcatgcattcatttcatttcacccaaattacattccttggagggagttgggattatgattaccccattttacagacgagtaaactgaggcaaaggaaggctaagtaacttggccgagatgaaatgaaacatggtggtagtgcagcctgggattctgggacaggactctagggtcccagacccctgttcctggctgctgctgcgcgtctgtcgactgaattctaatgcatgtccagacagcgattcctcagctgaggctgccatagctatcagcagctcagctgaattatgtctttaaaaaactaccaagatagaaaaactagtagccccagggcactacttattcctgaatgcaaattgatttttttttttttaacaaagtgtctctttggcacctaatgttttgaaagtgagctgtttgcaaatgtgactctggaaataaagggcaggagagggggtgtcaaagtatgctcttccactgcaggaggtgttgctgaaggggatagcagagacctgaggaggaggcagtatggcaagaacagtgagtggaagggctgacctaccatttggcagtcgcagcttatatctgcttaggactctacacaaggacccattttacagatgagtaaaataccaagtaaattcttaaagtctgggaacagttagggatctgaatgagcccagttctctgactctatgtgccccattcctttcttaagatcagcctgttgtaaaccacccctgttcaggggaagcctcttgttccctccctgtgtccctgtgtatgaacttgagagggggaggaactttccaccttcctgagggcagaaagcattgtttagatccctgccacttactaggaagccagagacatttgctgagtgcctcagcagcacgcttagaattgaggcttcgaggcttcctcacagcggcccccatagatttcccagggaggggcctcctgtcttgcgggttgatctggtgggtttgccccatgcagcaggagctatcatgggaagggtgggtctgggcgtctgaagctctc

SEQ ID NO: 125393 - DNA, 1052 bp, Homo sapiens
ccatcgccctgccggaccgcgcctcaggctcccccaggtactggggccggggaaggaggaaacgcggccacgcgccgcggtcctctttgtttcgggcccggcgcgggctttcgcgctccgggcgcaggaacgaggcttggggagcacagagatctggagctggggcgcggggactgagttcggggagcgcggagacagagttcggggagcgcggggtacgggagctcagggcgcggggatggggtcacgggagaacccaggttagggagcgcggggacccggttgggggcgcacgggcaaggggtttggtgcgcgcgggtacggggtttgcggcgcgtggggggcgggggctcggcaggagtcccaggacaggggctggggcgcgggccagcttcgccggagtccggggacgggggcgctgactggctgggtttggggactggctggggcgcaggaccactcgagtgggacccgtggcgcccgggcgccctggactgagggcagagaccggagcagctatgtcgcagtcgctgtcgggaccgagcggactttgctccctaggactccgtctcgagactccaggtggagagcgcagctaggggcttcaatgggcaggctcaagacccttctcctactttttctaggcaagctctccagtgcgtctctttccctttccctttggtgggtgggaggcagggggtctttacgcgcttcctttttttccctgaaggacgggacctcggggtggggggatattctggggtggggggtgctgtcccaggctgggggccagctgtgtggcatgtgcctcctggcacgcgggagctgtcgctgacaagcaggaggagggagggtcccggacggcccaggggtctctgtgtcggtgctgtgcagcggcctgacatgtgagtcccgggtcctttgcttggagtgatttgagtgtctgtggcgggaagagattcaggcgttcctcaggcattctccagacagtgtcagcagatgacccgaactccagcgtggttgaaaaactcaaagcgccatcagggtgtggg

SEQ ID NO: 125394 - DNA, 1094 bp, Homo sapiens
gttgctgaagcgctcatcacacttcttgaggtgctccatccttccttgaggaggcacactgccatgggttgaatggtgttccccaaaagatatgctgacatttgaaaacaaacttatgggtaataaaggttagagccttatatgtatacaaggtgtactaaccacacagtttaatatgtagcaaaaatgtacactcgatatttttgaactggttattttttttttttttttttgctgtattccaactgaccaggacaatgttaagaatacatcttaaatgggtgctcactgataaaggaatggttaataatgaagccatacatttatgtctggatttaaacattttaaggactcatttaccaagtccttgtctgttgccttgaagaacataaactgctgtttccagtattcacatcagcaggatcttattcataatacaaaacgtcttattgcattgaaatgtactgtaacatgggaaaatttaagccttttgtatgttttctttcattgtgaaataaaatttaattctgaaagaaaaaaatacgttgaaatcccaactcccccctaactgtgaatgtaaccttgtttggaaataggaccttcacaggtgtgatcaagttaagatgaggtcacttgggtgcaccctgattcaataagactggtgtccttataagaagagggaaagctggacacagacgcagagggcagaggccacgggaagacggaggcagcgcttggagtgatgcgcatgagccaaggagaaccgggagcctcagaaactcgaagagtcaggaggaaccctcccctggagccttcaaagacaacacagccctgctgacccttgattcagatctctggcttccagaactggaactgtgagggagtagagttaggcggtttaagctacctggtttgtggaactgtgcaatggcagctctgggagagtaggacagatgttgagcgcaccgactcccagacctccctggccagatgactgggcttgcctggtctgcacctcagcctcctggctcttcccctgcctggaaccctgtatatggtctcatcatggctggcctagctcatcatgcttctgc

SEQ ID NO: 125395 - DNA, 1039 bp, Homo sapiens
ggcctccgttctccaggtccctcctgcctgagggtcccctgggctgctgcagggaagagggtggggcaaggagagaggacagagggctattgatgaggtctcttagatacagagggccatctgtcctgccccttgaagcccaggcactgtgtgtccttgcaaagtctagcatagggtgttcccagcatgggacctgcagctgggagcctcagtagacttctgtgcctttctccctgccctgccctaccccagtgtgtgctgttttacaggactgaagcccacacagccctgtcccgactcagggccagcatgtggattgaccgcagcaccagggctgtgtctgtgcacttcactctctataaccctccaacccaactcttcaccagcgtgtccctgagagtggagatcctccctacggggagtctcgtcccctcatccctggtggagtcattcagcatcttccgcagcgactcagccctgcagtaccacctcatgcttccccaggtgagctgacctgcctcttgggcctcctggaggtgcacaggaagatggggcttcacctgggctgggcttctccaccagacaggactagttccctacccattcacctgcccctccggtcacactctttgtcacatccccttcttgcagcaagcatcacactaagggttggggcatgagacgaagaagacccccagtggggaaaccaatcttcacatgtgtggcaagggcaaatatagagctgtcttgaggtaccaaattcatcacgggggaattgggcctgatgtttagatccccccagggatttagctcaggctgctgtaacagaatagcctacactgggtgctttaaaaagagacatttatggccaggcgcggtggcttatgcctgtaatctcagcactttgggaggccgaggtgggcggatcacaaggtcaggagttcaacaccggcctggccaacatggtgaaaacccatctctactgaaaaaatacaaaaattagccgggcatggtggcatgcacctgtaatcccaactac

SEQ ID NO: 125396 - DNA, 1008 bp, Homo sapiens
tgggctgcaagtgtccatagaccacatcttgagaagtgtcaacctccaaaattaagtccccaatccttggcactgagtttcaggttgaaaatgttgttataaagatacatagggcacacctgggcgtcgatctttctatgtggttcctatgacggtgcctgtggcccttagcatctggccatcacctgcactctgagcctgatctgcaggtcccctcaccacagccctgcacccctgttacatgaaggaattcctgggtcccccaaataggtcttatgtcttttaaaaagtcccctctgtcagaattcttcaccttttttctaggcctgttaaatttctatatatcatgtaggaactggtcaaactataaccccaagccttgacagtccattgccgagtttgtatttcactccctgggctccctgtggctcggagcctggcccctttgtcagcacttgtcacagttttagtcatccagaagatgctgtctgtgtgtgaagaagcatctctgtaacccacatgtccaagatgaccctcttctgacatgttccctcacagtcatggtttccactgaaatcacagatggcaaaggctccaaggtccagccgtgcactgtggtggtgactgtgctgccccgctaccatggaaatgactgtctgggcgaggacctgtgagtaacacaatgccacacagacatcctagccattatttgtatttcttccagagttggctctcccccaagttgttaacaagcgtcaaaaacatgtcaggaactcatcttcttaagatggagcaaataaaaaagtccgggtgctatcactgcaatcctgctaactcatatttgcatggcattcttgcaggtgcttcagagcctataaagctactttcttctccttcttttttttttttttttttttttgagacagagtctccgcctgtcacccaggctggagagtgcagtggcacaatctcggctcacttgcaacctccacctcccgggttcaagtg

SEQ ID NO: 125397 - DNA, 1050 bp, Homo sapiens
taggaagccccacccttgtcctccagaggtcccagaccatggccttcccttgaggcaccccgacccctccctcctgctcctcctgctgtgtgatgcccagcagtgtggaagctgaggggcagctggggcccttcaccctgagggggctgtgacagtctgatttgtgactgtggggaggttccaggacaaggagaggacacagacactggtggggaatctcagtgttgttcgaggagccctttgggcttggtgaatggagagccctgcagggcccagggctctgggcagctgggagtgctgcttacctgtcacttaccctcttcctggctgtaaagaatgtccttggtacaatgaaggctcagctgtgtgtgtatgtattgtgatatcattcacagtgtgttcatttatactatttttgctcccttggactggatcataggacttccattatgaatttagttaccagataggaaacacctccaaacacactttgtaccatgggagagacacccagtattattttgtgttgccagctggtgagcacttggacaattacaaaggtaagctatggtgccagttggagtcactagctgtgccaacctacagttctaaaccttttttcctggttttcaaaaactaaactgtgtctagaaaataaaatcaccttgatcagtttaatgcttttcagtttaggtttattatctaccttttagtgcagaaagaacattagtaatatcaataaattaaatcagttttttatatcttaaattttaactgaaatacactgtaaatgataaaatgccagagaatgttttttcatatataaattaaatatttaaaatcaggacatttcttacttactaatgaaatatgtcatatctggtgaatcttgcatttattatagatgaaaccaaatcaaggtatccccctaaggaacaaaatgtggggtaaatgaatgtgagttagcatgttagtaacataacctcaaaacaaaatgaatcccacagtgtttacaactttctgctctgaccctgttcctgaggttgtggt

SEQ ID NO: 125398 - DNA, 1143 bp, Homo sapiens
ccgagatattatgaaaaaccataaaagtgcactctggaaagtgctgggtcagcaaagagactagagggcttgacagaaggcagccatggaatgcaggcccaagggaggtgggcgccgggctgtgggcatgggatgtgtgaactgcccatgacccacaaccctgcacagggaagaggcggggccgaggcagtggagacatctttctttgtgagcatctgaggctgtgtgggaatcacaaaggtggacggccacggggaaagtttgggaggggatgggtttgcagctggtagaagcaagccctgaggcaaggcagcgaagagggatcacgtggtggcaactgctctagtgtggagagctgggccagagcccaggcttggaaacagagggaccttgaccaggcccagctctgccctcaccgctgtgtgactcggaaaagctacacagcctctctgaactctgtagggtggcagtgtccttgcctcactggatctcacagtgttagagcagatcacgtgagtgtcgagcttggcacagtgttggccactccatatgtgccatcatatgtgctgtgacattgctattgaagtcccttaataaagatccaaagtagggtgatttaaacatgcctaacatgaattaatgtgaccaaagaaccctcacattattttcctaagatctcaagccaatttatatatttcagattcgtccacatctcctgggtcagctttaaagacaccttcgtcaactggaatgacgaactctctcttcaagctatgtgtgaggactgcagtgaaataccgaatctgtcttattcctgggatctctttttagtcaatgcaacagaaaagaataggatagaaggtaaaaaggattaatagctttattttgttttctgagggaaaaactcagggttattgtgagattgctaaaatgttgcaaaatacatttggtatgacccagtgtgtctgatctgcctggtgaacggtccgtcgtgcttccccagcccctcttgcctctacagtccgtgtgaacacttgtgaggcaccagcagaagaggtgacacactcaagggctgcttctgacctcagtgtgatatggaaggctgcgcccaacacctgtgtaggcagttttattgagctaaag

SEQ ID NO: 125399 - DNA, 1058 bp, Homo sapiens
cttttcttttcttttcttttcctttcctttcctttctttttttggattatgctaagaactgtagcattttcaggagaatgaaacatttgaatatatgtaacaccaaaatgaaaggacatgatcggttatctgttgaacacctattctgggttagaaaaaatagggttggtttttatttctttcattcctttgaggcctgtgattcagagcaaattttccttttcagggcagaggtgctcaaatgacacatgggaattaaaatccgtgactaagctgcatttgctaaactgctttctgtggcatctgaccccaagaggtcagcccgcagagggtgctggtggagatcagcatgcagagaccaagtgcccggggcaatccggaaagggtcccggcccccacacaggcaatacccctgcccacctttagaccagcgagcacccacgctgttgggcaggtctgcgtgctgggggaacgcgttctctgggtgtgagatttggacccaaatagcaaagggactaaagcaaaaggcacagcaggaaaaagcacagaccctaggcaggaggactctggctcccgtcctgactctgctgttaggacatgggacagagtggttttcttgagttttttatctgtaaaacattgttatttttattttcttatctgtaaaacacagaaaataagattgataatttcattttttcttttctttttttttttttttttttttgagactctgttgcccaggctggagtgcagtggcatgatcttggctcactataacctctgcctcctggctttaagcgattctcctgcctcagcctcccaagtagcagggattacaggtgtgcaccaccatgcgtagctaatttttttagtagaaatggggttttgccatattggccaggctagctggtctttaactcctggcctcaattgatccacctgccttggcctcccagagttctgggattatggacctgaaggaccctgcccggtcattttttctttattttacgtgttttctaaaagtataaagaaaaaaatgaaatcatctcaaa

SEQ ID NO: 125400 - DNA, 1025 bp, Homo sapiens
ctgtgtgattggaagctgagacttgagtatcctagactatttccaactccccaaccaatttgcagcacaaggagctagggagaaatgtagaaagggtggcacccaccctcacggggagcttttcgcaaaaacacaggaagtagtgacttgtgggagataccatctttcgtgtctattaaatcagtgatgagagaaactctaccttttactgttactaatgtagctagagcagtgactcccaaatttttgctgacctcagattcacctgggggcttgctggccccaccccagtttctgacccagtgggtcaggggtgggtcaagaatttgcatgtctcacaagcgcccaggtgatgctgatgctgctggccctgggaccccactctgagaaccagtggaagtgaagcctttcatcaggtttctcagacttggcttctagctggctggacccaggccaggctgcttggcttctgccctcccaccccagtggtccactgtcatgaaatctgaagcctctccctctctcccacagctcccacggccttccgcctggcattcctcgcacccccagcttcacggcatcgcagtctggttctgagatcctctatccccctactcagcatcctcctgtggccatcctagctcgaaattctgataacttcatgaaccctgttcttaattgctccctggaagtggaagctcgggcacctccaaatctgggattccgtgttcatatggcttctggagaggctctctgtctgatgatggatttcggggacagttctggggttgaaatgaggctacacaacatgtctgaggcaatggcggtgactgcctaccaccagtactcaaaaggtaaggtgcatggtgtccttatcaggagcctgggaaggaggtcctgagctaggggacccaagaggcagtgttgggaaaagaaaagaaactgcattccgtttctctggactcagccaaccttcctggctccaagaatagtagctcagtggcacactgcggacgtaggtgggt

SEQ ID NO: 125401 - DNA, 1117 bp, Homo sapiens
accacgcctggcctatgtttaataatgttgaaataggatggaatattttgttaaattaacattttaaaattagaagacaccgttttaatttttaaacccttcctcctctcattgtaacgaaattaattccagctgcagtgagaaaacttaaaaatcatgatacaaaatgaaacaatatctgaaagtagttttataaaactgaaattgctgttaaagagaatgtgttagtgacttaaccatttgctctatgtgatgtttattatcaaatacatataattttgaagattttaatgaatggcttaagattttatctttgtgtagaatgtggctaaagaaaccttagttgagattcaagaagttggtgtctgtttctgattcttatcacaacttgctacttagtgtctaccaagtcctccacctctttgctcctcaaagagctgtgaaaaatgatggcaggagccggtacaacaccacagacttagagaagggcacagtgctgctttattgaatgatctaccaaggtaaaattttgccgggtcaagaaatagcaatttaatccatttaaaggaatgaatataatttgaaacattaacttatttcaagactaacatctcaaagtgttgagaccttttttaaaagagctttctggattttgagcatactttcactggctgtgatttataagaatttgtggtttgtggagtactgtcctaaatgccagggtaaaataaggcagtcccatgccttacctgccctgggctcagggcctcacatccttttggtacgcacatcttttctcttctcccttgttctgctctcccgcagcatatacctcctagccccaggcaattacttgtctaatatctatctctatatatttgcctattctggcttttagctttttttttttttttcctgagggagacagggtctggctttgtcccccatgctggagtgcagtggtacagtcatggctcactgcagtctcaaactcctgggcttaagcagtcctcctgcctcaccctcccaagtagctggaactacaggtgtgtgccactgcgcccagctaatttttatattgttttgtagatatgaggttttgtacgttgcccaggac

SEQ ID NO: 125402 - DNA, 1113 bp, Homo sapiens
ggttgcgtcaacatagcaggcttgcttctttctgcctcacggctttacatgtgctgtttccccagcctgaaaccctgtccccttgttcttgtcttcccatggctgctgcttctcctgcttttggtggtatctgaaatgtcacctcctcagtctaaggaaactcccccacactcaccctggtctctgtggagtgctttctcacggctataatgagcatttcatacagtttcatttgtttgcatttttattgatctgtttgttccactggaacactaaggacctttttgtcttatcaccacacttcccagttcctggaagtacccagagtctgttccataaatattggcaccatcaatattggtcgaatggcttttgagtgaataaactgacagcattccacttagatttggtatttcaacttttttgtcccgggtcttcgggtttgttttgttgttgcttaatattaacaacataaaaatatttttaaattcttttcttggcagttatctatgtcaagcagtagccgcattgtgacccatgacatccccataaaggtgattcctaggaaattgtggaaggacttacaagaaccggtggtcccagatcctgatgtaggtgatgcctgcagtcctgctgtacaccccacattaaatggcatgacttgaattctctagttttagttgtagtcttgcagtatattttatttttaaaggatacttaacgaaaacattagattatttgccttttgttatttacataaagcatcttaaaaatgttgcatatgatagaaatgtcatgccatcctatatgtagaaaatgtctcgctcagtaacatcacttaaaacacaaatgatacttttggaggacaattagtatttattagtattcttggccttagacaccaatttgggtttcacaggacttgatcttttcctcagccggtcaggagcgatatctggatgtgcacgaaagccaagaagagaagaatttcatggcttagggctaacatggggtaacggtcatgccgatggttaaccctagagctcctgaaagtaaagatgatgccaaagggcccatttcctcttgctcacaatttgtttaagaagaaagtac

SEQ ID NO: 125403 - DNA, 1032 bp, Homo sapiens
ccagtgtgataccaacgttaagtggttatttttccaccgagaagttgatgaacaagaaattctgcaaaataagttggtctctaggatacataatgtgcattttagtaattccttattttaacccctgctttaggaatcagtaacatgatagccaagcttgccaaaacctgcaccctccgcatcagccctgataagcttaacttcatcctttgtgacaagctggctaatggaggagtgagcatgtggtgtgagctggaacaggtgagcaaaagcttctgagaggcctgcacactctgcagattgtcactggaaagatcacatataccctccctcatccctcattttttttcccttaggagaacttcttcaacgaatttcaaatggagggtgtctctgcagaaaacaatgagatttatttagagctaacatcggaaaacttatctcgagccttgaagactgcccagaatgccagggctttgaaaatcaaactgactaataaacactttccctgcctcacggtctccgtggagctggtgagtaggagagtcagggtttctaacacagaagtcttggcctcgaaggaatagacatagttagcctagcctttttaacaataaatactgttgaaagctgtttggtttatttaaatttaaagatctggtccataactatattttgcattagagtcagttcctcctcattttaaaattgtgttgttatcatatgcattcagctagaatgctgctttttccaagccgtgaaacttccagcctctctgtttcttgtagtggtattgtcaccttgtctagaaatcatggtttctctatccattttcacctttgacatgttttctccccactcccaccctgcctcatctgctataataacctttaaatggcccctcgttcttcagtacacgtatgttttatatgctactgccagatgaatttagtgcacagctgtcctccaaacacacaaatacacaaactcatgcgcatacatacaatccagagttgctcttcctactcatag

SEQ ID NO: 125404 - DNA, 1021 bp, Homo sapiens
cgcccccaccttcctctgcccctctggccccgcctcccccgccttcctcctctccaccctcccgcgaaggtcccgggaggctcagcccgcaattgcttctcgcctctgcagagcagctgggcaattgtaaagaaccagcagccagttctgttactcattaaacagcccctactacagaggaaatcttcttacccacgtggtcctaacctggggcggaggaaaccgggctagaagcggctctaggactaacccaaggtcacgccgccaggcaggatccccggtctgtctgtctggcggtggccccgcggctggggccagcggagagaaatgacagcgtggaaccagccctggcccggtggtcgggaatgtggagctggcactgtcactgtgtgtaccctggatctctctggacggcctcggcttcccccctggggagtttctctgggaccttcctgatcctgggagttcccgcttgctggggcaaagccaggagctcgcccgaggaggggaagtgactcattcacttcgagtcgcagctaagtggccgaactgcctcaaaccggcgctgcactctgacccccaggggccggacctgcctgcccccggccggtgcccactctccgtctcaggcgtctttcctggtcctctccctgcttcccgaacgcgcactctggtgagagcacagagcctgggaaagaagacgacctagaggcccgggcagcccagcacctctgttacttgcttcctaaagggaactccagttcctgagaaaacatggggttgggccgggagtggtggctcacgcctgtaatcccagcactttggaaggccgaggcggatggatcacctgaggtcaggagttcgagaccagcctgcccaacatggtgaaaccccgtcactactaaaaatacaaaaaattagctggacgtggtgtcgcgtgcctgtaatcccaggtactaggcaggccgaggcaggagaattgcttgaacccagcgaaggatgcagtgagccgagatcgcgc

SEQ ID NO: 125405 - DNA, 2050 bp, Homo sapiens
ctagagccgcttctagcccggtttcctccgccccaggttaggaccacgtgggtaagaagatttcctctgtagtaggggctgtttaatgagtaacagaactggctgctggttctttacaattgcccagctgctctgcagaggcgagaagcaattgcgggctgagcctcccgggaccttcgcgggagggtggagaggaggaaggcgggggaggcggggccagaggggcagaggaaggtgggggcgggcggggcttgtctgcgggatggcccaggatgcggtcagctgagttcgccggcccagggcaggcggggcccgagcctagcggtaacccccgggcagggcggggccgctcgcagactccatatgagattcacctcgcaggtggttccctcattcgagtgctccggcgcacagacccgcgccccgccgtctgcgagcctcccgagagccgtcccttcgtccggccctggagcattgcgtttgtcgccggtgtcgcagtgcgaggatggcgccgcgggtgtagcggctctctgcgcaggccgagtggtgagtcgcccgcggcccggctcccgccgttctctcttcccaggggtctagcccgtcccctgccttggccacgtgcccatttacctgtaggggcggtgacggaggctctggtgcaccttggctgtgagctgcagaggagcagagagcggcccggcgcggctgcgcggggaggcgggcgcgcggccgggaggttctggggctggtgtgtgcggagcgaggtgggcgtgggggaagcgcgcgggcgggatgtgcttcctcgggtccaccccgtgcctacctctcccacgtcccggcgacggagcgcgcggggctctgggcggggagcccaccgggccgaggcgcagcgagggtgaagccagagccggcagggtcaggtcccgcagggcgcaggcgggcgcttctcgcagcccaaacccgggcggggagtgcgggaacccctagaactatgctgggagccccagataagaggaaggagatggtgacttaagtgacgaagtgatgttttgtccccaccgccttttaaagggagaagggggtaaaatttcatttggaggatgattgttacgcgagctttcagagttcagatggcgtcaagtggccatcgagtcaacatttaacaaaatgttaccgcataaaatattgtcatcgagttatctggcagctccgcagagaaacttcacaggcatatgcgttatatgacataatttgcatggggaagggggtcccttcacgattcttttatatggcaacctgttcttggacctggcagggcccagagaagcgaggaactccgcagctcgtcgacacgtctcgtctcctgtcccaattcagggcttggtgaggtgactcgcggtcgcgggtgactcgccggcaggacactgcctggaacgcctggagcgcctcccactgcagacgtctgtccgcctccagccgctctcctctgacggtcagtttcaaagaaacacagtctgggatccggagtagaaagaggccgtttcccgtgaaggccatagaggcagtttccaggcgcctgggtgacctgtctctgcacttccctctctgcttctccatccctgtttcctttccccactgtcccctgcctggcctttctttggctcattttctgccttcctggggtcttctggttaaaaagaccattggttccattcattggctgtaaccgcgggtctttaaaaaactttgtgacttccttgaatagaaagaatgtcttactctggatttctacaagcgctgctgagccattcccagggcaggcctttgtctctcccgcctttcagtttgtttgcccatctgcattttggcccaagctttccccatttctcagctgctcttacattatttcttttttcagaggctaccctgaccttctagtcctctgcattaaacctcatcaccgcagaccgttttaattcagcacaggtgtatcgagcacaaattatattcttggttccaatactttcagcactggtgggcattcatgttt

SEQ ID NO: 125406 - DNA, 1492 bp, Homo sapiens
gttttgttttttgagacggagtgtcgctctgcaacctctgcctcccaggttcaagcgattgtcctccctcagcctcctgagagtagctgggattacaggcgcctgccaccacacctggctaatttttgtatttttagtagagatggtgtttcactgtattggacaggcttgtcttgaactcatgatctccacccaccttggcctcccaaagtgctgggtttacaggcataaaggggacaggttctctggaggtgtgaggtgcctgtccacttaggcttttggcacattttcagcacctcctctctgaaactagcaatgctataaacacacatacacactctcctctctctctgtttctatttctcacacaattcacacacttacatcaggtgtgtaaggaattccacttcattgcactgactttctacatattagtggggctctgcacgatcttggtttctactgagtggattcactccattctgtgattttttttccttagggtcctgcctcagttggcggaatggcggccacgggagccaatgcagagaaagctgaaagtcacaagtaaggctccatttcattccaggttgggttgggtggggttgggttgtttatagagcatatgttgtgccacacatttttctaaggacttgacatatattaacacatttgatgcttgtgaaagagactgaggcctggagggattaatgactcaggaggttcgtacattagatggttaaagacctccggggtcgggtgctggggcctcagctcttgattcttaggacatgttgtttcagaaaaccagacaagtccctgctcaaatctctgtctagtaggtttttcctctatgtgccaatttcttaaacaaaatcccctgcttatcactcagctctgccttggttctgaattttaaatgccttcttatttctttgcagtttgtcatacttctggtatgcttggcatgacaccacttgtgtttaggcattgctagaaaagcaagaatttcttgtcttcattctgattcctatgtgaactttaatccgctgattattcttattttctcacccccccagttgtctcccacctctgctggggttacctgggcaggccttctgtcctgccgccatggcctctccccagtcttggtggcctctgaccttggcaccacccagggttgtggtgacctctggccccccttgctctggactcctggtcctttgttcctctgtaacttccctgagacctctctgaagtctcacatgtgacagctgcatacccaggtcataattccatatggacaatgctcttctcctcctccattccccagaagtcctggtgtccattttggagtttctggtgcctgtggacattccctgcagtgattttttttttttgagatggagttttgctcttgtcgcccaggctggagtgcagtgagtggcgcaatctcagcttgctgcaacctctgcttcccagtttcaagcaa

SEQ ID NO: 125407 - DNA, 1259 bp, Homo sapiens
tagctagtgtaacaaaaacaaaaacaaattgaaggtatgcagattggaaaggttatctctgggaggtaggattagaggttgtttttccttctatttctgttcatatttcctatggtaaacatagtagttttaaaataaattcaagtttatacatcgaatgaacttgattagaggagcaactggctatactccctactccttgtatgggtagatcaaacatttccatctgtgtactttcgtgtgctcttctgatttcatccctgttgccctccaaacagagccatgggagcaacaggggttaagagggaggagaagggggaagaacagaggggaggcaagtgcggaccttggcaatgttggggttgtcttatctccgggatctggccctgtctttctcccaccatgagcctcgtgtctgacataggccacttctgtgataatgtcggctgtcgggcactgatgttctataagccttccactttcttgttttttaacagtgattgccccgtcagacttttaaatccaaacatagcaaaaatgaaagaagatattctctatcatttcaatctcaccactagcagacacaatttcccagccttgtttggagatgtgaaggtaagaggccaggtgttgacaccttggaatttgccttaagatcaacctccccctatattatacaggtagaccaacccacaaatgcttgagagaccacagctgacaggtttatgaagacataatgtttaccaaatttttgcaagtttttaactttcaagtatgtgaactagcaagtaaaactatcctaagtagtgccaaattgttccctaattcatcttttgcaaatttagtgcagtcatgcattgtttaactctggaaatacggtccgagaaatgcagccttaggtatttcatcattgtgtggacaacatagagcgtaaccacacaaacctaggtggtagagcctactacttgcctgggccatatgcctctaggctacaaacctctatagcatgtgagtgtcctgaatactgtaggcagttgtaacacagtggtaagcatttgtgtatctatacatatctaaacatagaaaagctacagtaaaatcatggtattatataattttctgggaccgctgttgtgtatatgtgattccttgcttaccaaaacatcgttacatggggcatgactatgcatttgaaactatatataaaataaacttcctaatgcttcattgagagaagagaaagatgtaaaaatttccta

SEQ ID NO: 125408 - DNA, 2507 bp, Homo sapiens
gtagcccattttgtggggccctggtaacacagagggacagtgaggagttgctccctctgtttcaaacccaggctgtctccacaggccgccttctacatgacggagggaggccgagggtgcacaggacctggaattacctcctcagagagagcaagggtctggattcctgcgtttgtggagctgactgccttttgatgcttggccgcccaccctgaccactcaccagggggccttgttaaagcagattcctgggccccttagattcagcaggtcctggtgaggccagtgaacttatatttttagcaagttcattggtaatactgatgttgctggtctaggggccccacttgaggacctctgctatagacagtgcactaatgggggtctctcttctctggctgcagtttgtgtgtgttggtggaagcccctcccggatgaaagccttcatcaggtgcgttggtgcagagctgggccttgactgcccaggtagagactatcccaacatctgtgcgggaactgaccgctatgccatgtataaagtaggaccggtgctgtctgtcagtgtgagtacctgccttcccttgtgctcagtctctaggctctgcaaccccctgtgccccacccctctgcacacacagacagctggtcccctaacacctgcttactgtaaatggctgggagcagggtgagcccacagtagctgggattcagagattattgaactcaggctatcgtccttgaggctcagtctccaggggcgactaagtacacaaatgcatatacaccgctgtctgtctacacagtgtgagggtggcaggtgcagggagttagagtgcttggggtgtagaggaaggacagtagggggcgccctgcctggagcaggatggaaggagagcctcaaagtaccaggcctctaatcccctctaccacctcacagtgagttacttcaaaacacattttgatttagcaaggagcatggtgaacacagaaatctccagattctaccatagaagtcttttcatttttcagttttgattttgtcaggagcaatataaatgaacagctgcagagtaaggaaagggaaccccttttgttgagatgtgcacccctacctctccagtcagctgaggacactagctatgtcaaccaactagaacatatcagggagccaagacatgactaggttactgataatctgcgcaagcctttcctgtgtgtaaggctccgtgaccgattctagcagggatgcctccactgtatggctctgccacaggaacagcccctggaaagtgctgagttcatccggggagaggcatcacagaagttgtgacactagggggggtgctctgaagaggagagcaggagaaggaggtatgcagagaccccaaagagaggaaaaggcacaggcagacaagatcagcaaagcatcctgtgtccagtgggctgaggaaccagctgattacttagtttgtctgaagcagagggtgtagggagaaaagagaaaggagataaaactttaacctgtggtggggtgtgggagaatagggtgggtatttatgcagggcttcaaatgctagaaggagctgtttgttacctggcaatagcagactgctgcttccctgctgagcccctgggtccgcagctgttacctatttgacaaattgtgtcgatcaaatggggttttgtctttgacagctttgcatacactttaaagtttcccaaagtgttactagttcttaaatttatatttaaaaagtttatctttcatcactatgtcaatgggcatgttagattgaattacatcacatgaaacatcagccagaacattgacaaagtcacaaccttggcttaacatgggtgtttctccctggttccagcatggtatgggcattccttctatctcaatcatgttgcatgagctcataaagctgctgtactatgcccggtgctccaacgtcactatcatccgcattggcacttctggtgggataggtaaggtctgcagaggggcctcttgccctgtgaatggatgagggactggggcatgccaaggcagcttctacatggtgtggcattagagacaaagagttcctttcttggctttgttcaagggaagcttgttaacaggaggtgtgaaaagaagcttgttttgttgtttttgtccaacctgttctcccaacccgcaccccagagctaggcagtagaagggcaccacaccatgcatatgggggaaactcatccttttggggttacacaatttgtgccttcttgtctgcttgattctgtcttattctttctaatcccccttcttctccattctctcctttcctttgcttacttttcctcctccctaatcctgcagggattttgaagcaccttaggagaaaagacacaggaaaatcaaaggggggaagagagaggcgcagtacaaaactcagataagtgtccttaaattagcttaaaatgtccctatcctcaacagggacattttttttttgtttaaaaaa

SEQ ID NO: 125409 - DNA, 1136 bp, Homo sapiens
tacagacacccggcacaatgcctggctaatttttgtatttttagtagagatggggtctcaccatgttggccaggctggtcttgaactcctgacctcaggtgatctgctcgtcttggcctcccaaagtgcttgggattacaggcgtgggccactgcacccagccctctactttgttttttgtgcctttctcttccatagtgtccataatgatcatgcattaattactttcatagcttaaaaaaaagttgaatgggaaaaatgggtcactgtgtatttgagaacagtactggatgcttcgtgtttggatgtgtgggtggatctgcttctttcttccatatgctctgctgtgtgctccctggctgccctgctttaattttattttgttttacaccctgcatatcttgatgtctgcttttttcctcaggtctggagcccggcactgtggtcataacagagcaggcagtggatacctgcttcaaggcagagtttgagcagattgtcctggggaagcgggtcatccggaaaacggaccttaacaagaagctggtgcaggagctgttgctgtgttctgcagagctgagcgagttcaccacagtggtggggaacaccatgtgcaccttggacttctatgaaggtgaggcagcggatacgaggaggcatctttcagccagggaaccctggtccgtcccctgagcctgccttctcgctgtggactggcgtttccacttgccaggctgctgtctcagttacacttcgcccagagtggttataatgacccgtttgagtggtcattataggcaggacctggatgggtcttgcttgtccctgtgtccttctgggcatcagtggcgctgatgtgttgtaggagcttctcacatgcatgtggttctcatgtctccatgtgtgcctcagggcaaggccgtctggatggggctctctgctcctacacggagaaggacaagcaggcgtatctggaggcagcctatgcagccggcgtccgcaatatcgagatggagtcctcggtgtttgccgccatgtgcagcgcctgcggcctccaaggtaagcggcacttgatgggcctcggcgtcccctcctcccttcacttctgctctcctggagcccctcgctggggcccc

SEQ ID NO: 125410 - DNA, 1056 bp, Homo sapiens
tgtggatttattctccagaagagtttaagatagaggaaaattcagatcaaaacaacaacaacaacaacaacaaaaacaaaaaaaacccaaaaacacaaaaaatagaagatgtagttgaaacttataaatgacttgaatttccttttagaaaaaaaagttgggaatcagattcttttaaatacaattttgtctgtgcttcttgtgtggccttaggaaggttacacattgatctcttcaattgacacccagaggtgcagaagccaaaagctcaccagggatgagacgtagtgtttacctctctccctgtctctctccctgcctcctttctgtactcactatctctgtctctctccttatctctctttgttactccctgtgtgtctctctctgtctctctctctgtgtgtccctctgtctctctttttctctgtctctccttatctgtctcagtctctcttccttcctctctttctctttacagtgaaaatctaaattccatataggatgtatatggaaaaagactaaaagagaagacaaaataaagacagtggatggtttattgacgtgaaatactgatatgtttttctttttctaatttgctttttattgccatgtgctaacattataaagtgaggaaggcttagcagaacaaagagaaatagccaagaatctctcttcctcctcctaattgaaaactctggacaacttccatgtaaacaaaaaagtgttacttccactagttttgttctcttttaaattaataaaagaagagaacaaatattgattatatcaccagtttttttctcaagtattatggcacatataaatctatgtttatacatcattttttgttttaaataatttttaaaacaaaaatttatgagcaactgttaagctggcagatggcgcttgggtgcttctctaaaagctgttttcattttttcttaggcttataaaataatacgaaaatgtaatttattttcaagacaaatttaaaaaaaggaaaggaaaattttaattaattggaaattgagtatacctaatatttgtctcttt

SEQ ID NO: 125411 - DNA, 1029 bp, Homo sapiens
tgaagatagtttcaagccctgatttctgtcatctatgaaaacagtaagcaagttgcttgtattctcctcctagctggataagagacccccgttttcatggacagcctccttgggtggacagaagtctcctgatcttgtctatgtaaccagcacccactttgcatttttccgcaaagaaaagaggagcttaaccccatttacgggaaatccacgcactgcttgaatcttacgcgccccgtggtgacggtgttgcccactctgttcccttcccaccaaatcctgccagcacctggcagtcatccagtccttgtcttagacttcaccaacctttcccgtcataacatggcttagaagttgtccgaatagtgctagaagctttcagccctggaatgctcagcatctgccatctaacttccatttaaaacgttttgagcatttgctgatacaggttcctctgtcctttccccattattttcagttccttggccttgcccatagtgatctgtggatattgtctgcatactcttttttagaaacctagagcatcgcagtgtccttaattttcctcttcaaactctatatattcctgagctgatcatccctactgctgttcctacagaactgtgtgactaatcttctatatatgtccctacatctagccatctaggtggagatctaggtacctatctccctaaaattgtacttggtatccacattgacctcaggacagtatgtgataggctcttgtgccttttcgactaggagtttgaaaacatccactcttcatatttattgtcacatttgttgaataataaaattgggctcttgtccattatgtctcagtcagtgaaagagcccagggtgggcctgagccagagtgtttgtgtccctagttctcttttggttctgttacagctctcagtgacagtgtcattgaggctaacaaggacagagtactgctttcagccaccatttgtccaatgagtggctgatctccaggcctctggctttgagaacatctgtgatatc

SEQ ID NO: 125412 - DNA, 1068 bp, Homo sapiens
aattgagggactgagccagaccttcggagagtaatgccaccagatcccctaggaaagaggaggcaaatggcactgcaggtgagaaccccgcccatccgtgctatgacatggaggcactgaagcccgaggaaggtgtgtggagattctaatcccaacaagcaagggtctccttcaagattaatgctatcaatcattaaggtcattactctcaaccacctaggcaatgaagaatataccatttcaaatatttacagtacttgtcttcaccaacactgtcccaaggtgaaatgaagcaacagagaggaaattgtacataagtacctcagcatttaatccaaacaggggttcttagtctcagcactatgacattttgggctgactacttatttgttaggcgggagctctcctgtgcattgtaggataattagcagtatccctggtggctacccaatagacgccagtagcaccccgaattgacaacccaaactctccagacatcaccaactgtcccctgcgaggagaaatcactcctgggggagaaccactgacccaaatgaattctaaaccaatcaaatgtctgggaagccctccaagaaaaaaaatagaaaagcacttgaagaatattcccaatattcccggtcagcagtatcaaggctgacttgtgttcatgtggagtcattataaattctataaatcaattattccccttcggtcttaaaaatatatttcctcataaacatttgagttttgttgaaaagatggagtttacaaagataccattcttgagtcatggatttctctgctcacagaagggtgtggcatttggaaacgggaataaacaaaattgctgcaccaatgcactgagtgaaggaagagagacagaggatcaagggctttagacagcactccttcaatatgcaatcacagagaaagatgcgccttatccaagttaatatctctaaggtgagagccttcttagagtcagtttgttgcaaatttcacctactctgttcttttccatccatccccctgagtcagttggttgaagggagttattttttcaagtgg

SEQ ID NO: 125413 - DNA, 3968 bp, Homo sapiens
gattcttccaatggttcctctcactttgcagataagaaaactgaagaaccagctgggcgcggtagctcacgcctgtaatcccagcactttgggaggctgaggcgggtggattacctgaggtcaggagttcaagaccagcctgactaacatggcgaaaccccatctctactaaaaatataaaaattatccaggggtggtggcaggtgcctgtaatcccagctacttgggaagctggggcaggagaagcacttgaacccgcgaggtggaggttgcagtgagctgagagcgccactgccctccagcagcctgggtgacagagcgagacactgtctcaaaaaaaaataataataaaataaaaataaaccatcagtgatagtaaaaagctcacttaagctcattcacctagttttatagatcagacttaaacctcttgtttattttgttttgctttatgtatctatagttccattgtttttaaaatttaaaattaattttaaaccttatgaatgctttccctacagataaaattatgtaactagaacaatttaactcatataaattattatttaatcaagtccttaattttgaagacttcatattgatatgtcttgaatacttgaaatctatagttaactagatatttctcttataacctgtccttataaatctacattataaataaaaagtccagtgtcccttccttcagattagcagaagtttcaaaattacatttaaagtattttctttgttttccttcatactgattttcatttttattgtttgttatagaacctctaaaatgcagacctccagctctagatctgtgcacctgagtgaatggcagaagaattacttcgcaattacatctggcatatgtaccggaccgaaggcagatgcataccgtgcacagatattacgcattcagtatgcatgggcaaactctgagatttcccaggtctgtgctaccaaactgttcaaaaaatatgcagagaaatattctgcaattattgattctgacaatgttgaatctgggttgaataattatgcagaaaacattttaactttggcaggatctcaacaaacagatagtgacaagtggcagtctggattgtcaataaataatgttttcaaaatgagtagtgtacagaagatgatgcaagctggcaaaaaattcaaagactctctgttggaacctgctcttgcatcagtggtaatccataaggaggccactgtctttgatcttcctaaatttagtgtttgtggtagttctcaagagagtgactcattacctaactcagctcatgatcgagaccggacccaagacttcccggagagcaatcgtttgaaactccttcagaatgcccagccacctatggtgactaacactgctaggacttgtcctacattctcagcacctgtaggtgagtcagctactgcaaaattccatgtcacaccattgtttggaaatgtcaaaaaggaaaatcacagctctgcaaaagaaaacataggacttaatgtgttcttatctaaccagtcttgttttcctgctgcctgtgaaaatccacagaggaagtctttttatggttctggcaccattgatgcactttccaatccaatactgaataaggcttgtagtaaaacagaagataatggcccaaaggaggatagcagcctgcctacatttaaaactgcaaaagaacaattatgggtagatcagcaaaaaaagtaccaccaacctcagcgtgcatcagggtcttcatatggtggtgtaaaaaagtctctaggagctagtagatcccgagggatacttggaaagtttgttcctcctatacccaagcaagatgggggagagcagaatggaggaatgcaatgtaagccttatggggcaggacctacagaaccagcacatccagttgatgagcgtctgaagaacttggagccaaagatgattgaacttattatgaatgagattatggatcatggacctccagtaaattgggaagatattgcaggagtagaatttgctaaagccaccataaaggaaatagttgtgtggcccatgttgaggccagacatctttactggtttaaggggaccccctaaaggaattttgctctttggtcctcctgggactggtaaaactctaattggcaagtgcattgctagtcagtctggggcaacattctttagcatctctgcttcatccttaacttctaaatgggtaggtgagggggagaaaatggtccgtgcattgtttgctgttgcaaggtgtcagcaaccagctgtgatatttattgacgaaattgattccttgttatctcaacggggagatggtgagcatgaatcttctagaaggataaaaacagaatttttagttcaattagatggagcaacaacatcttctgaagatcgtatcctagtggtgggagcaacaaatcggccacaagaaattgatgaggctgcccggagaagattggtgaaaaggctttatattcccctcccagaagcttcagccaggaaacagatagtaattaatctaatgtccaaagagcagtgttgcctcagtgaagaagaaattgaacagattgtacagcagtctgatgcgttttcaggagcagacatgacacagctttgcagggaggcttctcttggtcctattcgcagtttacaaactgctgacattgctaccataacaccggatcaagttcgacccatagcttacattgattttgaaaatgcttttagaactgtgcgacctagtgtttctccaaaagatttagagctttatgaaaactggaacaaaacttttggttgtggaaagtaagtgggatacttggaatcaaggcatctctgtagtacagtcttctttattttttagcatagaaagttggggatgtgttaattgtatttttaagaatatattctaagttctgtacttcaaataatagcacagattttacatctgattgacatagtgtatgttaatgtaagttttgctttccagtgattacctgatacgtaagcctatttgaacaaagtgagaatgaacttttgtttctaagaagtctttatcttgaagctatataacatgaaaagtgagctcaaattttttttagttgaagattacatataaagttgtgtctgattaatattcatcttttattgaagaaagtgccttctgatggccacataattcttaatgtcagctagtataatggtttacatttggacaaagtattgcttagtgttatttaagtagatttaagatctcaaagctaaagtgccaatttttactttcttcagccaatttgttacctcttttatggtttttaatttttatcaggactaacattttcagaaatagcaaggtgtgatctagtattagattcacagaactgaaaggttaattaagaatgttggttattttcacgggagcgtgtgatatttaacattaatattttatttgacactacagcctgtaatactgctctctttcaaaaacaagttttcagatttttataacagacccattttgttttatgaaacatgttcattacagaaacatgagaaaatagagataagtaaaaagaataaaagtcactattatcctaccactttgcgggacacactattaatatttaagcatagattcttccagatgttttgttttatacagcagtaggattgtgtaatgtattctctcttgtagcctattcttcaaagcgtatcttcactttccatgttaacataaatgtccttttatgattgtctaggattccatggatggatggaatataattgagtcatctggtagagcgcatataggacaggacgctaggttgtttatcttttgtttattgtaaaggaactatgtgggatgcatttggtgatctttttaaaaaatgtataaatttcttgagtaattcctggattaaagaatatgcactttttaaagcttttggcttgca

SEQ ID NO: 125414 - DNA, 1893 bp, Homo sapiens
gagccaggtgagaccaaatgctctgtttggtttataaggttttttttttttttttttttttttctttttggagacagagtctcccactctgttgcccaggctggagtgcagtggtgtaatctcggctcactgcaacctctgcctcccgggttcaagtgattctcctgcttcagccttttgagtagctgggattacaggtgtgcgccaccacgcccagctaatttttgtatttttagagatggggtttcaccatgttggtcaggctggtctcgaacttctgacctcgtgatccacccgcctcagcctctcaaagtgctgggattacaggcgtgagccactgcgcccggctgaggtagcttttaattcacaatcatttcaagcctttccaggaggcttccttgttcaaattaaagacagcactcaggagaaggagcaggctggggtcagtgtcattgtcaaggggctgccagtcagagtgtggcactgccactccacctactatgtccttttgcctcacctgactcttggagctctgaggcgaggaggagctgcagccgtgggaaagcctgcaggtagcagagcaggagaggagacttgagcccttggaagagcacaaagtgatgagacctgggaggtgcacagaggaccgagagggcaagacacgctctggatgtttgtgggaggagcctcagtccatccatgtccaggatgtgtccagtcaaccaaccttagtgttggcatcgtgcttattagactcatctgctgtcaagcagttgttttcattcttgtttttgttgacagttttcttctaggacttttatattctatttttttaacagttctattgagatataattcactttgttcatttaaagttaacatttgggctgggcgtggtggctcacgcctgtaatcccagcattttgggaggccgaggaggccagatcacttgaggtcaggagttcgagaacagcctgaccaacatggtgaaacctcgtctctactacaaatacaaaaattagtcaggagtggtggcacatgcttgtaatcccagctactcgggaggctgaggcaggagaaccacattgaacctgggaggcggaggttgcagtgagctgagattgtgctactgcgctccagcctgggcgacagagcaagactctgtctcaaaaaaaaaggctacgtttgagtatttttagtatatctacagaattgtgcagccatcaccacaatctaattctagaacattttcatccccctaaaagaaaccccacacccagtcatgccactttccccatcctcagggctactaatctgttttctgtctctgtaggtttgtctattctggacatttgtataaatgaaaacatacaacatattgccttttatgactgttttcttcacttagcataatgtcgtcaaggttatggcttttattttatttgcataatttgtagatgccaccaaacccatctgtgtactggtttctgtccattcttctctcatgccatatagtgagtcctctcatgaaggaagtccaaggcatttttcagctgacaaatgtttccttttgtaaaactttgcttgtgcctccagtctgcaaatccagtttctggaggaagcgcgttagtcaaacactgtggctcacttttctgcctccatatctgccatcttggcctcactctctcctggtctaatcctctctaatctgaatttcaggtcctctcatgctgaatgcttcagtgtgtcatgtggctctttactaaagcagaagtgatgttgctatggcatcacggtccctctccctccatcctcattatggccagaacttgcttggtctccatctgtgtgcactcagcctactttgttcattgtaattgtcccacctctgct

SEQ ID NO: 125415 - DNA, 1007 bp, Homo sapiens
taatttaaaatataatatggatacattttatgtcacattagattatgtaaatttgaaaatgcttttcatttgggaatataaacttttaattttaaaattcttgttccattttatgagagtataatctagatatagcaaaacatacaaatcaactctaaatacatatacccacccccatgtacttaccacccagatcaagagtagaacaattccagcactccagaagactcccctacccactacaagttactactcccctgggcaaccctacctggcccctaccactgtggattagttgtgccataaacttttattatcatgtatggggtcttctttataattaaacatttataaagaaaatgttttctttttcttactcttgttctttggcagtttgcagattcattcaactttaatccccacaaatggctattggtgaattttgactgttctgccatgtggtaagtttccctgctcacagatgtcagttgcctgtccgaggtgacagtgaaagaagctggcagggaagatgccagagccaaaggggtgcaatagtcacttagctcactgcttgctgccttttctgaacccttgatggaattattgctaattcttagcctcactggaaacttttatctagggaatatcattgcaacatactggcataagaaatgagaagcctaaaaaggacaattttttatttgatttatccagcattgacagaaaacaaatgcaagtacacacttctaattcagtagcttgtgttttcattcttagattcgtaaccagtcttagtgtaatgctaagtttaagcaatctgagtccaaatgcttaaaagtatttgctaaggccgggcacagtggctcacacctgtaatcccagccctttgggaggccgaggcgggtggatcacctgaggtccggagttcaagaccagcctggccaacatggtaaaaccccgtgtctactaaaaatacaaaaaattagctgggtgtggtagtgcatgcc

SEQ ID NO: 125416 - DNA, 1033 bp, Homo sapiens
ctattccactggggttgcaggacaaatggcactgggatgacttggacttgatgcattaaaaaaaaaaaaaaaaaacaacttcctagcatggaatatgaactatattgaacccagtactctcccttaatcatttttctcatgtcaagtagatgatagtctcattaggaaagcattgttaactttgggaaaaaggggcttccttttcagatattgtctttcacaaggctctgagaattggtgaaggcccattcagtggatgaggacagtgaggcacacactggagaacacctttgtgcagagcacatggccagtgtggccacgcgaaactagcaagcaagtctctccacttccagtcctgagaatgagcaacaagactgataattttatgtatttgtttctattgatgttgtgacaaattttgtggctcaaaataagacaaactgattatcttacagttctgtacatcagaagtctgacctgggtcttactgggctaaaaccaaagttgacaccttggaggctccaggggtgaatctgcttccttgcctcttctgacttctagaggcttccaaaattccttggctcacagccccatttccattttcaaagccagctgtgtcccatctttctgacctttcttttgtaaaccccaaatatctgagatgggtctcagtcaacttagtttattttgccaaagttaaggatgcgtgcctgtgatacagcctcaagagatcctgactacatgtgcccaaggtggttgggcacagcttggttgtatacattttagggggacatgagatgtaagatgtacattggtttggtctggaaaggtgggacaattcaaagcagggagggggctttcaggtcataggtagataagagacaattggttgcattcttttgagtttctgattagcctttccaaaggaggccatcagatgtgcagctatctcagtgggcagaggggtgactttgagttctgtctgtccttcatccaaaaggaaattccttatgagggaggcatgtagcttttt

SEQ ID NO: 125417 - DNA, 1049 bp, Homo sapiens
cacgattccttcctcttcactggctcgaggtaaacccttttcaaggaaaaacaactctaggatttcttttttctgtgtacgtagaccagtcccatcagtgtataatctctctctcacacgcctctctccaatagacagcttgtatttgcagtatttcatatttataaatatgcgtttatttaaaaggagaacaaaagcttgactctgattcacagttttgtatgtagctggtttgacgtagtcttttgtattttccctgccgaagtgaattgttggagaatgtaaaccgcctccacgtggcggcagacttcctaaggccccagctcgctggcctcgcgctgggcggctgggaattccacctgagaacaagtcccgcaaaccggggacggaaggacatttgacttttatttttgtatttaattgacatgaatgtaaaggggacagctcagggttgttttggagcctgttgactttgtatctctgcctgtgattttcttttctaaatgaaactccatgtagcaaccaggacgaagttgagaaggaaaacgccaaatgctttggttattagagtttaataggtaagctctgttacactaggtgttagagttccagaatgttcttttgtttgctaaaccttgaagaaacatgtgcctcagcctagatgttttgtcttctcttttctgcacttaatacctgacagtatgaccgatctctgcgcctttctgggggcgggcaagctggcggtagatttgtgatgtcacagtgcaaactgcagtgactgtaaattggcctggcgtgtataaacgttttcagggaatgcagaaggtattaatgaagagacaaaacctttattccatgtgctttgcttcattctgtacatagctctttggctcgtgaacctaattgtaaactttcaggtatttttgtacaaataagggactgatgttctgtttcttgtaattagaaataaacattaatacagtgttcttcattttctattgctggtgatatctgtttctaattttaaaacactggccaatcatgaggtc

SEQ ID NO: 125418 - DNA, 1549 bp, Homo sapiens
aaggagtcctgccttgcaaactcaagcaccactgcatccgagtggccttatgaccgcagatgtcctctcggctgaagactggaggaagtgaacactggagtgaagaagcggtctgtgcgttggtgaagaacacacatcgattctgcacctggggacccagagcgagatgggtttgttcggtgccagccgaccaagattgactagtttgttggacttaaacgacgatttgctgctgtgaacccagcagggtcgcctccctctgcatcggccaaattggggagggcatggaagatccagcggaaagttgaaaataaactggaatgatcatcttggcttgggccgcttaggaacaagaaccggagagaagtgattggaaatgaactcttgccctggaataatcttgacaattaaaactgatatgtttactttttttgtattgatcacttttttgcactccttctttgttttcaatattgtattcagcctattgtaggagggggatgtggcgtttcaactcatataatacagaaagagttttgaatgggcagatttcaaactgaatatgggtccccaaatgttcccagagggtcctccacaccctctgccgactaccacggtgtggattcagctcccaaatgacaaacccagcccttcccagtatacttgaaaagctttcttgttaaaataaaaggtgtcactgtggtaggcatttggcatattttgtggactcagtcaagcaaccacagtctgttaatcatttctctatgctcagatgtcagatcctcttgttattagtgtgtcttgttctgcacagtgcaggagactttattcctttggaaaattcactgttccacaaacagcaggctgaatggcctcgcctctagattgacgtgggccagcctccttgagacacacctggcacccgtcatcggccagcggtggatgctgcataatccacctgggtacttcagccttgcgtttccacagccttcagcctgttctagaacgatcactgccttacccctgctgctgcagtggtgtgagtcgtttcacggctgatgtccctcgggggattaaaggatctaaagagaaaatggcacctggttgtcttcgtgctgtgtctcatgggtttccatagtgataaagacaaggaaacgctgcaggggccacaggcacaggctgatatttaaagatctttgcttgcagccctccgtcctgctgaaaacccccataagccagtgaacacagagcagctagaggctcctcctctgctggcttagggtcagaagtacctcacagtggttgtggacatggaagagttttgtcaacacaacactttgtccccgctccgggagatgagtcagatggtggcttgagttgtcacttggtcccctccgcccctcgggtggccccctttgccacgtccccttagcttagtgatcaggtgtgagagtggccatttccttacctttgatccctgtaaagcagaaaggactcctttgacaggcgacaaactactgtggtgagcagaatgatttcctttttcaag

SEQ ID NO: 125419 - DNA, 1036 bp, Homo sapiens
agacttggcaccaccaccaagtgtggagcagttcccatttgtccctgtctgggagggaatgctgctagcaacatgtgaaccaatacgtggccctcatgtctccccatgatagaaaaagagagaaaccaagaacatgcaacaaaaactgttacgtttgctttccaaaaagaggttcattcattgaaaatggattttccagaaggaaaacaaatcaatgacttctgttgaaatgtttattcagagaaaaatgtctttctgtagttacaggaaaaaacaaaaacaaaaacccaaaaccaaaaccaacaatctaataacctgttgatggttgatttacagaactaaaaatttttatcaggcaaaataaggagaaataaaaatgggaggtgatagctacctaaatgaggaggatatgtctgtttccaaagcgaagggcattttgtctccaaagaaccctgaggagagccaaagaggatgcctggggcagccaccagccccaaagggggtggccaaacccacgcaggcgcccatccttgtggacaatactttcctgtctccctgcgcctcccctggaaagatcatgggaaagttgcacatggcagtgtaaacacacagggggacgtgtccctggtggtcagatccaggtggacaggtgagggcttggtgccctggcaaaggggggcccaggaactcgggataaccggtgggctgtgaaactgactgtgtatcctgacagaagtgtgcttttctgaggctggtgactccagagggcgcctaccatccccagaggtgggtcccaagacaaacaaaacatcaactcccttttcgtcactcacagcaggtcagtgaacacaacgtggcaggtgacccctttctcagagatccagagctgtgcagcctccggatgcagctgagtgcccctggcacaaatgctccaggcaccagtgttccagttggccatcgactgcacatctgttcaaagatcttccctccagttttaattttctccatgatttaaagatatgtattttcaaatgac

SEQ ID NO: 125420 - DNA, 1025 bp, Homo sapiens
tctcgaactccccaagctatcctcccatgtcgaccactggaagtgcttggtttacatgtgtgagctgcagtgcctggcctagaagaatgatgaaaagtacttcttgaggaagacggaatgtggatactagggaaacagggcacatatgggaaaataatatgtgatgaataatcaattgtgtatttaaaaatattaggtgcgtctaaagtattgactgtaattactaaaagaatgtgcatataatctatagttcccaacctagcagaaaaagatataagggaatatatatgaaaaacacaacaacaatcaaacaacatcaagtagaaaacggaagaaaaaacaagatgtgaagagaaaaaagatattaaacaaaatacaaaataagatagtaggagtaattccaagtcaattcgtgatagtgttaacaaactcaagttaatagacacacatagctccctctacccaacagacagagactcttgattcttttctaaaacctgtgtaactttttgaaaagttgacggtatatagaaagttgcactgaattttaagcaatctatttcatgcttgttctttgacccagtgtgaataaatcagacgtcaacataaaaagttgaaaacaaatcacataaacatgcatgaggaaactttaaaacacacccactcttattttacttatgagttagagaggaaattgcaatggaaatatcgatcatttagaactgaatgaaagtgaacatagtacaggtggaaagtcatacaatgctgcaaaggtggtaaggctaactttctaagcttcaaaaaaagaaaaattgaaattacagaaatgaaatagaataaggaatgtagaaggaattaattataaaaattaaagtcagaaattgttgaaacagagtaccaataggaacaaaatcaaacaccagtctttggtaaaaacgaccataacagcaaacctgtagcacagacactcaggagggcaaaaggtgcccaagaaaatcatggtaagagcacgttagcaagtttta

SEQ ID NO: 125421 - DNA, 1036 bp, Homo sapiens
ttcttaccatttgggagaaaagtttttttgtactctgaccagggcttgcccagatattttcatgttggcctcagcagcctgtgtgaatacaattgtaagtaaagagcatcccccttgttccttgatacgagacacctggcttgctgacttttctttttcccccatctcaggcttttggtggaagcagctcttgtttttgtttaaggatcagtttgactgaaatctctgcttaaaaacctcttgcttcctttcctcttgcatagacctaaagtgtaatatcaaaacaggcagtgtcactttgggtgagaaaaatggctctggctcatttattatgaaggttatttccatttgagggactagttttgtacaccttgcaactggcagaataggagtgctgatactgcagcttttaccaagttcactaatgttttaggattttttttttcagcctttttcagccttgtggagtttctgcatgttttaggaattctctgagtgacagattttgtagttacccatagctcggttgttaaggacatgttctctgattcagccccaatgggtctcacacccacgcttacgagatgtgattcgctgggcaagctgctgtcctcctttttcctcatctgtaaagatgaggtagcaacagtacccattagagacaggatttaagtgggaatgtgtgtaaactgtctagcaccgtacctggtacccaggaactataatattagtagaaaccctgccatttttacattaatatttaataaaagtataattacatggctgagggagggtagttgtgaaatctgtaactacactgtatctgacggcttgtgtgtgttcagagttctagagcaggcatatgtgcagttggtagagagggtatcaggcattggaagggaactgatgagctgggtgatgcctccgctttcaaaatgcaggtgacacaggtagtcactcttcactcggctgcaatagcttaatagacttgcggtttgaaacattttacttctttaagtgcatcctgtgtgaaatg

SEQ ID NO: 125422 - DNA, 1048 bp, Homo sapiens
tctgatttgggtttttttttttgtaaaaattaaaatttcagtaatgttcaaaatttatttctttactggtgtgcataaaaattactgtgtgattaaaaatcattgtatttcattgtttaaaattttgtatgtttttttgactatacatttaagagatttgtcttttattatatttcttggatttcaattttgtcatgctttgctttccgatttttgactgtatatttccctctttctggttcaagatggatgggttggtgttcatttattttgtctttataaaatatgcatttcatggcatgagtttttcttcttttatttctcttgcttcattttatttgtcttgacacatgggggtgtgcattgtcctaattgtctaggactgtattgtatctttatttcctccttgaaccacttatttaggccagagcttgtttttaattttcaagtgccttcgttttttttttttttttttttttttaaacacatgttcctaatttctggttttctttatttggatgtagcatggagccccttggcacattggcctacggtccctgtctcagtgctggacatttggggtcctgtctgcagctgcatgcaggctgggaggaggcagcatgtaacaggtttttccttggggccgtgttctgcaactccagagatctttgcatttttgtaaaatgcactactcttctttgtggtttagtatttttaaaaaataataattttgcaaatgtttataaatatttgcaaatgcctgtttttcataaatatcaattaatgccttctcattactcattccaattttatttctttgtcctacataatagaccaacatctgcaacaactagttttcctcgttttctccttgagactctcatagtgtttgtttttaatgtaaactttttattgaagtgtaaactttttattaaacttgcttctaattttagctctttgtattttgatactttgctgtttggaggataatactgtttttattcattatcaattatgcttttatcaatgctttttagtatttggatta

SEQ ID NO: 125423 - DNA, 1013 bp, Homo sapiens
atagatgcagagaccttgaggagcataagtgaggtacaaaggtgaaattctcagcccgttgctgtccatgcattgctgtcccacccatgtccttagcaggggctctctgggtctcctgaggacagggtcggtggcttctgcccaagccccacccttacacacagaccccctgcttcctcccctggcatctgggtaccccacactgcagactgtgtggtgggccagccctgatggagagacccgcccaggaaagcaaagggctagcaaggcacgcggtgagttggtggcaagactgtggcttcagttggtgcctctccactcaacttggaaaacaccgagctatgtgtgtttccccagacacaccatgtggactcttccatgctttgcactagaactcctattcatcctccaaagcccagccacgtcccatgggagaccaggcatcctcatgccgctgccctgtggaaggtggcacctcaggttgctgtggcacctcaggttgctgtggccactgcacactagaatccacgggcttctgtgacttggcactctggggccaggtctcactcacgtggggcctttaggcctaggaacacagtgctagcactatatgtgttttatgaagggaactgagcaggctgcaacatgacctgaggcagattctgatggagcagagggcagacggttccagaccatggggcctggcacgatgtgagtggaggggaaggcggatgtgcggcaccagaacagggaagggtcagacagaagatggccttgggctgtcagaactcagcagaaggaccaaagtgccagggaccaactgccagggttccaggaggctgagaagggttcaaagaggatgtacaagaagggctccaagtcgagcatccccaccccagtcctgtcccagagcctctgatgggctcaggaagtcaaggctccttcctcccatctgacagcgtcattactaaggaaggcggggactgatttttctattttcctgcactacgccc

SEQ ID NO: 125424 - DNA, 2061 bp, Homo sapiens
agggcccacctcccagttcccttgacctcgggcctctgcatcctgctagtcgtccttccctggcagcttttacgaggaagctggagcgtgagaaggtctgtgaggacagccctgatcacagcctcctttctgcaggtcaaaggaactgggaagggggttccaggagtactattgcaagagtggctgtgcacagagctctctagcaccagaagatctgcatcctgggcttattgacataccaaataactgtgaatctctcttccctgcaggtgcccttgctcgtgtgaatgaacagaggccagagaattgcagaaacccacctgtaatatgcccacaggcgtcactcaaggagtctgcatagccaggaacatcaagttttggtgttactttcttgtctacaggccaaatgcgcacagttgattttcggtgtgttcctgtataacggcttgaaaggaaaggagaagatgctgtgtcgctgcgcagctcgtgtgccaaggaaatgtgttttgcctctgaatatcttaagttgctaataaacgattcttgttggcaggttaatgggactataaatgctggagcccagcactcacacttaattatatttatgggcaaagtaaaaagaatcatgccttagactgattttggacctttgagacttttaccacatacagatggatgaaactacttactgatttaagatcttttgaattttagaaaaaacatatgaatcagatggaacaatctgaatgtgatatgctccatgatgctgtgtgttttggtagtaagaaaaaaaaattgggaggcttttcaaaggtggctttgttaggtagtaaaactgctggattcttcttcctcaaatatttggggctaacacttcacagagggtcacagtccatgatctgaccaactaagcttttaaaaatcaactattaccacccagaaaacagtcctacgtgatcatgtggccagggcatgcccgagtcctgcaagggtggcgggtggctgaggtcacaccaccactggagtggatgggcagtgccccacatggacagccattccccaggctatgaagtgacataggcctcccccacggtgcctgtgtacggagcctgatgacttcactgggagccttctggaatcctgcagagggtcaaggagcagggatgttggatgcccacctgtcaagagttcagatcaaagttgcgctgagagcatcacaattttggttcagccttgacgcgtttgtccaacagctcattggctccctttgtatgatatcgtggtcttctcacatggtgcccagtcaccaatatttataatgaggtctaactacagcagtagtttttcatatatatctctaaaacattttgttatattgaaaaaagtaatagaaatcaagatgtgttgatgaaataaaatgtgtatctgagtgagaaaacaagtatggtgaggtcactttaatgtttcacagcgatctcagatctaggcctcaggtagaatggaagctgttctgcattcactgattaacgttgctaaactcttggtgaggcacgagctaccagccaattgctcttcatcacagctatctgtcttttagtgccacaaataaaagaaaatcaaatcttagctgttgtgtgaatttcatactacagttggtttggatacccctcttccaaaatgggaaggacggattcagttattcaaccaacacacgtttctggctccctcctgcactcctccattccctgggttacatgcagctgacaaacaggcaaaaatccccacacttgtgaaattcatgttatgttactatggaggagacagaccatagatgtgatataagttagcaaaatgttgagtacatttaggcgctgataagtgtaaagaagaaaaaccatcgggaaagtgggacaaaggagacggggatgaagaaaggcccagtgagaaggtgaccgttgagtaaaaccctgaaggaagtgagggagcaaactccggatggacgcatgactggcagcgagaagagtgagtgcaaaggccctgggggcaggacgctgcctgggt

SEQ ID NO: 125425 - DNA, 1099 bp, Homo sapiens
cataacaagacccccatctctacaatacagaaatgagccaggtgtggtggcacgggcctgtagtcccagctccttgggaggtgaaggtaggaggattgtttgagctcaggagttcaaggctgtagtgagctatgatcataccactgagcttgcatcagcctgggtgacaaagcaagatcctttctctttaaaaaataataaaagaaatttttttaaaaaagtaaaatgttaaaagctatgttaaccttgaggaaaatacaataaattcaggggctcccagtgcgtgcagtgttggttgtttctccataggttctcagtagatgtagagtttcctgggtcttcttttgggtgttcagcaacggctccagaacagcattgctgggagcacatcctgcaatggaggggtgtccttggctttcccagcaaggcagtgcatgaatctgtaggtgctcctcctccccttagcagtgcagcctcctcctttcaatgagggtgcccagctatgctgggaaggttttctgggacagtcgcaggcaaattgggtgattggtcacccaacctgtaatacacaaatttcacattggcagtaagctgcccatgatcaaatacaaaagggtaaatttgatgtaggaggaataattaccttaacagtgacgttgccatttttcaaggcaattgaaattacatttgccttcacggtgtgaatccaatgatgtctctgcctctgtatttgtggctgccagagaaacttccagctgtgtttctcctccagctccaaataagagcatttgcagctcggctgcatgtgcacccacttcctcagtggaacacccactcctcctgaaggcagtgttcagatctgcccccaccccacactcagtgcttgcttccactcagccctgcgttcttattaaaggcaaagctgtatgcgtctgactgtctttgtcgatctgttttaaatgcattatttcagaaggcctggaatgtacaagtaccctcctaatccatgtgtatatttaaaacattcatgtctagtgcttcattctacaagcatttccggagaacctactagggtccgggcactgtcggagctgcttgt

SEQ ID NO: 125426 - DNA, 1090 bp, Homo sapiens
tgtcactctactgatcccagggtacatttctgagattctaaagctgtttctcaatgtaggtccataggacatctgtatcttgaatcacatttttcagcctatgaatctgcaattttccattgctatccaagtgactttacattaaggttggagacgattgtctatctcatttgagcctttcatgcattttgaattgcaccgactgggatcctgtgaaggccatgaccacactctgtactcactgctttataaaagtcatctcagtgactggtttctgtatctttttcttttaccctctccatcttgtgcagagtcatgaagggcctggggcccagagatgctgaaagctggcccgaggtccacaaccagcaagcggaggagataataacattgggacttttggcttctgagaatgcgttcctctgccttacagaaaggaaaaaaaaaataagttttgactagcccgaaagaacagaggaagttgtgctgtgagaaagaaagtggggagaaatgcacaggccacggagagagagaggccgggcctggatgaagccgtgggcgttggtgccgtgcgaggcccaggcatgcttggaggaaaggtcaccgtggctgtaaagtgctagccagggcgggagccgggcttgtgtttctcgcacagtctcagccatctgtcagctgcttcaaagggcattcaaaagtccaggttttgattgtttcttggattagtctgagtcgtgtggcctgccttatccaccctggaaagttctaggcaattaatatttatgtggcatttctgaggttttgatgccccgagccgtttacaagatgctcccgggctgaaagctgggccctgagttccttggctgagtcctacgttggaaaccacgttcccctcagtctcattatcactaccatgcccggtgatcccagagccttcctacacttgacgctttatcacagaaccacaacaaatctgaagaaagcctgccctaggagggcaggaattgggtgatcgacctgccctcctggcctctgttcagcattcatcagggagactcaggtgcagggggccaaggtggcctcacctgga

SEQ ID NO: 125427 - DNA, 1479 bp, Homo sapiens
gccaacagagcatgggggcagatgtctcggccgtggagtggacaaacttcctgggcttattgcaaaagaactgtctcaggtccaggggtaagataatcagctgtgtgctgctctctcagaacctttggggacagtgtcactgccttagtctgtttgggctgctataccagaatctgacagactgggtggcttgtaaatgacagaattttattgctcacagttctggatgctcaaagtctaagatcaaggcaccagcagattcagtatcttgtgagggcccacattctggttcatagacagtgccttctctctgcatcctcatatagtagcagaggtgagagagctccctggagccttttttgtataagagcactaatcccattcatgagggctccacctcatgacctagtcacccccaatcctcatctcctcatgccactaccttgggcgttgggatttcacagctgaattttgggagacattcactctatagcagtcatttaatcatctcattgccaggtggcatcctctgcttctgaggagctccagagcttccgagatgccgcactctctgctcagggctcggaaagtcctctgctagaagaccttggtcttctgtccccaccagccattcccccaccaccccctccaccctcccaggctctctctgcaccaaggacggcctccaggttcagcacgggcaccctcagcaacaccgcagacgcaaggcaagccttgatggacgccatccgctccggcacaggggctgcgagactgagaaaggtgatggcgactgtgtgtgcgcatttcaatggggccagagggttggaggtgcagcgtagatccagggacacgcttgcctgtgggcaggagctgcgaggcggtcacatgggagtgggttgagagagagccggcgtcactgtgtctctcacatgtgctgaccagagtggcagatgaaggctccagtccacaggtgagaaagtcagcctcctgcatggtaggtgccagctccagtcctcagctccttggtgatgatgacaggtggaatctaaaccccactgtaacccaagctcagttccaccctaacccacagtttctactggtccatggagaggatggaagatcatccatttggggccccacagagcacacatcacaaactcatggccctcagctggcacggaagccgccagtcttattcattcattcattcattcattcattcattcattcattcactcgtacatgcttgcattccagcctaatgttggacagttacggaatctgaagtcccttgggcagagcatgcactttctggatttccccggcttctccattttggtcttgtgctggtctgcacattactgcccacctggcccctgcaatggaattcctagattaaagggctgcttgggccagatggcttctgagacgtgtttcaattctgacatgattcagtaatggattgaccctccgtcc

SEQ ID NO: 125428 - DNA, 1034 bp, Homo sapiens
ccctccacacacatctgacactcaggcctgcagcagggagctggtcaatggctctgtgcgcgccccaggccacggcgagccttcccaccctccaggagggtctggcacagaaagccacattctcctagaaagagaggaaaagcccagtgtgttctctacagatggaaatgaaacagacagtatttggccacccagcatttttgggccgaagaaaaaattcaaacctgttgtccagagaccagtcccaaaagacacatccctgcactctgccctgatggaagccatccactctgcgggagggaaggacagactacgcaaggtgaggatggcggcttccggggcaggccttccacacctgcccacttcagtgcactggtctcagagtctcagaataaagcggaggagagagagagacgggattaggataacagtgaggcttaccacacaggtttcattttaactagaattcccatcatactgcctccagatatttgtactgaactattaaagggacaaaatggatgggtgtgaggctagtccacactgacttcaggcccctggctgccctgtgggaaaggtaacagccagtgatgtccatccacagggccagaggaatggagaggccaggggcaggcccatccatatggttatccttgaacaatggaacagaggagaaaattcaggcagggccacttctttcccatatgcatttgtagcagcagcgaactgtcattcttcagtaacacaggagtaattgtaggacacgccttgcccattgtctaggcacttaacacaccacaagtattatctcatttgcatgctacaccaatgctaataatgagatatttcttccattttgcagatgaaactgaggcacagtgaggccaaggggcctcgtccaaggtcaggcactagttagtgggggccatggattctcttctgggtctgcaagatgtaaacacacacatcggctctggaacactgggatgaatagcaggagtggtctgccattaagaggcagtttgaaactacgt

SEQ ID NO: 125429 - DNA, 1035 bp, Homo sapiens
atccaaccactgcccacaggatgccatgatccctcacggcgacacagatgcaatcccagtaacattcataggggaagtttcagatgatcctgtggattcggggttgttttccaatagaaacaacaatgctgggtctttcgactcggagggtgttgccagcaggagagactccctggcgccacttcaagctgagcacagccagccccatgaaaaggcaagggaggaagtacctgccctgcaccccgcttcccatgacgtcggaaaaggaatccgtgtggccttatctaacatctctaaagatgggaatctaatggaaacggcgcccagggtgacttcttttgcttcgaatcttcacacagacaacctaaatgcaaaagtgaaagacaaagtgtatggctgtgctgacggggagaggactcaagccacagagagagtgaattcccaaccggtgaatgaaaaggacagcaacgataaaaacgctgccttggcaccaacatcatggcaccaacgaggccaaaacccagggaaaagctacagacttaagcacggcctcacaacgtataaaatcattcctccaaagtcagagatgcgatgttacgacagagatgtgtccctctccaccggagccattaagattgacgagctggggaacttggtgagtcctcacgccaccggcatcaggatcatttccctgtcttcgtctgtgcctgaagcagaatctcagcccattgggaaagtcagagagttctggaggtgcaactctgtggaaaaacacctgggccgaccctcagagagctctgccaggggacccccctccacccctgtgcccacgcagacgcagaatccagagagcagactccaagcagaccccaagccaatatcgccccagcagaagtctgcccaccatgagggccggaaccccctaggggaggggagaaaccagccccccaccatgggcatgggtcacgtgagggtgccagcagctcacaccacagaagtcacatttctcaagcctcagagaagaacgtccagcca

SEQ ID NO: 125430 - DNA, 1049 bp, Homo sapiens
gtgcagtgttgaggtgaggtggaccagcctccagccacgtgcacatgcttggcctccagatggcttcactccttcttgccaggtgccaggtgcaggggactgctgtagcgcaaggcacagatgcaagcaaatcctggatcacgtgaaccgtcttttgtgcggtggaattaaaactttgacttcagtctgcagagtgaatgaaagctgtgtgtggtttggttactgtaacactttggggccccacacacacaccatatatcacatgtccaccacatacaagacatatactccacacatgcacacacgctacacgcatcccacacatacctgtgcacacacatgggggacacacacacccatgaacaatctgcgtctccgtagttctgaggacaacagcagtacagtgagtatgtgactgcttgaatttgagtatgagctgttctatcctcagatattcctggaaaggagtacattaaatcaatagtaagagaaatgagtgctcctttctctttggtcttccctagaactgaaaaagctgtcacagcctcaaatgatgaagaagacctattaattgctggagagttccgtaaaacccttgcagaacttgatgaagacctggaaggtaagaaccacctgatccgctactctgatattatgctgcatgaaagtaggtgccaacagtaacttcctctgagcatactttgatgtatctatgtgaggaaacagccttcagaaggaattccaggtcagtttggtgaaagtctggatgtgaggcgcacacaggtttccggtagactgctttttatctgggctgccaagcagtacctggaaacatccagacaactgcttacagtgtgctctgaataatactaattcagtgcattaaaaaagtatgccacacatgttaaagaataaaaagggtggcgcaaaaaataaacagatttcctcattaagacttctcttaatttgttgatatatggcatatctgtcaatgagaaatactcagccttttgaccacaatgaagccatttataatggagcatctcatg

SEQ ID NO: 125431 - DNA, 1889 bp, Homo sapiens
tcctaattcatccttttccttaagtcatgctggttggtttcttgttagatttctgtctccgccttgtccaaaggtatttgctatttttaaatcatcacagtgtttctatatatgtgtgtgctgatttcttcacataacatgctaacataagcatggatgtgtgtttctacatagacttaatgatcatcatatttactgattttaatgccctttgaaatatatatgtaataatttaggtaactgcctagtgctggacatttctagaattcttacatgaactttgttgtatttatatttttccttctatagggtttccttaaagcagattattaaaaaagagattaatgggccaaagttcttacaaagataacgtgatttttgtttgtgtgttttttgatatgtatttccacattgctttccaattaaaacctgtagcaacaagtgtgggtctgtcagattcatcacatcttcatcagcttggggtgggtttttgttttgttttgttttgttttgctattttgcaaaatggtagaatcagtggagtttttatcttattattttttttaattcttattgatatcattatgttccatgtctcatagtgacgtgatcaagcatactttaaaataaaggcaaatactttgaagtaaaagtatgtctgtaattttgtttggctgggctttaagcatcctaaactaagagcaagcatttaaaaagttttccatctttccaagtatttaaatctcttttccatttcagattgctcttttatatggcaatttccatttttctctgccatatattttattaaaaatttaaatgtatttaaaccatctcattccatgaaagagaaaagcagaactttagtaaagtgcattcaaataattaaagtccatggcaaaagcaatagggaagacagtcatgcacctcttgtggtccttattaatgggtccacatgcacacacatctccaaccagccccctttgtgtagcttgtcagaggacattagctgagactaatctggaagccacttcctggctcccaaatggacatagtcaccaaatcagaaagactcatttatcagaataaaaactttgctacgtgaggattgtgcaaagcttatttcatgcatcattatctgggcctgattagcagtgatggaaattggtcctcaatttttaacaatcagcggaaaacaaaccttcagctttcactgaagatagacaattgccatagacatgtctctgtgttttctgcacaataggaaaatagaggcaagagcccttgcaaagacagtttttaaattgttttggcagcagttgtctcacagatgccattgtccctgtgacgcaaatgaagccagatcccgctctctgagcagacgggttgacatcttcctggatgccccgtgccacaggggccacattattatgtgttgtggccccagatgcagctggtccttcttgggctttgggggcaggcaggcctggttccagatgccagtgtgacctgggcagctctgtagtctctccgtacatagtttcatcactgtacaacagtgacaacaacactacctgcctgaaaaactgtgagggttataataagataatttatgcaaaagagctctgtgcgggggctggcacaaaggcatgcagacaggcctcacactgctaggagcttcctcctgttaagtctgagaggaggcccttgggaagggtcttgcggagtcaagggtggagcagttactcctgctactgttgctgtgaggttttttggccatccttattgtccttatgtcccagttcaagattctagggagtacagctcttcaagtggcattatcaggcccccaagccctgcccctgcaagtggcattatcaggctccctg

SEQ ID NO: 125432 - DNA, 1133 bp, Homo sapiens
tcagtgatggcagcaaaagggaaggcaagagaggagtgatgggaaacagggagctacagcgacgtttcttctcaatatttgtcttgaacaagagtctagccccaaaagctggggagagaactagaagagcgaggtcgcagcagaccagcatcactgcattcagcatatctcctcgtacgtttacactgctctaaactattcctttttttcgttctattctttaccttggagctctttagtgaaatgtatattctttaaactgttgttctttcatttgttttattgtttggaatctcaaatataccatcacctgatgggattttcttttggtttcgtggtgataagttgttagtctcctgtccagttaaaatgttggtgatgttgagtgcaattgtgatgtcacttcactctcagtgcatgattttgtggagtgagcactcccagaggagtcttaattcactttgggcatccagtgactatttaggggaagaatgactttaaaacaaaatacactgggactgcaacaaaacacagtgcttgttttctggactgttataaatagtgcttagatcatatgtcctgaagtgtcttgaagtttaaaatctatttttattaaaaaacaataacaactctaatatacatctgggctagacttgtgtgtttttgtccttcaaatttcatctctttgcatagaggcttctgtgattttagagaatctagaagctcagtaagagaaaaataatgacctcccattacttacacttaatgtattgctatctacaaatagctaggtagttgcgcagaatagccatagtgctacccatcattagtattaaggcttgacagaacttggcttggagagcaagttgccactctatgcatctcaccaaactcctgcagcgaatcacatttagtgcataggagccaggtaacctcaaccacagaaactggcctcacatgtaaaaattaagggagagccaaaagctggggagtagggccgtgaatcttccaggccagatttcaaatatgaaatacacgtcagatgtgtccaaactgatacttatgtctgcttatttatatttccaaaaactctaattgtcttaatgtttttctaaagatctcacattaaacaa

SEQ ID NO: 125433 - DNA, 1023 bp, Homo sapiens
acgtcaatgaaaaatggaaggagatgcatgattgttcaaaattatttggagggatatgccaaaaaattatttctatttatttatttatttatttttgagatggagtcttgctctgtcgcccaggctggagtgcagtggtgtgatctcggctcactgcagcctccgcctctcaggttcaagcaattctctgcctcaacttcccgagtagctgggattacaggtgtgcaccaccacacctcgctattttttgtatttttagtagagacaaggttttgccatgttggccacgctggtctcgaactcctggcctcaagtgatccgcccacgtcagcctcccaacgtgctgggattacaggtgtgagccactgcacctggcccccacaaaattattgaaatgctttatgtcagtttgtatcactagttcagaagcactttaccttgtaatttttccctttcttccaagtgcctagaacatagagaacaaagtcaacacaggttaagatgaagtgcagctttgcttgttggttgtgagtggccgtgggacccacaggcagcagtgtgaggtggcgaggtagcttttctttcattgaaacattttctctgggccatataaatttggtggaactggcttttgagaaatcctctttcttaatgaaccacaaaaaaagcaatatcataggacacaagatctttaatttgcgtttaataaaacaataaaatgaatccattccaaaattacttggaagatacttacatttagtgatggaattatctttgctgactctgtaaaagaaaaactagtaccgaactgagaataattgtgttcaacttgaggaactagtagccctaagttagcattttcttctttatacttgagctgaagaatttaccaaagctcattcagagatatgtaatggcctctgaaccatgggattatataatttaggtggaggacaatagaagggttaatattccttactcaggctctgtggctattcatttagaagagaattaaatcatgaa

SEQ ID NO: 125434 - DNA, 1007 bp, Homo sapiens
acctccacatgtattctttcctggaattcatgtgcctgagaactcacctgtgaccagcatcattccaagtctttttccccaatgccagttttacagatgccctccttctccttcataaaagacagacatacccctcacccatcaggaaactcactggggtgcactttcctgagatgggcaaaccttattcctgatctcaaacaaaagaacaaatggaaatattggtataagatcaagcagataaattaatgagttggtggcgaatctttttgaacatcaggtggtttcccaatttttctttccaaccaaattgacaaaggatctaactgagttgtcagattatagatcattaagcataatttttgtgacagattaatgaagtgatttttgacatatattagaggaaaagttttagaaacctaatggaatgatgtaaccataacaaaagtcccttaatttaccttcgtatgtgacaagctttgcctagtgcttatatctataagaggaaaagtagacctgaatttatgccaaaccctgcctcatgctagcaataagtaatccagtcatttttaaggaattaattgaaaaagcctcactcacttatgaaatgcagttccaaatgatattttaccattttgcttaagaaatgtcaaagtttctaagaacatttatgtaattttggttggctgttttctattagcacaaggataaacaatataaaaaggaatttaatacaacttgcttatggtgagggaaaatgaaaattacattttaacttagatacatattctatacaaagaggcttgatgaataaaaaaaaaaactcaagcataaagtacattcagttaggataagattctgttaggtagtgaaatggaaataagttcaaggaagaagagacatgctctaaaattctgcctgttaaaggaagaactcatttactaatttttacgtggaggggcctgggcatgaaaatactatgatatccagattcctttgtttatatt

SEQ ID NO: 125435 - DNA, 2243 bp, Homo sapiens
cttggcaggtccctgaacctctctttctgaggcattgattaaataaaatttatgtgttttaatagatagacaacctggagacagagtttctattttgacaatgaaaactaagacaccagctttgttcttgccagcagggatggccatccactgccccacacttccctcaaaggtgaggccccagaaatgtgtaaaaaaggactgaaggtttttgcctcaagaaatggtttcaaatatgttgagattcccagataaatggatccaagatttgttccatagaacatggaagaaaatcttttggcttagaaaagtctaaatgcagatatactcagtaggattcatgtaacacgttggttaaagaaccttaatttgactcctgcccaccatgtgggttttttatgaggtttgaatgaacttgccctttttataagctgagcagagtgtttctgcaacacacaccctcagggataggtgacataatttgttggttggggcttcttgtataatttgcaaaataggaataataataatatccacactacagggggcatgtggactaaataaggaggtaggtaaatattatccatttgaacactgcagaatgtcaaaacccaattaccgttatgtggtttgcaaatatcagtgttgagctgtactgtctgatagtaaattagccaatagtgtaatactttagactactcttaaagcccatgacagtggcatagagaaggaatcctgtttaactattggcttaaaaacaacaacaacaaaaagcacattacaataaaatgaaacttcagtttcagggtagctgaactgattctaagcatcatcagccaaagccagcattgtggctacagagaaaaactggccaccctatccagatggaatccttgccccggaatgcaagcgtccgtctctgtccctgtggaacttcacttagtccagtcctggttcatgcaccgcacccatgactgttgttgataggctttctgatccatagtaaggaaacaggaatattcacgtgcggcaaagaaattcactccgtaccatcgctgatacccccatttaaacacaggaaagacagccaagagttggtagacaattttgtttttaatgcatgaaagaaggacaacaaagtggtcagagaaatttactccaaaggaagtagagttaagttaggaaatagaacagaactttaaaataaatacttttagtcattgcctcagaaaatttcagtagatcatcacataaaacaagagcaggctattattgaaaaacaaataagcatcaaaacattcttggaaattaaatacacatctttagaaatgtgcacatttagacacattcaggtaaaaattttaaaaatccacagataaaattttactagcttctagagagggattatatatagctataaacaaatcatgtgaacatatgccttctcatctatgacacaagatgctagaaaacagagaagcggagaagacagtcttaaagaagaaggattttcatctgaatcttcctttggtttagccatatactggtagtcaaggataacaagtaaatggagccagccttcagacgcaagagagcttcgagagtataccctcctaagttagattatactcaagtgtataatccaaataacggaaaataaatctaggaaagggaaagacatatatgtagctgtccaatttaatatgtaatttaatataaaataatggttcctataatagaaataccataatgttacatagatatatgtgcaaaataaaggaaatttagacatttattagacaagactcctcagttctcagaaacagaagtatgtcttgaccagttatgcataattgggttttgtggcgattttttagctcacataactggcacttccaagagactaatctttattatgggcatggttggggccaggagctgaaacattgtcttagaactatgttcctctgcagtccgtggataagttcttccctgtgctggttaaaatggcagccatttatccaaaacttgtacccaatccatttattccagcccgattggaccatcttcctgaacacctctggtggaaaggttctgagaaggactttgattggtccagcatggaacacatactcatctttggatataacattgtcctagggaaatagttaggggcagatagtctcacccagatatgataaattggttacctgcaagaggacagaattcttttaacacaaaca

SEQ ID NO: 125436 - DNA, 1051 bp, Homo sapiens
gcatgtctttttctccagagaaagacaaaacaaggtcacaattccaactggcatgacactgctgtcctgtatacaaccgaaaatgcactcatcccttccagaagagaaggtaaagtccttgagttgatgtttactctctcctgatatcctgtaacttaaaatactatgatgtaaaattatcaacaattagacactgctatggaagtcgcgtatgtcccatgttaagggaataaggggaaagaaaacaaagatatttatatgtatatatacatatatacacacacacacacacaaacatattcttaacaaaatgagaaggaaatactcattgacaattactgttttcatttctaaaactagtcacatcacagctggtatttataatgtcttctacccattctgtattccccttgccttcagcaagcacctcagctggttgtggttctttacctggtggtgtgatgcaaaccatcattcctgaagggtctgggccattagtggtactacctggattgggtcagggtagttttcattgaccttcatcgcagggcttactaagggaagtcctaagggatctcctacatcccatactgttccttacctccattctagagcagtagtctattttcccctggatagtctgggtcagtcacccagccaacaccataaaccccttcttcgcctgttgactcaaaagcctgaggagcccagactgaccatgtggcatcttaacttccagttcggtggaatcattgttgtgccccctggtggaataatttgtttctctggacctaagacccatcggccaatagaacataaaagtcatgaggaaaacgttttgctagtgggtcactagggataatgatggtgccactccctttttaacctcttgattcctggaccctatgggagaaacagcaccatatattggacatcattcagagcatacacagccttctggagaacatcacccgagccctctaaggtactgctacctctctgaccctgtaactgagttttcaaaaggccactctactgttctatcaaacca

SEQ ID NO: 125437 - DNA, 1040 bp, Homo sapiens
gaaagatcattttctcctccagcccctgcagatcagcaagcgcccacgtttccatgcaatgatgaaacacacaagtaaataagccatgatgttgtctgggaatgcttcagccagtgtggctggtcttaaactggtctagtttagttgagacacttggagtggccacttgttggccacttcagagaaaccagcagtgttaattggaagcctctctccaagtctcagcaggccagccgagcgccgggacaccatggctctgacttaagcctttgccctgaagtcatgctgtgactcaggggctgacccagagcttgggattatggaggctttggagaagcagctgcaccttcaagcaagtttccttggatgtatctcctgccacctctcacagacgcaaattaaagagagagagagagagagagagagacatgaactgttgttactgcagcaaacatccacactgtatctgctgtcagggttgcatcctgggaaagctaattttgtagacttaaagtaatgaataattagaccattgctaaatgtatgttttattttctgaacaaattcaaagcattagaaagataatgaagattttcttaaaattaggcctattttaaccctccctactgtttagccctaatggaatatttattccaaaatctctattagtcaggcttctccagagatacagaacaataggatatatttatgagtgtgtgtgtgtgtgtgtgtgtgtgtgtgtgtatctatggtggggagagatttttttttatagggatggccttgtgtaattatagaaaccaagaagtttgaccatttgccatctgtaagctggagaccccggaaagctggtgatgagattctatccaagtctcaaggccccacaacctggagctctgatgctcaagcacaggagaagatgggtgtcccagctcaaacacagagaacacattcacccttccctgcctttttgttctgttcagaccctcagcagataggatgcctgcccacagcggtaagggcacatcttccttactgtc

SEQ ID NO: 125438 - DNA, 1080 bp, Homo sapiens
aattcccttcccttttaaagctaaatatctttcaagtatatgtatagaccacattttctttatccatccattgtcagtggacatttaagttgttcccgcttcatggttattgtgaatgatgctgcacaggtatgcaaatatctgagactctgctttcatttcttggggatatatacctagaagtgggattgctggtgaatccagcatatctttgcctgaaaaaaaaaaaaaagccactcaagctgagttaatgcacagggatatatatgggatcctatactgcacctataggggttgtgtcagctcacttaccccacatcagccacatgcgagttcctgaaccaatcacagtagccaagggagtgccacacacccattggcttaggccagaatgcactgatcaattgtcagggagaacaggattactgtgtttgattggataatcagggttcatctcccagacaaccaggttgctccacaaaggggatggggcagaaagggtgctgagggtcttgcactgtccagagaagtacatagcatggggctagagccaggctgcatggactcagggtttgggtctgttactgggtgatttcaggcaacttgcttaacttctctgtgcctgagtttcttcatattgaaagaaaaagtgcttttgagaattacacatacaaatacatgtagaacatttagaaatgtttcgggggctgctgggttggagtcaacagatcctaattattatgaaaatagccataatttaaaatgcagaagatcgtgcattaaaatcttgatttcttctttttaaaaaaagttagagataaggcaacaccagttttactgcatgaaaggaagtgtgggatgcatactagctgcttcttgcaggcacatgtaggcaccaggtttcctcagggtcttcgtggggccacacctggccctcagcctgcctcctactgctgtctgcagacctctgtagatggatcagtgcaggttccctgattcagtcatactggagaaatgaagtcactcaaaccctcatttttaaaaagtcagaaatataaagattatgttgtcaaatactgc

SEQ ID NO: 125439 - DNA, 1052 bp, Homo sapiens
gccctgccacctttctggcaagctgtgctgattttgcccaaagctggctgtagcccaccctagcccaacactgtatgtgaaccaccattcctgcgtgcattcggcctctgccctgactttgaatttcctccttgcccctacagtttatggagcagctgaagctgtgataagacttctgagcttgcttctgaataccacagccccgggcacagcaaagccaagaaccctgtggatgagtgagggccgcagttctctacacaatcctgaaatcaagtgttcctgtttctcttcctcctccccatttccccagtcactgctcagccttctcttgggtctttcaagcatttgtgaatgcatgtgcacacttagacacacacacgcacacacacacaacccatcttgtgtcttacctacctctgaaatattggcatttgggagacaatccctaatcagctaacacttgtttttttctatcctctgtgtgcttgttagaatactgtgaaggtgttttctatggaccgacttctaaatgttcctcctgaaatcagtgttattcacacagttctaatgtaatgaattctgtctgtctgaaagcttgccatattgtccctggtttctcccagctaatagagaggaaaatgagcctgaatatgaacccgtcaccacagaccgcactgcatcctttccaggcagcagggccctggagactgtgctcaggcctggcagcctctgtgtttcacttaggcttgttttgctcaacccaggcaagacttttaaaattgtttgaataagctgcagcatcagtatgcttttttaaattgtgatttaaaaaaaaatataaaatgtcccattccttccattttcaaatgcatacttcagtagatttaagtatattcacaatgctgtgaaaccgatctccaggacctcatcgtcctgcaaatctgatactctactcactgaacagcaactcccctttgcctgcttgtctttttgcgcctggcttatttcacttagcacaatttcctcgaagtttatccatattgtagcatata

SEQ ID NO: 125440 - DNA, 1002 bp, Homo sapiens
atgtgcacccatggtgcatgcatatctagactcatgtacatgtgcatagatgtatatacagtgcatgtatgcatacccacacaatacatgtgcacattgtgtatcttaaacatctatgcatacatacacaagtgtgtacaaaatatttgtgtatatatacacatgcatacatatatgcctacacatggtgtacatattcatgtttgtatatattcatgcatacatgcacatctatatacatttgtaacttgtgtgcaaatatacataacacgtgcgtgcactcatacatccatgtgtatacactgtgtgtgtgtgcctgcacgtgtgtgaagatatgaggccaaggacagtatgtggctatattagcttgttgctgccagtatgcttccccacccccacgccaccccacacacaatatatctctgagcctggtgcttcggtcactggcaggctttgcaaggattctgaacttgtccactttggcctcccagaagttattgtcaggcctcttgtttggtgcctaatttatgacttggaagagatttaaagattaaagagaatatggccagttagttgtttaaatgaatagtcttccatagttagatagggcagaaatccaaatcaaccatgttagtaaactcaaacctcatctttcgtctctgcccttgcacttatgtctgcctccatctggctatttattagccaggaggcaccttgccatgaaggaggtggcctctgcttgagtgcagactgcacagtgggactacaggaaggtacagcccatggaggggtgggggtcttagtcttcatagattcgctgccagcggggtcggggcaggaagtgatgatggctaaagtggcacccccttcccatgcacttttcctggagtaacccttaaatctataccacagccctatgaggtcactgctgttgttatcatcctcattttacaaataagaaaacagcacgtagatgataagaaacttgtctgcaaccaaaag

SEQ ID NO: 125441 - DNA, 1071 bp, Homo sapiens
aaaatgcaagctagtttatatgataatgtttgccatctcactttaccagtactgttgaccttttcatatgattctaaaatcacttacttgtaaataaatactcctagttctgtagatgaaacaatttggaaaagtcgttactgtttactcactgacattttattttagcacccattataatcagtcacacatcgcatctgtgtttgtgatgcttatcaactgttaattttcacagttttcatgctaatttggatccataaaatgatacagtttgttcacaacttccatagctcatgtaatgtaattcaaaacgtttccacgtgcagactaacatttcccataacaaaacaaacttttctaccatagggataagagtgcatcttccaaaaattacaagagaaagtgagggcctttcaaacaagtattcaagatgtcttgagtcatcataaccaattacagattatccagacccagaaattaatccacatacagagcacttgcttcctctggcttctcggaattttgtgtgtgtgtgtgtgtgtgtgtgtgtgtgtgttttaactgtttcatccttcatacccaaggaatgtggagcaggagaaaaacccaaaatagcttttgcaccttattagtcaccatggtaaaatgacaacaagcaaacttcaaacacttcagtgaagacagaggttcaagtattaaataaaatgaggctcaggagttatctgtatatttttggtttctttgctttatttgtcaccaatagcaacgcataattggtaacccttttgccgaataactccctttgctggaagttttgtgatttaaatttactgttacttctgtgttgattttacccttaaaggctttatgttataacccttctttttccttcttattaagaaaataacaaacttttattacgtgaacgaagctgcataaaataaggctctgagtatatttttcagtaaagggaaaaagaaacccccccaaaagagattagatctattgagattatttagactggacacactgtttcctggttgataaatctgctacagggcttcagggcag

SEQ ID NO: 125442 - DNA, 1620 bp, Homo sapiens
acgtgacctctggccttggattttactacctgtggctccccaggcacatgaaaagaagtaaagatggttccatttgataagtactagtcacaagggttgtacatgtgataaagatgccagaggttgtgaccaccatgtctgtgcagaggtgctgctggctcctctttgagtgtgagatccctctgcagtcacacaacctcacccagttacgaagagctagtcacctcaactgcattgtcccaagacaggcagagtaggtaaaaatagtcatatgttaaaattcaaggtttagataaaaagacaactagttcttgcttgctttgattaacttttattatgcagatgcatttgaactggagaagcttgtcatgtttctctctaaaagatgtttttaaatgttattgctcaaaatggaaaaaaaaaaaaagaatcagtaagtattcctgacatgtaggattgttgcctggctgatcacaatgaaaatgttagctatgactaatgaaggaattatcacaacttacattggtattaataataaacaaatataagccaaagctatatataaccaatttagtgctatgtattggtgaaaaaaacagaaagttacagaaattactcacaatgaaacatagaacaagttagaaagggccttttttttttttgaaataaaggacttttgtctgataagtagcagtcatttgacctcaaatcattaaatggggaaagtctaaacaagaaaaggtaatgtttacctgaatgttggggaaagcattaggatttatggcccagacttaaagattgtagaagattgtatataattacagcaataagcatttgtgtaagaagtagctattatgctgaagaaagatgggcacacaaaatctctaggcaaatccttggaacaggggaaagtgatactgctcatagaattattggttcgagaggcagcaaatatgatgcaataagtatatcaaactcaattaaaaatagaggacagaggtatgtggtgggggaaaacaaatgcaatagggctaagtcagcttacagggggtgaatataatttgaacatggcacccccaatttacttgatcataaagttagccaaagacatgagtggtcgatctttgacaatactctagtgatctccatgagagatggcctgatagatgttggatagaatgaagggccatttgatgaacaagttttgtagatttacatgtgacttggcactgtgctgacattagagccttctaagaatcagataaattaattaggtgaaacattttttcccaaagcacttgcatttcagaaagtttctcatttctgactcagcttagaacccatcccttgttacaggtcatttctcctccttataagccatgtctgtttcttttttccatcatgtcatacaccctatccacaaaagatggtagctcacgttttctaactagagacgtgcaggcaagttgagagcatgaagaatcccttgggaataccaattctgtagcaaatgctaaggtaaaagaaaaactatgcattatttttcaactatagttggcttaaattcttagtttcaccctggagaccatgttgccagtggacaattgagcatgctgtgat

SEQ ID NO: 125443 - DNA, 1099 bp, Homo sapiens
catatggtctgttttcctctggagttctacaagtaacttagactgtttttcaagaggtaagaaataaatgacttgcctaccagctgcttcgtgtctcggcttgtaaggaccttaggtttcataccaaatccaaataattttatgtggcaacctgaaagaccaaccatgagggaagtgatgcttatgatatggttcttacaggaggcagaatcatatctgttggatcaataggccctttccacagctggcatacaaaaagactaaatggaaaggaagaaaacaataacaatatgctttggctgatagaacgcttgctatgcagtgttaaatctccaggggctggaaaatgaatgataatggcagatatttatttcaccgcaagtgtgcgttcacattttgccatttattttccccccgcagtttattgctgtgcgtcattccctactcaggccaagcgcttctgatggacgggcctcttcctgacctcggacctttcccagtgtctcttctgccctggctctgattttcctgttgttcttcctcctttcaggataaaagggctcattgtatacccagaatttacttcctttggggtttacatataaatgcattaataacagagatttgtttgattgaggtttatatttttttgaaggaggtaaattatatgcaaattttaggttgataatattcacctgtctgaaattcactgatacttggaaatgttcctgtgaagaactctgctttattttaattcattattaattcatgtttttcttattggatattcagttccagaatttattgccaatttttcttaaaactagattgtatccataaattgaccagtatagtcaatttggatagaactgaaactttctgtctacctggtaaaactaagtgcctaaaaacatgaactataaatgtagttactaggaactcacaacttatatatactatccattcaatgatacataggacccaatgtctttgtgtttttgaggttttcctgttactgtgtactttgccattttacatagttcactaaaaagaaagaagtgggagaagaagggtgttctattcattattctatattatg

SEQ ID NO: 125444 - DNA, 1011 bp, Homo sapiens
cggtgaacagccatgtgctgcttgagcagagggcgtggaactggagaaggtaggacgggaatttggctgatggcccttaggttgggaccagtcctcattagagtcccctaatgccttattctcaaatttgagcccaaactaagtacttttcctatttcaaaacgaagcagttagttctaaagcttgtgacacaaacacagttctgtgagtcctgtttgttgtgggaaacacccatgaaacactacaggtgtggagctcagagcaagccctgggaagcattcttgcccttggctggtgtttatttgccactttccttccctggcaggagagccagccacacagctgttcctgctgccacggggcaggcatggcatccaggaaaacaggaagtgggtcgtgagcaaatgggccttttcataaaatggaaggaaatcgtcaactgtgggagcagaatctgtccctactcaaaagtacattagaaaaaaacggaactgaacttttaacctgttactattgtaccttgaaaaccattaagtcaacccaacatagactgaagattggatgtagcttagaagtgaagtagtgagaatcaaaatagatctatatatagcttttcaaaaaaaccttatgagcctatttctttttgctaattacttcttagtcttttatttacaaggtacaatgtccctaacttgagagaattaaagaacttagtgacaactcagtggaacagaacagcactttgccagctcataaaagcagatcgttaaaatttcaggaattttgcaaaccaatggctgaacagatccactattaaaaagtaaattatatagacatacaattaaataaataatattaaaaacagaggtaacaaatactaaaaactcatcacttcctaattattttagtacatttcattactatttcagtgttcttgaggttgtttacatgtatcggatctgtaggatttaatgctttagaatagtaaaaatatatcatagtgtgctacta

SEQ ID NO: 125445 - DNA, 2076 bp, Homo sapiens
cagccacttgagtgaagttgggggcagatccttccccagtagagcctacagatgagaccatagtcctgatccacacctgcactgtagcctggtgagaggccatgagtcagaggcacccagcaaagccatgcttagattctagactcacagaaactatggaatagtcaatgcttactgttttaagcctctacattttaggataatttgttctgcagcaatagataactaaaacaagtttcaagtaagtgaaacccatctcaaacctacttcaacagttagggaatgtcttatctcatggaacaggaatcccagagtggagtagcattcagtattagttgaatctgaagcccaagttgtcatcaaggatcttagttcttcctaattcttctctgtatcatctttggggtcagcttccccctaaggctgggagcaatgggtctgtggctgttccatgtatcatatccagacactagaattttcataagaggaagagagactatctcttttaatagttttgtaggagaaaggaaacctttcccagaaagcccccactaaagagttcctctcatatttcattgactacaattgagtaatacactgacccaattctttggcaagaatggaatgaccttagatgagccaggcccatctggcagacggggatggggtcagctttctctgaggtacgtggaagtcactggtcaatactggagttctgttaacttggaagtatgggcaacatatgctatgtgaacagccagcagtgcgcactacacatgggttgcagccttcagtttgattttagtctggagcatgtaggatgtgtgatgagtaggtacagagaggatggtgaatcactgttgaagagcaagtgggtgatttggctcaaaaacagtaaggccaagcatctgaaagtcaaaagtcaccaaggaaccatcctccttgagggacgatttcagtgcagaactggccacttcaaatctagcctccacctacacttctcattttctgcttttctggagcagaggaactattagaaatgctcctagcagtagaatatgcctattcagcgttcaggaactaaagcatctgctttcttgatagtctttgtagtaagaggtgtgttcatcacatgaatctgaagaatactggatctcacttaaaattacttcctgctgtagaaagcataatcttgtctcttccagagttagtttacagtggacaaagtgcagcctttttaaaggcaacatagggcaagtgtgaaggtgtgtgtggccaaagaacaaactcgtgctccctgctgtcaccttgtatagaactgagatttctgttgcctgatccaggctgtccatgtcttcctggctgtcatggtcaggacaacttgcagagtctgagttgataaatatcacacatataggagaagggctactaagctatgtaacctctcaaagctgcatgtcacaaagggcatcactagtagggttttggtgtgtgtttgatgtttcccagcatggttttaagaacaatggaagactggctcccaggtctgtggtctttaatcatgttttttcttattaataagattttgcattaaacttcagatatctaatcatgtacacagatgctttatgtgcatgtctaaaccaatacagttgtgtgcatacggatttttcatcataactttcgaatcagcttgctttctgccgccatttgatttcagttgaaccttcattgtgaatcaccataatggagcctattcccttagtgcattgaattgtttatttacaagatttgcagtgctgattataattaggttattaacaagttatgaattatctattttaattagcagaccttggagatttaaagatcaatgcatatggagctcaaattacagatcctcaatttactttacatttttaaaatgaaaatattcagtgactgtcattttcttacacatttttctacaccaggcttaagcaaataaatctttccttgggcatacatttacagggtaattgacaaaagatcaaaaggcataaagggaagataggtcattgtctcctgttctaagca

SEQ ID NO: 125446 - DNA, 1009 bp, Homo sapiens
gcaaaataatcctgattcattttatctttcttcacaagtacttcttttccacccttaaaatacatttgatcatcttgacattagacatgcttccgaatgcaaatgaattttttagggcattcaaaaaggaagggttaggcttatcaatcagaaagactgcagccgtggcgtggatggctccagagccatttcatctctgaagacagtgggttttaagccccacacaccaaggccatgagagtcggtgctctctcctgtggccgctgtgctcacctacagaatttccttcctgcaggaaaaagtgagggaaagatagctggatgaaagctataaagccaagtacagcctgttggcagtcacagaacgggcccagcaccagtggctctgtggcagcctgcacaggatgggagagctgggtgcaaacttgcagaccctcgctttctcctgggctccctgtgtgttgggggcactcactgttcaggtgcagcatctgctggggcaacgggcagacaagatgtgggaggggtacttaccaaggcagcatcaggcttcctcctgcatctctgcagagcagtggaacctccccacctgctgcccttagacctttggacaggtctgagccggaaggagagcgaagtggcggagagaaaaccagactcaccttcgtcttgccttgtggctccatttcctccttgtgccctcttgccaactccataccagttcattcccccaggtacaggcacctgggacttcctttgccctcagcgtcataattcaccttctccctctcttcccctctcatgcccacagcaatggagttgggggaagaggaggttgggatggggaggccccaggaggtgttagatggagtgcactgatttcaactccacctccccttcagaccaggcaagcgccttgcccttcttgggactcagagtctcccctccctctcctgccccgctcctgccccgcgctcctggctgccagcgcaccacatgttcaagcatct

SEQ ID NO: 125447 - DNA, 1003 bp, Homo sapiens
cctgagtccttgtgtcccatgtgcttgggacaacatccccaccctctctacaactcaggacattcttcaaaacaaacttggagaactattattctaaacaaccaaaggggttgaaaagtataaatggactcaggagataagctaaatgaatgcttaatctagccagaataggtcagtggctctagaaaagcaacaagagtaggctaaaaacagatctgtgaacctgaaaaagactaacattaataaaaggagttcctttaaacttgacaaagctctgtcgagggtgttgaagaatagttttcaagcccagcatttatgtagttgtgtctgttaaaaagaaattgcaaccaggcacatctttccaaactgctccaatgatagaacactacgtatgtaaaatgttaaagtgtgagtgtggttggatgtggttggtgccagatgagaatggattaggtgctggatatgactggatctggtgttaggtgtggctggatctggtgttgagtgtggctggatctggtgcccagtgaggttggatttggtgcctagtgagtgacggcttggtttaacctgctgaagtaactccctgttgattccatataggtggtggacggcaggtgccacaaaagcctcccagaggcactgctcggggtccaccccagttagtgcttcccccacccccgccctaccctcctcccgacacagacgtggtggagcctctcagctttcccggggaaggcgctggttccgaggcctcagacccgatacccaaacgtatgttcctcttgcttcattccgactgtgttaactgttcatctctctgagcactgcgatgtcagggctgggtttccagattttccattcttgtctttggatgtgtgtgcctttccttctcagctcttgtttcccaatgctgaatgcagtgtgtctgatttcacagagaacacactctggagaatttaaccaggtaatcatgcctatctgtggtcagacttcagctaaa

SEQ ID NO: 125448 - DNA, 1530 bp, Homo sapiens
aggggtctttggggtgtctatgagcaacactgtgccacctccaggccactccttggacatccgctggtctctcgcctcatggcctcccctgcctgtgtgggaggacctggaaagggaactggccatctaacaaccctcctggagcaccaccttccggtgcaggtccctgccccagcacaatcaccctaatactgccttctttgtacttcataggtacaaagtactttgattgtactttccttctttgtacttcataggtatctcttgggtcacagattgatttacagaagaagaagcggcgagcgccagctccccctccaccacagccaccaccaccgagtcccctgatccccaaccgcactgaggataaggaggagaacaggaagagcacgatgggtgagtgaggctcggcctgccgtctgcatgcggggatgcttgctctgtcctggaatgtcagctctgatgtgaactcctgcagtggcctcatccataatgacattaacccaaaaaatattaatgctaaagaaagaagggctggaaagaaataattgcaagttcacttcatatcttactagcagtatttggtgggcattatgtgagcatttaggaggcgggggacggtggaaggggagaaacggctgcaggagccgggagagggtgaaaatggaaagcctgtgagtgtgagtgtgcgacgtgtgtctctgatggcaaaaggagaagttcctagggtgacatcgtggaaactgctttgaaggacatttggcatttcaaagagatcttaggccacaggtgatgtatagacaagttgacatcagctcagtaatttttggaccatcctgtttgaaattgatctccacttatattacctggtacacatttagcaaagaccctgattttctttgagggaaagagagcccagaggaaagaagatggaattatactatctgtgagcagaaagagacctattagatcatcatagcccacccctcgtgctacaggcgaggtggagagaagctgaatgatggcgctgtccaggtccaggggagtcaagggttcattttctttttaaatcattcagcatttgttatttcacttatgttggaacagaaatggctcttccatggagtggttggaaaatggcagcctaggagtcacaccttcctgagctgagagccccaagaatggcgtgtgtcagtgctcacgacgaagccaccagcactcacaggccactcaccatgccctttaacccacccaggcagccccgcgttttgcctttgccctaaggtctgcagctgcaggagggaaagtccttctgagataagtggctgccttggcagtttctggacctttagtgagagctccgtggcagtttgtcagcgtctttccccttagtcagttcctcgcttttaatgtgttagcatttcagcctgggagtcagttaccttaagaagcaataacctgtattccatgtcagctcatcctctttcccaaaggactgaaagaaaacattatcagtggatcattaaaata

SEQ ID NO: 125449 - DNA, 1761 bp, Homo sapiens
ggcagagctcaggcagtaatgcttgttcacttaccactcacctcttgctgtgcagcttggttcctatcaagccacgaattggtactggtctgtggcccagggtttgggaacccctgagataaactattcttggttggaagtttttaagtatccttgattggcaggtggcgttttttttctccgtttttagcactttgaatatgtcattccaccctcttctggcttgcaaagtttttactgagaaacctactgataatattataagactcccttgaaagtgatgaatcaatttctcttgctgttttcaagtttctttctttgtctttgactattgatagcttgattttaatgaattgtggtatggtcctctttgggtttattctagttggagtcctttgagcttttaaaattttgtatgtctatttccttcctccaatttggagaattgtcagacattacttctccagatcaactctctgcccctttctctcttctccttctctgatccccataatgcatattttcatccccttggcattgtcccataaagtccttaaggctgtgttcaatttttgaatttttttttattcctttactcaataatttcaactgacctgtcttttagttcactgattatttcttcttcttcttaatacagcctgctgttgaactcctccagtgaactttttagttcggttattttatttttcagcttcagaacttctgttttttatagtttctgtctctttattgatatgattctattcatgcatagttttgctgattttgtttagctgtctttctgagtattctcttgtagtgcactgaactttaatttttttgtcttttctggccatagatttccatttattgttatttctctctagatgtttattttgttcctttaattgggccatgtttccctgtttcttcatgtaccttgttattttttaatgtaatttgtgcatttgacaaaatagccacctcttccagcctttacggactggcttcttacagtgtaataacatgtcagtcagctcagctagagattcttggggcctctcaacccttttctggatatccatcttccctgggcttgttggtgtattttccaattagaaggtttgctgatttcttctttatgagcttgtaatctcgtgctctctcttgcatctgtctatggtactgcagattttctggcactgcggccagcttctgagctctcttattttctaaagccttcagtcatccatagtatttcagttttgtctgtattcctggtcaactgagacagaaatcagtccctgaacaagcctccccacaaatccagaacattgcatgtactttttactcatttcctcccgagggataagcagtgagctgggtgctttctcttgattgcactgagctgtgctggcctttgcctgtggcactggcagatctctgctgttgcaaccagcctctgagctccttttttctcagtagctcccaggcattcaaagtgtgccagtttcccatcagtgctcccagtcagtcgagacataaactagtccctcaggcagcccccctgaaaagctggaatgttagatgtacattccattcttctcttttcttcccaagggaaaagccatgaattgggcttttctcctgcagacactgagcgatactgggttaggggaagggctgtcacagttgaggtgaaatggcttttcttacccatttcagcatggccattcttggcattaagcttgcctatggtcc

SEQ ID NO: 125450 - DNA, 1046 bp, Homo sapiens
caagacacccttgtgtaggggactcagtttacctattaaagattgacacaatactctatattattcttgctggcatctttctttgtataatacctggcatgttacagagcaggtttttaaaacttttttggtatttcatttaagtgattaaaaataagtaacttgtggaagtttactaatctgtgttatctaattttagttttcattatccacaaatatataatacatagttattcatttattcagtcaatatacagttatatgcttacttttgtgcagatacaactataaatccatttttattgtaattgacaagtaattcaaaaatattttaaagttattccagctttcttttttcactattatttgaattattgcttttattatgttcaacactataaaattccaacttgagaagtctgtttctctgtgatctcaagattattgcattgggactgaaattgctagtgatggttggccattaaaataagtgatgatggaggctgtgttatgatcagttattagtataacccaaaatagacttttctatgaaaaatttgcttgtgtattcaatgaatattgaataactgctatgcacaaggccttgcacttgaaagcatgaattggtatttattactctaatatctcagcacagtgtatacataaaaagatagtatttcacactgtgtgaagactgaggacgatctgtgtatgttagacatttaatggaaagcattattacttgaagttccatttcctggatctggtaactagaataatacaggaagtgataaaactatgctgaccagactcccaaagacacgtttcatcaagaactgaagtgtccatttgatcatcatcagtcactctggtgtgttcttgatcctgttccgcagagaggacacccagggggaggcaggtcctggcagcccctgtactgggaaggccctgagagctgggctgcagaccacttggccaatggatgccagactcaagtgtcctctctgcatttaggcctgatattttttgcttattaaaatgagcat

SEQ ID NO: 125451 - DNA, 1461 bp, Homo sapiens
ccaaggtcaggagttcgagaacagcctggccaacatggtgaaaccctgtctctactaaaaatacaaaaattagctgggtgtggtgatacacacttgtaatcccagctacttgggaggctgaggcaggagaatcactcaaacccaggaggtggagattgcagtgaactgagatcatgccactacactccagcccgggcgacacagcaagacactgtcaaaaaaaaaggaaagagagaaagaaaagaaagaaaaaaagaaagaaagaaaactcattcctatgagtgtggatttcaaaattgtgatttccgaatcagggagcactttggttcaggtctgttcataaactggcagaagtggtaaagattacacctattaagtgaagggtttgctgccttgtggccacactggcatttttgccttaatgatcgctaaggactatgttttctgtctgaactttcacctggagatgatgtggcctggtgcttgtgttccaggctgagcagctcgtgctgtcgggtgcagacagcgatgaggacacctccagggctgccccaggaaggggtttgaacgtgagtactaatgccccagcaggtgcttccgctaattgcttggaacttcttgctttgcgcgaccttccagatagtgaaatcacagactggtttagtttggtgatttgttttttgtagtctagatagagtcgaaagccgcctattgattcttttttagttgcccatgctacttttggaatacgtggaatattttagtttctacttttctatttgccagtcagtgtgatcaggagaagccttcattagggtaattgaattcatgcttcccgaaactaccatcataaggagtagcctggtggttttggagctactcagtcctgttttccaaccctatagctctcagctgctaaactctgagcctacgctctgttcacggagcctttgaaaggatttctgaaaactacctgtgccctcacattgcacagttggcatctataaagtttcttcatagtttcaaatactcaagagaatgtaattcatgacatcttataaatattgacattttaaatgtatctaataaaagttggatctttactatcacctattaaaaattacatggaaagactcttctgtatcagtaagaaagtttatattttcttgatttcacatttccaggtcagtccccatgtaaaattttattctattcaattcatattttatgcttgaaagtctttaatacggactttaagtaaaatatgttataaaattaaaatatctaagttatattttttatttgatgtgattataaaactgtaagtagaagaatatttttctgggatgagttctcataaaaattacaaaataaatcaaaacagtataaatatattacaactattgacataattgttaaacatggaaagtaaatttttcttgaaaagacattaataagatg

SEQ ID NO: 125452 - DNA, 1291 bp, Homo sapiens
ggaaaggtggttcctgggagatttgatgcagttgtttcaaataccacctggggagcccatagctgttactccattttctggaaatgagcaggaaagctgctgatttatttcatttagttaaagtttgtacctcactcataattcttaaagcaggtgtattgcactgatgtcgcagtcttagagctgtgctgatttggcagccacaggcctcatgtggctcttgcatgtaccgagtccacactgatatgctgtaagcctaaagggctgctggattgtgaagacttagcaccaaaaccaatgtaaaatatctcatcaatactttttatatggactgcatgatagaatgacaatattttagatgtattggattaaatgaaattattacaattaattttacttggttctttttaatgtagccactaggaaatgtaaaattacatgtgtggtctggtttagctttctgttggacagctctgccctagaactttatttattttgtcattctccaaaagggcacaaccacacccagagaaaatgcctccatcattcctaaaagactgtgtaagaacctgtagtgatttcccaaatggacctgaggacttgaagtggctcggacagctttgaaagaaatagttgatggctttccctctcttacaagaactaaaagtttaagagtagaggattcatttattaagattttttaagtaaagtattgaatctcttgtttcagatgctgaaaaataacttagtgctttttttttccagaaacctttaggaaatcatcacttggcaatgatgagacagataaagagaagaaaaaatttctgggatttttcaaagttaataaaagaagcaatagtaaggtaatggattaaatacacatatgattttgtatcatgtaaaaaaaatagtctcttgaaatacatgcattcaacctgtcctggaacttttctaaacaattctatttaagaatactaattccttcaggtaaaagagagcttattagtatgcactggaatgacaggctgtgcttccacacttgattccaaaaggagtaatcttgggtgatggtggtttattcactagggggacaggaagcctgtgggctcctgatgaccggggccatgagcccttctgcctgtgggtgttccggtacttccacagaactctgcctgtggctgaaactcagtaaatcttgtttagattaatgaatgagtgaatggatgttatagttaagtgtaaatagccaatattgctatcagtgaactgtagcttatgcctcgtggcagag

SEQ ID NO: 125453 - DNA, 1008 bp, Homo sapiens
tatgtgttggattttaaatgtagagtcttccctgatgtttatttcgctgtgttgttagcagcttgttcactagcaagagattctaaaccagatttattattctagacatttgtttttcaatattcattatgctgttttcccccattactcactcaatttgtggaagaaggattcaggctacacacaatcctgccacacccaattgtcaaattgacacaagagttgaaggcttgtgggaggatatcttactgaattctttttgcctgtgtgttcttccagaaatctgtgcgtttggtcgtgaattacctgcggacacaaaaagctgttgtgcgtgtgagccctgaggttcctctccagaatattctcccagtcatttgtgcaaagtgtgaggtcagcccagagcacgtggttctcctcagggacaacattgccggagaggagctggagctgtccaagtccctgaacgagctcgggataaaggagctctacgcgtgggacaacagaagaggtgaggccccgctgcgtctcacgcacctgcccataatcacacggatgcgcggcgtgtacatgtcccctgttggctctccccagcactctcagtagcgccagggagagatgggtacatgaagttccaggcaagtcaagttgaagtaggcaaaaaagaaatctggcctgttttcattcctctggattgagctgtgcctcctttctcccagccctgaacatgtcctttatcctttgtctccctgcaaacttccacgacataagtaaaaggggaaaaggtgaggtgagattagagcttatgctctgaagtaactactccaaaccatctataatactttcttgtgggttggtggctcacacttgtaatcctggcactttgagaggctgaggcaggagaatggcttgagctcaggagttcaagaccagcctggacaaaatagtgagaccccgtctctacaaaaaaattttaaaattagccagacgtggtggtgcatccccattcct

SEQ ID NO: 125454 - DNA, 1003 bp, Homo sapiens
tcttggaggcccaactcagtttgcaaataaggcttgtccagaccccacatcagagtaaagggggcgtctctacaactgtgtgctggaaaccttcactgaagagtattctctaacctcaccgctcatcagccggcactgcagggcaccagcgttctagtatgtgtcaaggagtccaaacatcctagcatcagtctgccaggaaccccggtgcttgttttcaagaagtaattaaggctggaggcggtgcaaagtgtgtaggtggtgtcctaggctcagaaagacctgggctagaattccagtcttttccagctgtgtgattgtgagaaggttacttaactggttggatactcagccaccctgtctgtaaaatggggagaatacacttgcatatgaagttgccaggggtattgaacatacacagtgtggcatggtggctggatcatggcatgtttagaaaatgagggcttaaatcagattagtgttggactcagggatgtgggagctggtacaggatgcgaggattcctcattcccctctttggtaaccagttctgcaggctgcggtagcactcagctgtcttctgggcatttgtttctggacatctttctgactttttattattgctgagaaaactgggcactgacttggcagctgaatcccaactcactccctcactcactcacttactcactcacttagtcactcacttactcactcactcactcactcactcaacgcagtggtgaccgaattccttccctgggcccagcacttcacttaccagtgatgaacaagaaagtcatggttcctcttcccttggtagagggaagtctacaactgtggctgcaaataaatagccagacacaaaccagacgcagcttatgtaccgcttgtaaacaggatgaagcaaacatcctattgctgaagaatctcatggagagagaatggcaactcccttctgcctgcagcataaacagactctcttagccaggagagccgggtg

SEQ ID NO: 125455 - DNA, 1040 bp, Homo sapiens
gccctgcatatggctccccaggaacccctgcttggtttggtagaggatggagaggcaccaggtgaggggaggaggccactgtgatgtccttactagacagacctgctggccatggagacacttctttttgctgatcattcatcatctctttagcatgttagagggggaagggaagcacactggggtttcctctgcactagagcaaataggtaagaacagaagggtttgattccacactgggttacaatacttacactaactgaaggcttagatcccagccactgtggtatgggttttacaagaatgaaattacttaatttttgcctaatcctgtggagaaggtgtagttatcccaaatacaacccaaaggaagttaaatacattgtgttagttcactcactagttagcggtggtgctgagatttgaacccaggcagtgttaacccctctcccagtcacttccctaaagtcttctctcccgtagtacccctttgatctccactgccattgtgggacacttctagagtcaagtcttgtgtgacttcctcttttgtgactttactccattcattcactcactgaaggctggtgagggttgatggagacaggatagcaggggatctgccccacgtgcagaaacaccagggttcaagtaaccacgatgtgggcgatgaggggtgtggtggaaatagccttgaagttagaggcagatcagacagaggagtttgggcttcacccagtgggcagagggaccactaacgtgtttgcattaggaagaatggccagatggagccgtccttgaggaatattcatcttcagtgtgtggaaatgggactcaagaaggggaggcaggtgatgcaggagattccttcagagtccactgtaagagtctgggggagagaagacaatgccccgagcagcagtggagcaggggtggtgggaaggggccagcaggaagtcagatagaatcccatgtgtggggaaaggagcaacagtggagcaggaacggggtaaaggaggggctgggtttgagccttggca

SEQ ID NO: 125456 - DNA, 1030 bp, Homo sapiens
gattgagaagagtggtggagaggattgggggtccacctgtacctcaaagaggatggaaaaatgggggatggaaagagagggaaggaagacagataacaagggtatatgtgcacattaccaggatgttgtttgaatgttggccaatttgttttggtttggtttagttcagttttagatttgatgttgaaagtagtttttgtctatttgttgcaagtgaatagtgtgttttcccttatatacaagtctatatgtaggactcagtttagcacaaataatacttctgtaccagaaggactacagtataatcatcggaggtcatacgcctctcatccttccattttcttctaaaacagttggtcacagtcttgcctcatctatgaaggtcactttacatcagccataaaagtgaaagggaaaaatcattatgagctgacatggagtgatttgcagtaatcattgtcaatgaagaggggacatggaaattgtttatggtatatatctttgtgcaagaaagaagagaaaataagaataaacacatatttgctttcttttgacaaaaaaaaaacaactcaaaaaggaagaatgaggatgtgtgggaatgaggtatccaacataaaaataggaattagatttctttgaatatggcttgcttatataattttgattttgaactacacaagtttttatatattcagaaaacagaatagcatcaaaattgaaaaaggaaattttaaagttgaaaaacagaaacaaaggaatctaactgtctaaagttgataacacaactgcccagaataaagacttaattctgataattttgaacagttttctgaccatatatctttattggaacatattttaagaacaaaagaaatggcaaataactgttgagatttatctggtacaattatagttggtaatggtgttgtgttgtaattcttaaattattttgtaggtattgtaggtggtacaaaaaataaaatacaatgatgttattgggaatggaagttctaactgtggaagaagggct

SEQ ID NO: 125457 - DNA, 1105 bp, Homo sapiens
cacactgctgtgttcttagctcagacgaaatcaccattggtgttttgtgtttcgcagtagcttttgactctagtctcaccttcattcattcattgcacagatatttactgtgagcctgctactcaccagcattttatgccctgggaacacagccatgaatatgacaggtgaggtctccctgcaactctgacacattatgttctagtgggggagatagagagtaaataaataaagtataatttctggaagtgatactgagttggaagagagttgcaagggctgcagtttttttataggcgtgtgccaccacgcccagccaaaggctgccgttttggatgggctgtcaggagagcttctttgaggaggttttgctgtacatgtacgcctctcagtgaagagaggagtaagccatctactgtgtacggcagcatgtgcacatctcctgcggtggggctgagcttggcgtgtgtgagcagcaggaaggcaggcagtgtggcaggagtagtggggctctggggagaatggctggaggtgaagcaggagagatgggcaatggagaaggggtatggaggtttataaagttcatgagatgccctcagaaggttttggggaaaggcaggatgtgatctgagcctaccctccctatccctccagagaagtcatggctaaatgcaagtgccctgttattgacctgcctggagtcctctgagggtttctgccacctctgggataagatccaggctctgccgcctggtccctgcatcctttccatggctgccctgctgcacactgtcagtccccagctgcagcttacctgcgatcccagttcttcacacatcccacaacctttcccatcttctcctgtagcgacccttccttatgctagacatgtccttatcccattctgcaacacatagctcaaccagtgccttggaattgtcccctcaggccactaccctctttcctagaaagagcatctgctccacgagcattgtatatgagcctttctcatggcacaagccttggtgtcttgagtgtttgtttatctgtgtttcctaccagtgatggacttgcatcagggagggatcctgttatcctcatttgt

SEQ ID NO: 125458 - DNA, 1033 bp, Homo sapiens
agatccccaacacatgggcttttgcacccatccttccttgcctgcagttttgatccagcagttctgaggcttgggggctgcgattggaactcagaaggcatctcatggggaccaagctcagatagacctgggccggcgtcctggctctcttcctcactagttttgttgtcttttgacagctacataatctaggtttcagtttcatcttctataaaagtggaataacagcacctcccttgtgagctgtcatgaaaactagttgggacactaagaacctaccacagtgccaaactcatggttagcattccatcaactttagttatctcctgtcctcatttgaaatggggatcatagtccttatgtcaactgtttttgtataggaatcatatcaaaatatttagtagttgccaagaaagtgttcagtgacataaaaattgtgtcattatcagcagcacaatccaataaaaccagtctggctggttctgtctcccaggccttgctgggcagcccttgaacttaacaatcagacctgctggtgctgacaccagtgagctggacagccacgcctgggaactcttcatcctcccaggtactaaagcttcaactaaaagcactcaggtgtgggctccataattccccaccaaagtggggacctccacccactgtgtgaaaaaaaaaaagaacttttttttctgttttattgtcttggttcatagctcaggcccttgccagcactttgcagggcttctgaaatgctcttctgatttccttcctccagcctcctactttccttatccaccccccatattgctgccaaaagcagtttgtgaaacatatcccactgaccatttatcttcctgcttaaaacaatccatttgctccctccttctcacacgtgggagtgcatgagtgtgagacctcgtgggccctccccaggcctcctggcctgtgtgctcttgctcataggagcctagggctggagggtgtctcttgcacctttccccagtgcagtgtagatgacaggtgctgttca

SEQ ID NO: 125459 - DNA, 1100 bp, Homo sapiens
tttgaactgagataagttctattcctagggctgcaaacaccctgcctcacctcgacctgtgaccttgctagagcagaggtgcagcctgtccccatccagcctggggagccttctgccctaagcctggtggcggtttgcctggtgggtgtggctgggcgtgctggggtcagtggatggggaacagcccctgctctgggtttctctggaacccagttcttctggttctcccctctccacagctatttaactcccaacccccacctgctttcccaggtctttaaaagcaggtgtggatgcagatgtggcactacccttgtaaagcagcagtgaggctgaaacagatgagcacgcggttgttaaaggactgggaacacacacagaaaggtgtcagaaatgccctgaggttctgctgtgtagactttcttgagtggggcatcagaagtgctgccgctggttgtcgggcatcgggctgctgttgcatgccccttcaggaggccttcacattggaaacgtgagcatgagtgacctactgagggccagaggcctctgggcattctgggatgagaaggaagctgcacttgacatctaagtcctcttccatcccacagtttaaaatggcatacagttatgggatatttcctatggatatgaaatctgatttcatatgcacatgtgtatgagagagaacaatgtaatgaacctttggtgtacactccaacatggtatattttatttcattgtataccccacttgccctctacctcagctggtgtgttttgatgttatcaatgtgcatttaaaagcattttgttcatttttcttcaagtgttagaggttgctttttttttttttttttttttttgggagatggagttttgctctgtcacccaggctggagtgcagtggtgtgatcttggctcactacaacctccacctcccgggttcaagcgattctccttcctcagcctcccgagtagctgggattacaggtgtgcaccaccaagaccggctaatttttgtatttttagtagagacggggttttgccatgttgaccaggctggtctcgaactcctcacctcaggtgatccacccgtgttga

SEQ ID NO: 125460 - DNA, 1016 bp, Homo sapiens
tgtttctggtgacgacgcaaccctgccattatatggagaaagcagccatggacaggtgacacgcactgaggctggtgaaacaatacacagactccccagcgtggagatacaccaggcctggcggcctgtcccaagcattcctgggagtagcagggcctgtgcagaccctaaaggatgtagaggatttaggttgatgcagaggaggaagactggcttgtacacactccttagctcatgacccccctactgtctgtataggaataattaaattgaacaaaaataagttaatatgtcagtactatgtaccaggaacaaacatacatacttgcaaatttctaaaatctgatttcttgtttttttttggttttgatttttttttaagtcgaataataaaatgtattttaggcacatagtaattattgagcaaattgccatcaagtcaattttgaaaaaaagacctttgggtctttcagaattctttttgcataactttagtgtccgtatttattatttctccttttagcacctctgttttctctagaaatattctgcctttaaagtccagtctcaaggtagcatctgatgatggtgattaaatttatgttgtctctcccaggaatatttgtatttgcattatctgtttatccagtgaaaaaacattgtgtctttaaaaaattatttaagtgtaaggaagccggatgtttttgtcttctgccaaaattcaccctatgttcccttaccctctcttccccacgaggctcctgagaacagtgcctggcacgtagtgggcacatcatagatatgtgaatgaatgagcatattgaggaaattcaggactctaaccaagaatttgcatctttggaggagatcttgttttgaaatctttcttgaacggaactaccactattcagcacctcagagccagtcttggctctgagttttgctatatttgggccgtataaagaaatctttctagggtaaacatcttctatttccctcttaaaagggtgcatttt

SEQ ID NO: 125461 - DNA, 1045 bp, Homo sapiens
agggaggagagcccagaacagatgactgaagaagatcgcatttgatgggtgagggggacccaactgctacagggggagttggcgtcaccagagaaaacagcactgggtacgtgaactgtggcggttcgatgacacttcaaaatataaacacctaaaataggttttatgaggcgttggcattcccaaaacactgaagtgtttaagtattttgggaattgtatttaattattgaacaatttaggcaagttagctattttcaaataggtaaaattagtttgtctctctggtagaacttgtcattcatttttagaatcttgagttttaaatgccagatagatccagctgctataaatatgctgcagatgtagctgtccagtcactcagacaggcaagagctgatgattgaggactaattttcagtctaacggcagaagcaggtgtcacaaggtaagtcagcttcaaggcttcattccctgatgtcaatgatgacttccttaggaatgtcactgcagatatgggtttgtttttgttttttggtaaatgaggaattttagatagtggtagctactgttcaccacacataacctttgtaacaagctagaatatacattaaaaattcacaaagtatgcagctttgtattttgagataactttcttttctttttctttttttttttttttttttgagatggagtcttattctgttgcccaggctggagtgcagtggcacgatctcagctcactgcaacctctgcctccaggttcaagcgattctcctgcctcagcctcccaagtagctgggattacaggcatgtgccaccatgcccggctgatttttgtatttttagtagaggtggggtttcaccatgttggccaggctgatcctgaactcctgacctcaagtgatcctcctaccttggcctcccaaagtgctgggattataggcatgagccactgcgcctggctttgaggtaacttttcaatgccctattatttgacttttattccttaagagaaggatgtttttgttgttgttgttgttgtt

SEQ ID NO: 125462 - DNA, 1388 bp, Homo sapiens
cttcatgatgaatttaaaatgtgtgccacgcctttcccatacatttgtcaggcagcctctctgtgtatcactgggtttttagaaagccaagccataggattattcactgtcagtgcaggactagtacacagggcaggccctgatggtaatttgagtatgacaacagctgtatcactccttacaggactgcaagtgtcttaggagaaaagcatttccccggccacctgccgcctgctgcgtgggtgctgtgattagtcacaatgtgcattgtgctgggtgtgttttgtagttttgttgttcctgtaattgacagttatctccaaactgaaatcgtctggaaaagcagatgctacacgttgggggattttaattttcctgttctctagatgattggtgtcattttcatactgtaaaaaagtgtgctgttatttttgcttttggtagaagggcacatggtggggctggtctatcactgcctggatttggaggcttgagtcaagaacctgtctaggccaggtgccgtggctcacgcctgtaatcccagcactttgggaggctgaggtgggtagatcacctgaggtcaggagttcgagaccagcctggccaacatggtgaaaccccgactctaataaaaatacaaaattagctgggcgtggtggcacacgcctgtaatcccagctacttgggaggatgaggcaggagaattacttagaacatgggaggcagaggttgcagtgagccgagatcgcgccattgcactccagcctggcgacagagtgagactgtgtctcaaaaaaaaaaaaaaaaaaagatcctgtctaaatatagcatgcttgtctccccaggcagctgggaggaggggcctgcatgatcatagatgagggtgccttgtccacctggctctgggctctcactgagcatgctcttccttgggacggcttctcaattcagctaatctccagattagattcaccctgtttggtgtgcatgtgtgtgggagtctctgtgaatgtggagcttctaaatttatttatcatttgatacgggtattgcgttctagtatttgcagagctggcactcaaggctggccactatgtttttagttcagagatatgattcagagagatgattgtagttgagacgtccctaggggcccgctgttgatttgttgtgtctctctgctgtacttcacgcaggcacagagaagagatcagtaaataacgaaatgaatctgccctatgatgttgacagatatgtcctctcttacttgctagttcctcagaggcagcttgggaatattgttgggtggtcagaaagtatttagagagtctgggctacaagtgacatgacttgtctgtccatctgctgtgcctcttgagtgttcttac

SEQ ID NO: 125463 - DNA, 1005 bp, Homo sapiens
gttccccgctgtgcccctcagtctttcttcgctgcctcgcgatggcttgctggctctaacagggatttctgctttccttgctctggcgctccatgcagctagccgttcatctgtttattcagtcataccccaagggttgtgagcccctggcaggaatgggcactgtgcaaggtgctggagacctaaagaagacgtggcctttgctcttggggaggatggtgaggggcagaggcagattccatgcagtacagtgtggtgttgctatggcagacaccagccggagggaagggcacacacctggggaggcaccctgcttcagggagtggcactggagttcctacctgaggtcaaggtgttcacatggagaggggagtatgcatggtgccagaaagggtgctggcccaggtgtctgggggaagtgggatttagcatattagtattcagggttattatttgagcagtttaatcttcctgaaactcacaaggaggggccgaggctgaggttgtgtgggaagctggagagaaagtcagggcagtagggagcccaggaaggcttaagcagggtggggcgagcctaaatttgaatttagaaagatagcacacatctttcacgcaccctttgttctgatatctgtgtttatttaggggtaaactaacttctgattaagacaagatttaaaggaaggctgagcacaaatcattttacaatgtagacaagctttttccaagccagcaatctgagttgtgacattgcaggtttcacattatctctgctggaaaggaccctggtgatcacccggccaggcattctagtttgcctgttccttcagaatccatgttccccaatgattagcagtcagatttcaaaataatgcaaattagatgtgctgatggcacacattgtcctctggtaaccagtagcacataatttatgccactggcattgtgacttgcccattctattgagtctctgtgattggtgtatgcatttgattgtgtttgctc

SEQ ID NO: 125464 - DNA, 1496 bp, Homo sapiens
actggtctgcagtaagatgagtgcaccactaggagtgagcatctgcagactttcatagcagcttaatgttgttgcgatatttaagtgcatggtcattgatggtgcctcaagtagggtacagatgacctgtcttgtggagtcatgggtcacctgtgacatggagagcttttcctgtattatgttcctcatccccctagtagacctgtacataggtgctgttactgtcactttcttgaagaggaggacactgagtgtcagagaggttgagcagcttgctcaggatgacagcccacccctatagccatgaagcctggcagcggcctctccctcagcaccatttcagctcttcatgtttcattgttctcagagcaggactgccagcctcttcctgggcccagggctgcagcacccttcctccttagagagcgccaactgggtttgaggagtgccagcatgctatgggtcagtccccctgaaacctggactcatatgctagggattattaaccattcagtccctttgaaacttgtgacttttgggaagaaagagagacagataggagaagataggtaaaatttggatgtccatagtctccattgatttaccttcttttctgttctagcaaatcgaagcaaaggatttgcacaagttctttggaatataatactttctaaacagccagtgctgcacctcctgggcagacaggcagtggacaccgctgtgtgtgactgttgctggctcacgcattcgttagtgtcttaaggatgtccagccctggaggagtgtgtgtgtgtgtgtgtgtgtatgtatgtgtgctcatagacttggaacgttgtgtggctcatctttgggaggtgtgctgtgcagcctgtctggcctaagggcagaaagatatgaggtgcccaccggcaacacctccccttggctttcctggcctatgccattcatgggtgaggaaagctgttcagatgttgcctccctgactccatgaagattgattgtgctggggagagtctgagtggagagtatcttggggtagaggaggaagaggagagctgagatatgagaaagggcttatgtgctcggacaagtggatttgacctcagagcttcgatgtcatctgtgctcagacaaaggcactgtaggcttgtttacagttttggatggtacagtatcatgttagtggtgcagttgttgttattaactcctgaggtaggatgagactcatgcagcatgtgaagtgacagggtcaacagtgaaaatttacacatttgcaccattttgcagctttcggagtcccaacatctgtgtattcatttgacatgacatgctcatgagcctggtgggcaagcatttctttccctacttttcagatggtgaatgagccatgagctaagtaagagcaatggagtggcctgccttgctcacatctgctttgttgctggggtgggggatgccctgtggccccagcccatgtgttaggaggtcagagctca

SEQ ID NO: 125465 - DNA, 1724 bp, Homo sapiens
cccctgaaagctttgtcacttcgagggactgtttagcctcctcatccctcatgactaaggcggagatgactggattgcagggttttatgagatgattagagaccaggagtaacagcatcagtggagggcctgtcacaggacagttcctattttttttttccaattatttttcattataaaatattgttattttcccattattgtttttctgccagtattccatcattctggtccaagaacatataatagatgtgaaactctgtcctgacacctgtttttacaaagacttgcactgcctttccagtaggaaatattactgctaccatttgttttcttatggtagaaatgcggccaatgccaccttgataggaaactaatgattctaatgatcagaagggatctgttggtttagaacagaaaaatagcactagaaatacaatacaaatcatagcttgtattcacaaattgtttttcagtggatgttgtaaacacaggtttgtaccaggaccaggtgggtcacaccgatgaggaagtcatgggctggacagggtgggttggggactgtggggagaatgaatggtgactcccatcccactggaagagctttgttagaaggctggacctgcctgtgacctctgcctccccacttctaaatagaggtcattgtgttttgccctttgttttgctctcctagcagttcttggatgttgtgagggcgagaccacgattcctccatcatgcaggtgtggctgcctctctcacaccatcactttccaagctgaccttggtgctggcgacaacatgggactggattctggtctcctgactgttggaccagtgagtggttttgggggagcattagtgtctggggacttcctctgaacttcaaggtgccgccagcgttattccatgataccctttacccattaaaaataatataaaaataaatgtctgagtttagtgttggtgtgcatgcagtcagcagcctgtcccatatgttctgtcggcggctctgcagaccactcagagaaaaataacagcattgggtgaccacctttaaaaatgatgtttggatattggataaaatactcagccagtctgtagacccactgggaaaagtataaggaaaggatccatacagaacggatcagtatacatttgtaccttccctgtttggagttgggtcagcagataagctgaattttgatacatgtctgtgtttgtcacatgtaacatctaagagcttggtaaaatccctctcccaggcacattaacttcatataaataaataggtgctcatgaacaccagttgctttgacacacttccttgtggaatgagtctgtttttgctagaggaaagtaatgacaagtgatgcctctgtttctgtggctccctccatccgggagggctggggatgtcaccctgtcacctctcacctccagtggccgtctctgcatgcatggtcaagtcaggtgcgcacagagaccggattgctggttttgtatttttgtttgtttgtagagatgggttttgctggtcttgagctcctgagtcaggcaatctggccgccttggcctcccagagggctgggattacaggtgtgagccaccacgcccggcccgggattgttgattttggatgatgggctttcctgtccacattcgattaggttttgtgtccccagattttataaaagggtataaagcatttgtgtctatctctg

SEQ ID NO: 125466 - DNA, 1021 bp, Homo sapiens
gcaattcttctgcctcagcctcctgagtagctgggattacaggcacgtgtcaccacggctggccaattttttttgtattttagtagagacgggtcttcaccatgttggccgggctggtctcgaactcctgacctcaagtgatccaccgccttggcctcccaaagggctgggattacaggcatgagccaccacgcccagccatcatcgagtacaatgttttaagcgcatacctggtacctggtttaggggctttttagtgctgtgaatgagctggtgttcttggctctcctggggcctatgcaagcagaatgtccctcaatctattttttgtttttaacttagttttagtcactttcacaaaagtaatttatcctccttatgatgtttcacttacctgtgcagaatcctccttctgttagaactgattgttctaaatgacatgcaccaagttggaagattataccttttgtctctttattttaactgttgatctgtggaaaatattgctttgtagatgaggtatctagacagcaacctcagaggaaaattatatgttagaaatgttttcttgatgtttacttttcattttctgagttaaaaattatatagtattcttacagtcagggataagactggctgcagagcctgatgggaagtaaagcatggcttgtgtttacgctgggctggctttcatgatttacccatgtgcctaggaaggggatgcacttcatttgtgtaacattttttacttagggcggtgtttttataatgctaaatatttattgtcatgaaaaggtgttcttgtttattttaaacaagtgaaagtgacatataattgaaacagattttccacaaggctcagcttatgtccctctttgttgtgtcacagtgacatagggactggcccttgtattacctagtggtgctggcatttggaggggcgggggctatgctctggggagcacggctggtttgcagctctctggtaacttcttggtgagggtgtcaacctacagaacgt

SEQ ID NO: 125467 - DNA, 3140 bp, Homo sapiens
atggtgcgatctcagctcactgcaacctccacttcctcggttcaagcgattctcctgcctcagcctccggagtagctgggatttacaggtgtgcaccaccacacccagctaatttttgtatttttttttttttaatagagacgaggtttcaccatgttggccaggctggtcttgaactcctaaccttgtgatccgcccgccttggcctcccaaagtgctgggattacaggtgtgagccactgcccccggctgaggtcctgtatttattatatggtgttttcgtacattccttcattctctccccatccacatttaattatgaaggttttatgcgttggttaattttaattgtgtggttttttttttcagttaccttatactatagctgaaaaaaagttggtatttcatgacccactgaaagcttttacatatcttcatctttgtactttttctttatttaaaatactgtagttattggtttatattactacatagagatgtattgataatatgcctttttacacttttatgattttcatttatttgagttgtaaattttagtttccatctcccccattttatactttgctttctcgcttccaccttgtcacttgagtgtttctggatttttcagggccactccctggctttctgcttctgaattgatgggaagcctacgtcacttttctttcagggttccataattccttatttttcatctgtctcttgctggaatagaattaaaacttttttcctcttgtatactttatatgattctagttgcttcttgcaaagctaaggatggtcaatactttcaagacctagtgctatttattctagactagagtttgctgtctcctctggtgcgacaatagacaatgggtttccaacagtgtgtgtattttctgctgcctatctcagggccatccctgtgcttctgagccagcccctccagagaaggatggctttccccagcagggagaaaccctgtggcctcttggggtgttagcacgcttccctctgctctcctcatcaggtggcgagctgctccctgccagggcattgtcttctataggccaagtccaattagagtaatcccccagctaaaaacatttctattaaaaaagagaaaaagctttttaagcaactgccagagtatatttttcttggatacatttggttagacagattcccagaccacaaatacttttgtacaaatacttttgtagatccagttcccacctgcaccacaccaagtgatgcctgtaaaaaggacatcaattgatttagagaaaccaataaagtccttatcccttaaaaaaaaaaaaaatacaaccggccgggctcagtggcttacgcctgtaatcccagcactttgggaggccgaggtgggttgatcacgaggtcaagagatcgagaccatcctggccaagatggtgaaaccccatctctactaaaaatacaaaaattagctgggctggtggcacatgcctgtagtcccagctacttgggaggctgaggcaggagaatcgcttgaaccgggaggcagaggttacagtgagccgagattgtgccactgcactccacctgatgacagaaagagactctgtctcaaaaaaaccaaaccaaacaaaacaaaaacaaccctccaaagataaaccaggtaagtcacgcgtcctggctggtcgatcccatctcttgtcttccaggtgctcctctagcattcactgcccaagaacctgaatccccatggggagccattgccttagagatgctcccacctctctccagacagaggctgccgagggccagacagggcatccttccctgattcagaatgccctctgcttatttgttaatcctattgactttcttctatcaaaggcagacagcgggaggattagtggaaagaaaattgtctcaggaacaagaagctttggaccctggtgccagttgtccaaggtgaaattgctccttctccacgcagcctgcaggcccatcctgatggggcctctccagactttttcagcccagggctgtctgatgatgcttctgccaggtgccagtgttctctgccagtgctgccagacacaggtgcttctgaacacttgactggtgattattgcaactgggagctgagtctttcaccttttaaaattttaatccatttaaacttacatagctgtgtgcggctagttccagtggacagcgaggctccagcctttggatttgccactctttgtttgccaccgcagcttcccaggcctcacctggggtctcaggctttctctctcaccttggcctggagagctttcttgcccctttctcagaatgcctgttgtttaagctgcagctggggctcccccaggaggccttctgagagtatccctctcacaccccacgccctcccctgtccgaaaacctcctatgggattatgattgtccctttacttgcccctctgacccactgaattctgagcagctccttggagccaggactattactttgtaagcttttgtgtcattggtttgtggcctgtgatgcacagaacaacccctgcttccttcttgctggtggagggagttagataacatgatcttaagactcatgtgagctctaaaatcatatgattcagtgttcccagaatattctagagtcctctttcaaaaaaactgtttcttaaattgctgcttaaatcttgtttttgccagcctgtatgagaacagaccgatcaactggcactaacatatttggaactgatgtgcttggactcagcttgccagccatgcagcctagttcggtgcagatttgggaggtgttaagaggtcttattttgaggaacataaagtgacagtggcttaaagaggagataattctctctcctatctaaaagcccacctcgggagtcctgggctggtgttggggtgcagcgttcccagagacctgctgatttttatttggtgctcagctgtggctggtgtgcagtctccatctgttccagcctggcctgaggagggggagatgcaccccgtcctttcgtgctccacctgccagccatacaagtccctttgctcatgtccccttggcccaaccataatcacatcgtccttaaaagggcagcttggaggcaggggggatc

SEQ ID NO: 125468 - DNA, 3165 bp, Homo sapiens
gggggcttccctgggctcggacgcccgcgtccgcaccgcgcgctcccgggcagggcgccctctctgccgccccagcgggtgctggtggtagtggtggagcaggtggtgcggtgctggtgttgggtgctggtgttgggtggtggtgcgtgctgtgtactttgggcacccgggtcgttgcccaggtaaccgtgtcgggccggggccggagcgcacttttcgcgcggggtggtttgtatgcaggcgtccttatgggggtccccgccagcacagcccccactcagctccgagctttcctcaggccccccaagtgtttgccgtaggggtggagcggggagcgaggggacgcccggcctttgactccggcctcttccctgcgggcttgcccctggccggttcccatcaagtcttccctctcccggcctcggcggcagccccaggatcggctctcccggcagcgtggaggggagggctccccggcttcgcagccgcccgggccccgcgttctcggaaggtgttcggattgcccggagggtttcatggcagcagctctccctccctgcctttattccagggtctcccctggcagtggaaggggcgtcctagtggggccaggcctgaggcgcagacatccgtagcggacccgcgagtctggcggcccatccctgtcttcgcgattccgcttttgcccaaacctctcccggtttctgtttgctatccccacaccttgcgtgcagggattacacgtcacattcaggatttgactctcagaaagagtaatttccctcaaacaggacgagcagccctgctcattattcagaccccgagccaggtgcgccgtgctcatcccggccagcggtgcaggctgggccgcggggtagcgcgcagtcccggtggactttgtagttttcagcgcggcgcgccggggaccttcgaactcgctcgctcgcctggagcaaatgtgtatgagtcttgcaaatggaatgagggttggggtgagccctgcacctgcttactgaatgggcccactttctgctatggcaactggacttgaaggaggcagctttggggacaacaaatctttttttctgttacagttgtgtcccactgactcaccctgcccatgtgcccataggcgggcgtgttgcccaagtgtgtaaaagactttcagtcgggctctttttaaaattttaaagttttcctttaatgccaggaaaaggtgagccaggttagcaaatcaaataatcctgaagctgaggaatgttaaaaagaagttttctttctctctctctttttttttttttgcagtgcacttactggtggttatataattctctttgaacaaacaaattccccagaaagaaagtaaatgtgggaaatcctttttcatggtaataggcatcccaaaataacagggaaatgtgaaacagaggtatctttaaatctgtggctttcatagcctattaaatgagcctatttaaggacactgaattattttgtcactatcaccttataaataaatatgaagacagagagaacatttaaaaggccggcaaaactgtatccaaagagtatctgtaagatccttgaagggagtctaatgatagaagtgaaaggacttaccctaagagcgtggcactcttttcagcctggtactgtgtggcaagaggtagtcgagggctggccttctcagggcttcccagagctctgattggctttcatatttgaattgcaaagtaaaactaaggatttttgctatggaaaacatgaaattattcctgatgcattcagttctttccctcactcatatccagtgtctaatttacttgtccgaacatctttgtccaagaaatgtagacatattatttttaacttctattgttctcactttgtcatttgttaatactttcagtgaagaagcatcaagaaaatgttaatatccttatattttttcagacaagaattacgtgtttaataagcaattttgtgttcaaatctgaggagataaatggtgttaggtcttcgaatattttatataatttaggtgtatgcttgctaattataaaggttagatattgctgtgaaatttgtggctttagtacattattggtggcaggcagattctgttggctcttcactgagattactcctctgttccctgagattaaggcagtgtttgcagtgtgcttgagggaaatttgttttccatctgattctgcaaccgtttattataaaatcaaactttcagtaagcctctgtcttcccacatgataacaaactgatgtggtgaagctgttgctgttgctgaaactaccactcctccttgtgttgtatagaaacaagctagactgggtgcagtgaattaacgagatttcaccctgtggcctacaaacgctcttctagaagattactgaagggagataggttggtgaatgtaaactcactgactctgtgtctggctaaattattaacaggtagttattagttatctttgtgaaaaacacaaatatacgtttttacttggattgaaattgtatgttttttactaggaatttcattaaaacagtgatgtatgacttccttgactcctggggaaagtgttcttttaggaaagaggctgtgtgcaaaaactaacaagtcagacttgatgtgacttttagggagttttagagctcagttgaagtataagaattgacagaatactcagaacacaagtaaaggcaaattgccttttggtgaggttttgaagtatatttaactctctactttatctgtttactttgcgtttgtctgaatatttataggagccatcccagtagtcggctgttacagaacacagggctaaatttcccattggaccctctgttaataaaggacagaagaaggcttgctgtttggcaggaccatgcttaattttttttttcctatggaggaaagacatgtttctgtagaatacagtaatctccaatgacatgaaatgtcaaaacagctggtgcatttgatcaatggctgtattcaagcagtttgctcatgtaaaaatcagtggaagttttgctaatcagtttcgtcaaaatgtggacttcatgtacacatagctgttattcatttctttgcataaatttatatttatttaatcaagttattagaaccaaaagaaattttaaaaaa

SEQ ID NO: 125469 - DNA, 1033 bp, Homo sapiens
gttgctgttcctttgttttcagtgaaatgtttttttcagatgacaaaacacagtgggagtccacagaagggacagcttgtggagaggtggcagagaagatatttgagtaaaaataaaagcttaagactttatgaaagcttgtaaaaacttggggttttaaaataaatagcaagcacaggaagttttgaacatctcagcatagctaaatttaaatgctctaattcatggcaagttagagtctggaatacattttaaattctgtgcctagtctcacaccattctgaggaaagtattgacccatgtttgcctaaaatcacgtgctgacactgcagaacagtgcccagtgttcacacaaaactggtctttgtctcttaaccccatttcctgtactggtgtgtgaagtgtatcaactgcaatacacctttctttctctctaccttgtctacccatgtcatgggattgtaccggcccattttgttcactgtcccactatcccatcctactcaacctgtgcagggtggcccctgaatgcctttgaacactatcattgcatctctgaacttggacctttttggtcacaatgaattatttattcaattaagtgctttctattggttgttgatattttcctttgctattttgctggcaagtagttttctttctgtggcacgtttatcatattttagaatcactgctatatttaatttgtagaatgtcataggaagctttgctttgtgtatgttcaaggtctttgtttcttaatttgaagtttgaaatagcttacttaccaaggtaaaactacatcttcataattatttgaaaacactaccacaattttaaaatgtattttagatttaggctttttaatatcttaccatataaatagcacttctcataattaatcttcaatttatttcatattttaacttctcaaggaacagtttcacatttcttatatctgtttctttatggttattattttttatcaagttcattatgtcttatctatttgataaaattttaagggatctat

SEQ ID NO: 125470 - DNA, 1051 bp, Homo sapiens
tttggatttgtaaaactcacattgttgagttatacctgtgatgggctgaaagtttttgattctttcctgttcttcatatgccagtaccataaacaaaaagtatctcagatctgtcactttcttctcctaaaccaatgtgattgcagctttttgccttcagccttttccctatccaatatctcctacatagttaccttttgatcctaaggaactgtttcgattgggtcacttccttgcctaaaattccattgattgttcattgttaattctaaaatagagttcaaatttaaaggcatgtaagttcccctataatggatttcctctactcccccttccgctgtaatctcccatttttttactgaaatgcttcagttagcatgagtctttagaggtcttgatttacaattttcctgaagcaggaataccttgctttcctctactagtttaccacaattacagctctcttttaagcctcagaaaaaaatctcacttccatcttgaagtcttaatccatgctttttatatccatgtgcctactccttctctgaaatctcctatggtttatctttttattcatttaatatcccacgaattgattttattatatattttttatggttgcatgtggtctttctagttatagcaatatacacatacatgcataaatacatatacacctatgtaaatgtgtgttgggagtatgtattcacacacatacatataccccaaggccatgtgtcatctttatcaatatttaagttttggaattgttttgtttgcctcctatatcatagaataaatggtaaagagggctaatttattactctaagtgtatttcttattatattaatatcagacattatatagaatgtactttgttttactcactatttgtaagatacaaaggtatataaactgacttatacatcagcttgaaacctgagataatgctaaaatgttctaagtattttaaatgtttaaagaggacaatcatgtaatgttgctaaacatgaaaaatgtcatcaagtggaataaagaatagctgaagtta

SEQ ID NO: 125471 - DNA, 1036 bp, Homo sapiens
taatccccaccctttgggaggcagaggtgggtggatcatggcgtcaggagttcgagaccagcctggccaagatggtgaaaccgcatctctactaaaaatacaaaaattagccagatacagtggcgggcgcctataatcccagctagtcaggaggctgaggcaggcgaatcgcttgaacctgggaggcagaggttgcagtgagccaagatcgtgccactgcactctagcccggaccacagagcaagactccatctcaaaaaaaaaaaaagtacggtgaaaatttggtcatctctaagcctaaggagaccatatagtcacatttatagctattagctgcttaaaggccaaaattgtatgtgcatatatatgcaagtgcgtgtatacttgtgtatgtttacatatatgtatatatagatagacatttacatacatgcacctatatacgtgtatattttaaacacggtagaaattctgaaatgtagacttggtgctggcaaatgtgtgttatgttgttggttaagatgattctgaacattaatattttttgacataattgtaaattcctattatagcatacatttaggctgattattttgatgacttacttggttcttgacacatgagcggataaggtattacatacatattttgtatgtatacatgcaaatgaaatgagggctgaccaagaattctggtgatagagcagagtaaccttcacaagcaacagttgcatttcttaagtaggaaagaataagtatatttttcttattcaccctactcctagcatatatgagagctatatactgtgaaacagtattaaacttcaccatgcatgaatcacctgaaggaatttcttaaacattttctgtttgttaagtacctgtagcaaaacatactaatgcccttcctgtggcagttccccagtttctcttctttgcaagcaaagtcatctcgtttttcttcaggttgtgtaccacgtgtatgggtacgtgaacaacacgtttttgttcacttgtttttaacatcatgtaattgg

SEQ ID NO: 125472 - DNA, 1051 bp, Homo sapiens
tgtctgccttgggtcatactcaggtccgtcttttcatattagattatgagttgtgaggcaggcctgccttgttatttatattgtatgtctctcctatagagtctggtccagagcccccttgtatccgttaaaagcactgaataagtgtttgttgaattaagtgaacaacttcaggttcttgtctttttaatggtgatggtggcaataataatagttaacattcattgagaactttccatgactgtgtgtcaactcatttaatcttcatgaggaaacaggcatggggaggctaagtaatctactcagattgcatggctagtgatagagcaacacgggaaatctttcagaagctagttacttagaaaacttttcttctagttaaaaaaaatggtttcaatgtttaagaagttaaaaaatctatctttagatattttttaccttaacatgaaggccaattaaaacattttgtgagagacactacagaaaacttactcttttctcatgttatgccaggacagctgtaaaactgaaaggaatcttgctttccctgcttgaaagaggataatcattgtttaaatcattttgagatggtagcaagggaaataactcattgggttgaattatcagttttttcttaagatttttttcttcttttttttctaagtatagcaatcaaaattaatattcacagtattagaatttaaaataggcacttgctggccttttagttatagcaatactatttaatagcataagcatttaaaatgctaaacattaaagtatatgctcaggggtattttatataataattttctcttttttttgagatggagtcttgctctgtttcccaggctggagtgcagtggtgcaatcttagcttattgcagcctccgcctcccaggttcaagtgattctcctgcctcagcctcctgagtagctgggactacagttgcaccccaccatgcctggctaattttttttgtatttttagtagagacggggtttcaccatgttggccagggtggtctcgaactcctgacctcaggtgatc

SEQ ID NO: 125473 - DNA, 1133 bp, Homo sapiens
agatgatagtcaaaatcacattaaaattcaaaactcacttgtaaataacacccaaggagatgaagaaaatggattttctgatagaacctcaaaaaaatcacggggaatggaggccttcaaaatacaaatataagtctaaaatcatgtttagtaaagccaagtcatactataggagaacacattcagatgcaagtgatgatgaggctttcaccacttctaaaacaaaaagaaaaggaagacatcgtggaagtgaagaagatccacttctttctcctgttgaaacttggaaaggttaggtattggtaatcctgcaatcacttctgaccaggagttagatgataagaagatggagaagaaaacccgcaaagtgaaaggagataaaaagcagaaaaagaaaactaagaccttcaatccaccaacatgtagaaattgggaaagtaattactttgggatgcccctccaggatctggttacagctgagaagcccataccagtatttgttgagaaatgtgtggaatttattgaagatacagggttatgtactgaaggactctaccgtgttagcaggaacgaaactgaccaagacaatattcaaaagcagtttgatcaagatcataatatcaatctagtgtcaatggaagtaacagtaaatgctgtagctggagcccttaaagctttctttgcagatctgccagttcctttaataccatattctcttcatccagagctattggaaacagcaaaaatcccagataaaacagaatgtcttcatgccttgaaagaaattgctaagaaatttcatcctgtaaactatgatgtattcagatacatgataacacatctgaacagggttagtcagcaaaataaaatcaacctaatgacagcagacaacttaatccatctgtttttggccaaccttgatgagagctgattttgaaaatcaagagtttctgtctactactaagattcatcaatctgttgttgaaacattcattcaacagtgtcagtttttcttttacaatggagaaattgtagaaacgacaaacactgtggctcctccaccaccttcaaacccaggacagttggtggaaccaacggtactacttcagttgccgccaccattgcaacctcag

SEQ ID NO: 125474 - DNA, 1015 bp, Homo sapiens
cactctcttgcgtcataggccactgtgttggaggcaggagtgttggctttggaggcatagagattaaaattagagtaacacgtgagcactgaaaaggttaaacagtagagacatggaggactcccgacccccatgtacccctttcttaaccctttaattaagatcacagccctagaaatagcttgcaaaataattaactactgatcatttataccttagtgcttctgtgagcatgttttctctttcattgctgctcatctgcatggaaaaatgtgcatgggtttctgaatataactccatggtgcttgcttccattatatttgtgccatttggatcataactgataagcaaccaaagagtcccatattactgcacgttcccatcgctattttatgtgaaggtggtcctgggggctgttctgaattctcagtttccttttttcccctccccagttctttgaaaatatcagaaacggacttgtggcatctttgaaaagctacttaaaatgtgctgctgtgctctgaacttgaaaatgtgcttttaatacaaagtttgtgcagcccttgctgctcatacgagatgaatcttaccatgtggtggatgcccgtctcatgccaggcactgtgctctaagcccattggtttatttcagtgcttgaaattggctttcgagagaggcaccacggttccctttttacaggagaggaaacaccagaggatcagagatggagagtctttctccacaaactcacagaccccaaaggcaagctcagggttgtcagcttccaaagtctgcctgctccaggacctcatgttgcatctccattctcttcactgagggtcaaatggaaagaacacatgggggtcaagtttcagaaaataagagaaatgaagaaatatgtgcccggaagcaagaacgaccgacctcattaaactggctcccttcacctcctctcacatctttttctgccttttggccaagttttctctcccccgcatttcctccttgatctcgt

SEQ ID NO: 125475 - DNA, 1050 bp, Homo sapiens
aattgagctgtgaccaacatgacagaatttcctgttttagggcttttataatatagatagtttatatctaatttcagaatatattcactggggaatggacttagcaaccactaccacaacaatgcaacaatgtgttttggaacaaatttaccaatctgaatttccccctagattaggtcacaggaacattgcagctgatgtacagctatgttcctcctgaaacttggagacacatcctcttgagctgggttataatgggccacccaaagctcgagttcctgtaatggatacactcaggcagcagaacctaccaccgtagtgaggacagcacccagagccctcagaggccatcacaagtgcaccacagctgccttctctggcacgctcagagctacacagtgtactctgggattggaactctttatttttttttcagttgatttgtaaataagattgcacaaaaatccatgcacatcaactctccaaatcagaatttgctgagctaaaaagagcattaaattagatgggctggctttcaaggggtgggggtgcaatagtggaactctgcacaacagttctttacaaagagacaagcaagcacatcgcgtggaaatttccattcaactggaaatgtccaagcctgtttacctcaattaattgtccttgttcacttgtccagcctagcaattgtccattagtaatttgttataaatgagacatttggtattaaagcatctctttgggatactggtatggtttattataacattctgttagtagtgttgtacaagcttgagatgtattaatacgaaatccaagctgcatgagggctttatttttcaagcctacaccttgctgaaattctgaattaaaatatgattctcagtacaaatgaataaatcaacagaaatggtaacgcatgtcaaatattcttaaaacccaagaaagccttgtaacttccttcaatctaatgggaaatgcaggcaaatacaagactgatgtccttgagttttattatcaagactcaagggcaccagtaaaatctagttt

SEQ ID NO: 125476 - DNA, 1088 bp, Homo sapiens
tgctcattaacagtatatcctgagatatttcctataccatttaatattttaaaagatgtttacactggccacagtagctcatacctataatcccaacactttagagggcaaggcaggaggatcacttgaggcttaaaaattagccaggtgtagtggcacatgcctgtagtcccagctactcaggaagctgaggctggaggatcacttgagcccaggagttcaaggctgcagtgagctataattgcaccattgcactccagcctaggtgacacagtgagaccctgtttctaaaataaataataaataaattaaaacatttaaaaatacatgatgtttaattattagaggactcaattttatatctatgtatacaataatttttaagtttcttaatattggacttttagtacctttttaaaaatactatttttaaaaaaatctgtatttctaactttttataacaaggaacctttggctttgagatgactggggaatccattctttcctatagtatccatgtccaatggacttaaagtattaatcaatgtgtttatgttttgttatttttctggcattacaaaaaattctaaatatattgttaccgcctgtataaatatcagcttttgagagaaggacattgtgtagaaataatgaaacactgcaacttgtatttgtattattcttttttttttttttttttttgagatggagtctcgccctgtcacccaggctggagtgcaatggtgcgatctctgctcactgcaagctccgcctcccaggttcacaccattctcctgcctcagcctcctgagtagctgggactacaggtgcccgccaccgcgccgggctaattttttgtatttttagtagagacggggtttcaccatggtctcgatctcctgacctcatgatctgcccgcctcagcctcccaatgcactgggattacaggcattatattattctttaaattcacatgagaatttagtatggcttcaaaaaataccataagttaaaatatcaccaagactctgttcagacaaaagtatcagaaaagtgagccaggcactcacatagtttatagtttata

SEQ ID NO: 125477 - DNA, 1057 bp, Homo sapiens
actggtgggtctgtccacactgcctagctgagccttggtggctgctcttagccaaacagctgaggcctttgcatccctggagaaatgtcatcacattacttaaggcaggcacacaaatccagaaacatctgtaaataccccttcaagcattcttttaaagacacttcttgactcattgggcagtatgacctgacatttgcccatgtttgcaagcaaataaataaaactaaagtcttccgcaagccattacaccaaaatattctattcgctgagttactcaatgaaataccgagttgccctatattttgaagcctgttaccagagagactgaatgtttttaaatgcatggcagtgagtaacaacataaggctaatagagtcaacatttctgctttgacttaaaccttttaaaccagtggatttatgtgaagtctctgcagtgtggcatttaaacatttcaatctaaataagagtgtgtaatttgattgatgctattattctaccagattcacgagtgcagtgggctctggaggtagcattacatgcatgggatgagcatttgcaaaagaaagttgtatagggaatatgacagagccaagttaatgtaaatattaatgcctttctgaactctaggccacagagttgatcttttttaacttccttggtttgggctaaggaagctgtgatccagagaagccacgtgatttgtctaaggtcacatagcagtctggcctaaaatagcttgatatgctgtggatggaaaataaatgtgatccctcaagaggcatgaggatttccaggcagtagccatacctccaaattgtttaatctggatttagattgttgggtagtcacatgcagcagcacagttaacagtgtgtcctcctgtggaagttgccagcacagccagccctctcacttgcatgcatgcccaccagccttctcacttgcatgcatgcccactgggtatgtgctgtactggagacgccgggggtaggggcccagtcccaaccccaaattctttaaagcctatttttctaagttgcatctggtttcct

SEQ ID NO: 125478 - DNA, 1023 bp, Homo sapiens
cttgatcttacagaagttgaaatgtttatatagttaaatccatccatttttccttttttttttaattctttgatttctgcaagttgtttgttgttttttgtgattctacttatgagttatagtctaaatagggtattatctcattaaaaaaagtaaccttataaaaaccaagatagactccaaccaatgatgcactgagatggtccaaggaaagtaacttctgtctgttatgtttgtacaacttagactttaaagtatttattgcaacattgtcccattcttgtgaagttaaagttatctcttcttttggatctcagatcattcataatttcataagacggatccagaccaaaattaaagatcttctgcagcaaatggaagaagggctgaagacagctgatccccatgactgctctgcttatactggctggacaggtgaggctgtggggtctaaatcactgatacattttattcttagattatgagatgtaagacttgactgaaattttcttctcttttaaaatggtaaagatttggccaggcacggtggctgacgcctgtaatcccagcacatttggaggccgaggcaggtggatcacctgagcttaggaattcgagaccagcttggccaacatggtgaaaccccgtttctactaaaaatataaaaattagccaggtgtggtgtcgggcacctgtaatcccagctacttgggaggctgaggcaggagaattgcttgaacctgggaagcggaggttgcagtgagccgagattgtgccactgcactccagcctgagccacagagtgagactccatctgaaaaaaataaaatggtaaagattttatatcttttttttttctttttttttttttgagacggagtctctgttgcctgggctagagtacagtgtctgttgcctgggctagagtacagtggtgcaatcacagctctctacagccttgacctcctgggctcaaaccatcctcttgcctcagcctcctgtgtagctgggaccacaggcaca

SEQ ID NO: 125479 - DNA, 1285 bp, Homo sapiens
ccccctggctgttggagctgtgatttatcacaaactcagaagtgactgtgagtcccaggaatgtgtcacaaagtgagttttagaactggaaacattttctcccaattcccagtggaagctcttgctgtagaaagatattcagaaaggaaactatttttccattcatccattgttgtaaacagatcactccaaaatgttaatcttgagcatagtggtgggatcatatgccctctttttatccaagcatgtgtgtgccttaattttgggaagaataaatatatttccttattttaaccatgtttcctaagcaattttttgttttcttcaatgcatgaaaattagcttacctgctttagattcaccataataactaaactgatgttaggttcaacccttaagtaactgattagatatgctaatgatggaacaattagggaatgtaagcttttattgcacctattggtttacgttcttccttgaagaagcagaaatcacggttcattcctagggtctggtagagtatctggcacgtgctagtcagttaatgtttgttgaaagataggatgacgctgggtatagtggcatgtgcttgtagttccattaacttgggaggctgaggcaggaggatcacttgagctcaggagttcaaggctgcggtgagccatcatcctgtcactgcacaccagccagggcaacagagcaagaccctgtctctaaagaaaaagaaagaaaaaaaaaaagacagaatgacagtctaattcccaagcattggtgacattgcagtccttttttttttttttctgagatggaatttcgctcttgttgcccaggctggagtgcaatggcgcgatctcagctcactgcaacgtccgcctcctgggttcaagggattctcctgcctcagcctccaaagtagctgggattacaagcatgtgccaccacacccagctagttttgcatttttagtagagacggggtttcaccatgttggtcaggctggtcttgaactcctgacctcaggtgatccacctacctcggcctcccaaagtgctgggattataggcgtgagccaccgtgcccggcctgcagtaccatttttatttaaattttaaatcactttcttttacttctggatttcaaaataaaattttatggtttaaaatagatgtaaaggtagaaattaacagaaagatgttttgtttttaattttgacattcaaaaggggactagtaaactggagacgtttttgttgtgttctggatttgggagtatttttaaaaataat

SEQ ID NO: 125480 - DNA, 1038 bp, Homo sapiens
gtgttagtgagaggtccttgagtaggaagggcaatccaaagactgttttgagaagtgctttcctcccctgcctcaccatccctttgtagaaatttacttacctgttagacatagaactgcatatttatgtttgcttactaaacattcatagagtgctccagggtaactgccaggcactgttctataaatgttacacgttatctcattaatcctgctagcaattacttttatcttcatttttgtttcaaatgggaagtgaacacttaacactgctgttaagtgtgagggcttaagatgctaacccaggcagtctggttccagtgtgtaccccacctcgatgctctgcttcctctgccgtctgcgcacacaggaacatgttaggaatttgcatgctctacatcgcgagggcagtggtggccctggaaagtgtattccccttagaaactcagtcacccttccttagaaagaccatgtgatttagcctacaaacggtggcactttgaagagtgaaataggatgttgttaagagctgtgcctggacagtgggcatcaccaggactctcctgagaaaccctggttgtgttcccctcctgaagcccaggtagggcttcagggaggaaccggcagcagctgacagcaccatccctctcctagggaggcttcttggaagctcattactggactgacctttcttttctattaactcagagtttcctgtgaattacatgcacagccagtgagggccctgattttatctccctctcccctgttgctctgtgccagctggttatgatccagggacccaggccacgaatgtggcagattctaagggtggctaagagtagggaacctcagaggcctttttggttcataaaatgctaaggttctatgcctttgttccgccagctggctgaagtgaggtcctgcaaacaatccttacaggaagagtgaaagtactaagctgtctcctagtagccctgctgaagttattctcagtggccttcacacagtaactccttagaaactaaaaggaaaaaa

SEQ ID NO: 125481 - DNA, 1051 bp, Homo sapiens
aagtgatttgcttaatttcaataatcagatttataatttctgtgaagatattgatcacttaattctcaatgtaaagattaaagatgtcatcttatttgtggataatccatgggggcaatagcaagaagtccctttttcaccataaaggaacccaagcgcttgggtaaggttcccatcatggcactgagcccatggtggattagagcagaggtgtagagtgattttaaggagactggattgcttgagcccaggagttcgagaccagcccaagcaacatagcaaggccccatctcaacaacaacaaaaacataataaaaaataaaaaattggctgtgcttagtggtgcaagcctgtagttccagctactcaggaggccggggcaggaggctccctcgagcccaagagttccagactgcagtcagctaagatcatgccactgtactccggcctgggtgacagagtgagtctctgtcttaaaaaaggagattggcttagtcactcacaggaaatcactcttggatttttttcccccttttgagatgttatcattcagtatatatgaagtttgcctccaggaagagaatgctcagccaagccaactcaagcatcttgtgccttgagagtgacatctttcactgtcattgttagtaggttgctatccttgtttatatgctgccagctcttttgaatgaattagagtgaatctgtcttcccaagtcttgtcacctgtgggaccctgatatgactgagacttcaggccagagcctgggcagtgtggtatggatttactgggtaatgcatggtgtgtcatctcctgatagaccttaaccatgtgtcttctggtgacctccctatgtcatttgaagccccttccttttcacctttgattctagaagactgcttttgaaaaaatgggcacattttaaaacatttttaggaattcagatgcatcactaaatattttttttttaagtggtgcaagtatgaaaggaaagggctctgagccaggcgcagtggctcacacctgtaatccaagcacttagggaggctg

SEQ ID NO: 125482 - DNA, 1026 bp, Homo sapiens
agacaagcctggccaacatagggaaatcttgtctctactaaaaatacaaaaattagccgagcatggtggcgggtgcctgtaatcccagctactcaggaggttgaggcaggaggatggctcgaacccaggaggtggaggttgcagtgagctgagattgtgtcactgcactccagcctgggtgacagaatgagactccgtctcaaataataataaagtaaataaaataacttttgatttgccttagataacttgataccagtttgataaaccattagtcttcattttaaacagcctgccctgagtatggtgaaggtttagtctaccgattctcgttagcgtatctaattcagtgtcttaaacaaacatcatctcattcttacagggctcgtgcaatccgcttcagacaggatggtaacgaagccgtcggaggattcttctctcagattgggcagctgtacatggtgcaccatctttggggtatctgtttttcccttttcgagttactgggatttaagagttcattactaagttgtactgggaagtagagcacatcttgagtcagtaaccttaaccactacagcaaatccgacgtcacagagggacagtctgtacggggctgtctggaactagcgaggtcaacagtgaaagtccatagattgatggcattagtgagctgaaagtgagtagggatgatggggaaaggaataaggggtaaagcaagcagccatggaagaaggaggccagggaagtcaagagtgccttccacagagtggtcccagcctttctttgtagactgactgcttacttcctcgacagaggcaggcctgcattttacccagagcagcagcttcctgcacatactcactgcctgcctttgtagacgtggttccactgtctcatgacattgaccccctcaccatttccatccccacacacttttgtttggcaccatctttggtatttttccaggcctgccccagatgtcacccttccccagtagtgaacatcatcactcctcctgagccc

SEQ ID NO: 125483 - DNA, 1050 bp, Homo sapiens
taagaatgggccaggcgtggtggctcacccctgtaattctagcactttgggagactgaggcgttttgatgatttgagcccaggagtttgacatctgactgggcacaaaaaaatacaaaaattagccaatgtggtagcacattcctgtagtcccagctattcagcaggctgaggtgggaggatcacttgagcctaggaggtcaaggccgtggtgaaacatcatcgtgccattgcgctccaggctggttgacagagtgaccttgtctcagaaaaaaaaaaaaaaaagactgaaagtttgcttttcccacgtggcctaatataattttgctcagaatttccccagcccagtatattacacacctgaagtagtccctgagaaaactagatgtccaggtgaagcaagactttaacggatgtatgggtggaatgcagtgtatgtgttttaagtcttacttctctgtgtggttatttttaagcttacagggatcttcagaccagggaagacatacggaatgcagcatggcacaaacatggctgggaggaattggtatattacacaggtaatctcttaacagccatgaaatatgctttttgtcttactgtttcaatcatgttctttcaccctgacactaataggtgggttttgtaatagtatgttgctaggatagtgagttatcaggttgtggggggaagggagatagtcaatttttctctaatacttacatgactttttttcaataaagtagaatatccatgctttcaaataggtatatcatctgttacagttttcagacccttggatgttgtaaattttacatcattacctgtttttgtagatttctatattctctgaaaacttattacacaaataaaatttttttctaagctttccttttccatcagaattgttagtatcccaaatcagaacttaatacatcaattaaagagtgattttgaaattagataaattaaacttcctgtatgtacagtatgtatctgggtacataatacatgcatgtgcacatacataagtatattatgaaaccctgtt

SEQ ID NO: 125484 - DNA, 1069 bp, Homo sapiens
cacttctccccaccctccagaaggggtccacgttgaattctgaatcatcttgaaaataagattccaaccacaaaaaaaatttagccatttctttactaaaaaaaaccaaaaaacaaatctgttttataatcacagatttttagacaaatttcttgtatcaggaagaaatacaaattttgtcatgtttctcaagcagtttttctgagtagtttctgaggaggaacaaattacaagtgtacccaataactgaaaatgttttaactcactctcatttgtaagcagtccacatagtagacaatgggttttccaagctgggcaaggtacatttaatcagtaaatcagtttcacatcatgtattgtgatgtttcaatgtgagacacaaaaacaatggcttgaaacttgtgtatcatatgtgattttgaaatgaacaccttgaatagcactaatttttatttgtggtatttttctataacaaaacaagtagctctaggaaaagaggttttattttgtaaacgatcatttgtgacctcagacactctctggctaatattttaataagctcacagcagataattctgagatcatgggtgaggggtggtgcatgttgagatttaaattggcataaagctgcatactttttgtctagctgtttgatttcattttttaatatagtatgccaattttgtgactgttaccatgtgaaagtcctgttgaaatgaacaattgtctgccccacaatcaagaatgtatgtgtaaagtgtgaataaatctcatatcaaatgtcaaacttttacatgtgaatgattttctcaaagaacatagaaaagtcaataaaatcctcttaatttccacatatcacgtttggattttcttttttaatttgttctgagattgacaaacattgctgtgaatgaccttgtcactcttgcaaaatagcttgtcacaaaagattgaaggaagtgaggaagtcagctggcttctggggaaaatccctccataggaacaaattacgaggccctgggcaaggtcatgcctggtatgtgctgagggcagcagaagccagtggcag

SEQ ID NO: 125485 - DNA, 1012 bp, Homo sapiens
aaaaaaaaaacaactatatatatatctaaaagaaaagaaagatggcttcaaggaggcacaggtatttgagctactcaggaggctgaggcaggagaatcacttgaacctgagtggtggaggttgcagtaagccaagatcgtaccactgccctccagcctgggcaacagagtaagactccacctaaaaaaaaaaaagaaagaaagaaagaagaaactggtgtagtgtgggaagtaaacaaaaagaaaaggaaaaaaaaatgaatctgtgagaacactcttatgtggcctgcactgactttgacacaaattagattggcttagtaggcaaggtgggatcttttcataattttatttgatgtctttaaatacatttatcttttttcttgtaggaggaaaattcttccagcgatggtctcccactcagagctgaggaagcttttctactcagcagatgctgtgtgttttgatgttgacagcacggtcatcagagaagaaggaatcgatgagctagccaaaatctgtggcgttgaggacgcggtgtcagaaatgtagggatagcatttattcactttatgaaatgataaagactttctaaagagtgactgttttggatgaagtgctagaccctggctatggaacatttgcactaggctttttctttcattccttagagctgaatttgacatattcattcatttatataaatatttatggcaaacaaacatggataagacatgttcttagcttgatcggggaatgacaaccgtcactaactaaagaagatggcctggggggcgaggtccaagtgtccagtggctttgtgtcatggttgaaagtgtgaccttagtggttccctggaaaggttcagagtctcttggtggatcctgggtcagatcccctctctccctcctgccctcccgccctgcagctggggacctccctctgcagtcccagtcccccagtcatgcaccatgtcattttctttttttttttttcgagacggagtctcattt

SEQ ID NO: 125486 - DNA, 1031 bp, Homo sapiens
tggcggcagcgcggagcagcttctgaaggtccgggagctcttttcctctgcaaagcggaggtgccacaggcaccgtgcacctctcagactgcaggggctgagcccccggaggaggagggggctggttcagggagcccctcccctggggcggggccaaatcgtcctcccagcccggctttgcagagcagacagatctggtgtctccagtttacagaagcacttgcagaactcatcagaagccaccccgcttatcagcagatctcaagagagcgttcggtggaggccctgggtctgcacagctcacctccctgggaactgctcgcccgagcgtcggagccggcgctggccccctgcagccggaaggttgcagccgcaggagccccggaggcccaggacacagggtaagtcccggcttgtgccttccctgcgcccaactttcagattttgccgactttccttttcctcttccaggcttcctctctgagtctacatttcttcttaatcgcgtaggcagatcatttcctaaaatctccaggctttcttttcattgatttattttttgggtagcttcacttgtctaatcttacagcagctgcctgttgccaaacagcatgaatgaatgatgcaatcctacacaggagcacccttagtgcaagattggaacaatccccaaactcagagttgaagtgtccgactttgtcttctttcccattagaattagaattttaaaataagtacttaccagatacattgttataacgatacagccttaagttgggaattaaataaatcatgctttcattcattaaatatatttattatattttcttttctttttttatttttatttatttttttttttttcagacagagtctcgttctgtcgcccaggctggagtgcagtggtgtgatctcggctcacttcaacctccgcctacagggttcaagggattctcctgcctcagcctcctgagtatctgggtacccaccatcatgcctaactaattttttaatttttgtatttttagtag

SEQ ID NO: 125487 - DNA, 2944 bp, Homo sapiens
aaaattacaaacctacaaaaataattataatgtgtgtgccctttaggagatacctggcttattctcactagagctctacacttgccataaagaggcaaggatgtacaattatgtgttactgttaactggtagctctgtcatcttgagtaaacttctactgagcctcaagcttcctcatctgtaaagtagagataacctgggaaataaattacacatgaagacgtttcaatcattataattgcatgtgcatgatagttaatcgaagtaatttgtagccaacatttgggtagctttttcaagtagatagcactcaaagaggcccttcctgcattttgtctgtggtatatttagactgcttcatattgttttaagtgattcattctttttctacttacagcaaattcaacacccaacagcttccttaatagcaaaggtagcaacagcccaggatgatataactggtgatggtacgacttctaatgtcctaatcattggagagctgctgaaacaggcggatctctacatttctgaagtatgcacaactcttgtttctgtaatttttttttgtatataggaagtgtctgatatttatacaaattgatgtgctgttaatagtagctgaggtcatacagtagaattagggggcttaaatctgggtctttatcctggtctaaaacaaattgtgaccttggacaggttatagaacctttcttggcctgaaaataattttgtaatcaagttgcattgcctatgtgatttgcatctgtctttagtgtagattaataattgagatctaaaaatggaatgtttaggactaggcatatttgttaggaaaaaggcaaccaaaagcttatatttggataaattccacttttttagccctgactagttccaaggttaaagcaaacctcagtgaatatgaatgtattgtcagaatttcctggagaaagagaacagtctttatttttattagtaaatgatgtgagttagtttgagattacctatagaaaggatagaatagtccaggcgcagtggctcacgcccataatcccagcactttgagaggccgaggtgggcggatcacctgaggttgggagttcgagaccagtctgaccaacatggagaaaccccgtgtctactaaaaatacaaaaattagccaggcgtggtggtgcatgcctgtaatcccagctacttgggaagctgaggcaggagaattgcttgaacccaggaggtggaggttgtggtgagtcgagattgtgccattgtactccagcctgggtaacaagtgcgaaactccatctcaaaaaaaatgaaagaaaataaagataggataatgctaccatctgtgagttgttgggacacagtgttggttttgaaatgattcagagtggtttgcacagtgaacacccaagtgtgctttatagttcccttggctttgaccctgtgctagagcattcattacctgttcatctgctctgcattgaaaggaatatttgtccttttaaatgtattcagaaagccagcacattatattacctcgtgttcaaaggtatgatgatccagaacactccttcaataattacctgaactttatcatgaactatggttgcacctaattgaagatgcaagtgttaatgtgtgtttattttagggccttcatcctagaataatcactgaaggatttgaagctgcaaaggaaaaggcccttcagtttttggaagaagtcaaagtaagcagagagatggacagggaaacacttatagatgtggccagaacatctcttcgtactaaagttcatgctgaacttgcagatgtcttaacagaggtatgtattaaattttgtctatgtctggtatagtatacctatatagaaaatctctgatagtagaaacatgaatatgattaccaatttcaattacaaggtgctgtgtaggttcatttttgtggcaatgatacctaatctgtgtctctaaaaatgaggaaattaaaataatagtatacctaaccaggttataaaagtaaaattgaagctttcattaaaaggtttataaagtggagatttttttattagaaagcttccagttaccagtatttttaataaaacgaggaatgttaatgttaattaatgttaatgtttgggaattatagatggagatttcagaaatgtaaatgacttcagctgttgccttttacatataatgtattctatttgctgatagaaaaagacttaaatcagtgtagaattgtaaaatgaaactgcctactttagccttctgaaaagcaacatgtttctgctgcaaattgaatttacttaacggttatgctcctccaattgcaggctgtagtggactccattttggccattaaaaagcaagatgaacctattgatctcttcatgattgagatcatggagatgaaacataaatctgaaactgatacaaggtaggtggtagaagactgtgaaatactaatgggcatggaggctcacacctgtaatcccagcactttgggaggctgtggtgggcaaatcacctcaggtcaggagttccagaccagcctggccaacatggggaaaccccgtctctattaaaattacaaaaattaaccaggcgtgccgggcatgactgtaatcccagctactcgggaggctgaggcagcagaatagcttgaacctgggaggcggaggttgcagtgagctgagaccacaccattgcactccagcctgggtgacaagagcgaaaccccgtcccattaaaaaaaaaacaaaaacaaaaaataaactgtgtttagaaatttaggggtgctttgtacaatatagatagttggctttttttttttttgagatggagtcttgctctgtcgcccagcctggagtgtacagtggcatgatctcggctcactgcaagctctgcctcccgggttcacaccattctcctgcctcag

SEQ ID NO: 125488 - DNA, 2918 bp, Homo sapiens
gacttcatctcaaaaaagaaaaatgtgactgcgtgaaatatcaataccttctcatttcagtgtttaatatattaaatacccatctgaaaatcaataaccataattttgtgtgtgtttaaacagcttaatcagagggcttgttttggaccacggagcacggcatcctgatatgaagaaaagggtggaggatgcatacatcctcacttgtaacgtgtcattagagtatgagaaaacgtaagtttatagccccttaacagtgaaatggagaagcttcgtattttaggcgagttacttttttgtgaaactttgtttcccactgtaaggacaataatgctcaaattggtttgggggagctataggaaacagtctctgaagatgcataaggggcaggattggagctcagtgaactgttaaatcttaggactaatccagtttcagaagctgctttcttaatgtttccctgctttctgtaacttttttttttcttaatagagaagtgaattctggctttttttacaagagtgcagaagagagagaaaaactcgtgaaagctgaaagaaaattcattgaagatagggttaaaaaaataatagaactgaaaaggaaagtctgtggcgattcagataaaggatttgttgttattaatcaaaaggtgagaatgaaaactcaatgtataaactaaatagtacgtatcatcctttttacttttaaggtgaaagatgttgaaattaatttttatttttgttacagggaattgaccccttttccttagatgctctttcaaaagaaggcatagttgctctgcgcagagctaaaaggagaaatatggagaggtatccgagtaatttgacttttactcattttgcaagtgaattgggattatttctttttccttatactttatttttgggtttttcaactgtatagttaattggcattaactatattcacattgtgcaccccgtcagcactgtccatctctaggacttttttcatcatcacaaactgaaactgtatacccattaaatagttactccccatttctccctcccccttgccccttgtaaacattattttactttttgtttctgaattcaatatacttttttccaaagagctccccacaataaaaagctttttttaaaaattttttattattattttttgagacagtcttgctctttcgtgcagtggcatgatcttggttcattgcgactaccacttcctgggttcataggattctcagcctcccgagtagttgggattacgggtgtctgccaccatgcccactgaattgctttgtgtttttttagtagagatggggttttgccatgttagctaggctggtctcaaactcctggcctcaagtgatccacccacctcaacctcccaaagtgttgggattacaggtgtgagccaccatgcctggctaataaagagctcttgtccaccttttagatttcatttgctaacttggggagagtggtttaaatggagggttaagagaaaagactagtttttagctggttgatggcaaatggaaaggcttaaagtacattttaaaatttaattttgtgtgtaattctgaaaaattccttcctaaaaattactggtcttatctttgaaattcactggtaacgttgcttatccatctcccttaaaatgctatttcaggctgactcttgcttgtggtggggtagccctgaattcttttgacgacctaagtcctgactgcttgggacatgcaggacttgtatatgagtatacattggtaagtgtatttttttcttaaaggtaatagaaccttttagctcgtgaattatttttgtttgtttgtttgaggtggggtctcactcctgcccgggctggagtgcagtggtgtgatcacagttcactacagcctcatcttcctgggttcaagtgatcctcccgcctcaggcttctgagcaggtgggaccacagacgtgtgtgctaccatgactggctaatttttttttttcttggtaatttttgtagaaacaggttcataattgtgttgcccaggctggtcttaaactcccgggctcaggctgtccttcaccctcagcctcccaaagtgctgagattacaggcatgagccaccgtgcctggttcatgaagtctttagcagaaaaattaattgaaattcaggatcagatttttgtttatatacattttgaaggtttatgtgtagtaatgggaagccattgatggggaaaatcacatttcttttatgtgatttttcaaaaggagataatttgctttaatgtgatcaagtttgttccttattaatatgctacttgtcattctctgtaagtccctcttctctcttcactctgcacaaatcctgtttttgaaaatcatattttttctacacatagggagaagagaagtttacctttattgagaaatgtaacaaccctcgttctgtcacattattgatcaaaggaccaaataagcacacactcactcagatcaaagatgcagtgagggacggcttgagggctgtcaaaaatgctattgatgatggtaagatcctcactgtatttcaattcttttatattgttttgctggtctgaaaggcatggccgaatactgtgtttttatcagtagtttacacagccagacaccatgcaaaagcagtcttccctttagaatgactgatggtatgctaaggtttttcatagcatatcattattaaaggtgaatacaaataaatgaactaatactgatctgttgaaagctgccagtggctagtgaagccattctggttgaaccattctcctatttggtatgttagtcacttgtattttgtcatagtaaatttgtaagaaattaatggctttcatatgtatattttgttattcataattagttctgcagttttcttagcatttttc

SEQ ID NO: 125489 - DNA, 2342 bp, Homo sapiens
gtctggtattctctgaagggaacataaatgttctgtctttatgcaatgagtttttttttttttttttttttgagacagttttgttcttgtttcccaggctggagtgtaatggtgcgatctcagctcactgcagcctcagcctctcgagtagctgggattacaggcacctgccaccacacccggccaggtttttttttatttttagtagagatggggtttcaccatgttggccaggctggtctcgaactcctgacctcaggtgatccaccttccacggcctcccaaagtcctgggattacaggcgtgagccactgcaccaggccgagattttctttttcttttttcttttttttttttttttttttttttttactatcagttattagttcctgttttctcaagaattaaatttgtttactttaggttcttgctcagaactctggttttgaccttcaggaaacattagttaaaattcaagcagaacattcagaatcaggtcagcttgtgggtgtggacctgaacacaggtaagagaatgcaactgttgtagagggaaaactagatgtaatacgtgtgagttgaagccaggaaagattaaaaatgttttgctttgcaatttgacaccagtgctgttagggaactctgggttctaaaatgggataaaataggatattaataaaaaatggaatgactaggtataattaagggacgagtagacatgagtaatttggggatacaattttggagatgttgagtggtggtagatggttcagattaatgttgaaggattttcatattgcatttgccttactcagtttttaatcaagtactatgataagaaaatagatgtggtgattatattcatgggtgaaaaccagctaaagatagcaattaatgccagaaaaggggatgtagaaatctagtgaaatggtgacagccctgatcttaggttcctgtaacaaaacaacacaaattaagtacaaagtaggagataacaggtacctccatgcagtatgtgcaagacctattgtcaacattaatagaaaaggtttctggaatgagggaaatgatcagtccattttagtcagattatagttgaagtgctatacttcagtatgagtaaacagaaatgtatccagaagaagagaggggtgttcaggacttctaagtataagtcagacattcatcaaatattgtggacgggggtcatggtttagagtagaaaattgggctaacagagaagctttgaattctcatagttaatactggaggaaatgagtcatcagtgataagcaaagctgcacacaatattgttggttcttactgactgaacttattttaagatttggttgccttttaggtgagccaatggtggcagcagaagtaggcgtatgggataactattgtgtaaagaaacagcttcttcactcctggtaagtttgggaaaatgaaaactaaactgttagagaatcatacttttttcatttggtgttctctgtttagttgctcctttcccccatgaataatgtgatcagctggaagtatggaaactgaactagccctctgatgtgtagaggggaagggggaaatttaattggatgtaatgtgtgcagcttggttggaagtgggaagttgagtcgaattagggctcctaatcatctgagccatcttatttttgtccccctttcagcactgtgattgccaccaacattctcttggttgatgagatcatgcgagctggaatgtcttctctgaaaggttgaattgaagcttcctctgtatctgaatcttgaagactgcaaagtgatcctgaggattacagctgtggaatttttgtccaagcttcaaataattttgaaagaaattttcccatatgaaaaaaggagagaacactggcatctgttgaaatttggaagttctgaaattatagtatttttaaaaattgcactgaagtgtatacacataaagcaggtcttttatccagtgaacaggatgttttgctttagcagcagtgacataaaattccatgttagataagcatatgttacttaccttgttattaaatatttcttgaaaagcaaattttaatggtttaattttatgtggacgtatgttaaattatccaactaccctattgttaagcatttggttttaaaatttttatgctaatataaatgctcaagtaatttaaaatattgaaagcatccctgttggtataaatttctgagtaaatgcattggatcagttggactttgaacgcctttgaaatggctttgctaaaatgctcccgccacaaagttgtaggaaatgggaagaggagtcaactagaggcaagggagttga

SEQ ID NO: 125490 - DNA, 1027 bp, Homo sapiens
tggtgaaaccctgtcactactaaaaatacaaaaattacctgggcgtggtggcagacgcctgtaatcccagctacttgggaggctgaggcaggagaatggcgtgaaaccgggaggcggagcttgcagtgagccgagatcacaccattgcactccagcctgggcgacagagtgagactccatctctaaataaatacacaaataaacaaacaaataaaataaaaaattaattaacctcacagaactaaacactgaagagagtgaattttactgtatgtgaattcgttgtattctaatttaaaagaaaatcactcaggcttcaggttaattccttggcaatcatgaacactctgtggtgtataacttacaggacagggatatctgaagtttcctggagcaggagaagatggggtgggcacagaacctcaccagctgaaccagctgaactatgtctttatagggattttgtcagggagaaaaagtatcggacagaagctgagatgtttggatggagctttgtctttgaggactttgtctctgatgagctgagaaacaaagccacccagccaatgaaggtgagagaacctggtcttgcagctgaggggataggagtgggacctggacagggaatcctgtgggacatgggttacctgggacacagtggagaatcagacctgagaggtggaggcagaggggaagcaagagaaactcaccatggagcgtcagatcagtacacactcccaggaagttaaccctgaacccaagttagctcttgcctaaatgtccaagtcaggataggatccaaggaacttgaatcaagagatcaccttggtgggccgagcgtggtgtctcatgcctataatctcagcactttgagaggctgaggtgagtggatcacctgaggtcaggagttcaagaccaacatggcgaaaccccgtctatactaaaaatacaaaaattagacaggcatggtggcacgctcctgtaatctgagctactcaggaggctgaggcatgagaatcgcttgaac

SEQ ID NO: 125491 - DNA, 2650 bp, Homo sapiens
ctggactcaagcaatcagcccgccttggcctcccagaatgctaggattacaggtgtgagccactgcacccggccgtgatattctcattgcttgtggacaggttttctctactgagctgttgtcaactgctaacatagaagttagtcactgtcttttctgctcttcagtgctgtctcttggggccactgtccctccccctactcttgcaagactccttttgtcccaaagccccttcttgtcccctttctcccaggactggcacaggctcaggacctgtcctcacaccaggcttctttccagaccatgctctccccagccctcatgctccctgatcatggccggccctgcggatgaggcaggcaagatgggtaagccctaggcctttttctcaggacgtgtctgtcctctctccccttctctgctggcaggatgggcaacactccagattcagcctcagacaacctcggtttccgctgtgctgcagacgcaggccggccgccaggggagctgtaagcagccgggtggtgacaaggagaaaagccttctagggtcactgtcattccctggccatgttgcaaacagcgcaattccaagctcgagagcttcagcctcaggaaagaacttccccttccctgtctcccatccctctgtggcaggcgcctctcaccagggcaggagaggactcagcctcctgtgttttggagaaggggcccaatgtgtgttgacgatggctgggggccaggtgtttctgttagaggccaagtattattgacacaggattgcaaacacacaaacaattggaacagagcactctgaaaggccattttttaagcattttaaaatctattctctccccctttctccctggatgattcaggaagctgacattgtttcctcaaggcagaattttcctggttctgttttctcagccagttgctgtggaaggagaatgctttctttgtggcctcatctgtggtttcgtgtccctctgaaggaaactagtttccactgtgtaacaggcagacatgtaactatttaaagcacagttcagtcctaaaagggtctgggagaaccagatgatgtactaggtgaagcattgcattgtgggaatcacaaagcaaatagtactccagaaagacaaatatcagaagcttcctattctttttttttttttttttttttttgagacagggtctttctctgttgcccaggctagagtgcactggtgatcacggctcactctagccttgaattcctgggcccaagcaattctcccacctcagcctcctgagtagctgggactacaagtgtgcaccaccatgcctggctaattttttgaatttttgtagtgatgggatctcgctctgttgcccagggtggtctcgaactcctggcctcaagcgatcctcccacctcgacctcccaaagtgctgggattacaggtgtgagccacctcgcctgggcccccttctccatatgcctccaaaaacatgtccctggagagtagcctgctcccacactgtcactggatgtcatggggccaataaaatctcctgcaattgtgtatctcagacatttgtgtctttgatcctcaccctgtgaccctaagggaagaaagcctgagtgtcagtaactctgggcctcccctaaagagaaatggagatggtggctcatctaggaagtagaggagcagggggttcctggttctcaggccacgtgtgatctctgcccacccagggcctgccccagcctgcaggtattgctgtgtggtgggaacacccacttcccttgtgcacagcctttgagaggggatcgtggcctcagttccaggggttcctggccagggccaagtgctccttctgcagaggcctgcacgcatctcacccctttgacttgtatttccatggcttcccctccccacctgccccctagccctccctgactggccagcccctcagtagtcctcctcggccagggagaggagcacggccttgggtgtgttctcgaaaagggctgcccggttctgctgctgccccttcttcacccagtggccatagattcggaaagcgtaggcgtcgatgagccggcgcagaggccggagggcataggggtctcggatgacgatctcccgggtcacaggcttcacccggcggtactggtagtagatccgcactgaagccagcacggtcagagcgatcacctgcagggccaggcggagaagctgggctgcagcccccgccctgccaggccctgcccctccagcacagggacgctctgggctcgtttgccacgaagccttgggtggcttctgcggggccttcctagtgtcccccacttcccacttggccagcatcctcagggaccgagccagtgggctgacacctgccgtctttgaagccatcacagggcagctgggaggggagggatgggtactctggaaattcacggggtgtaaggactcctgggagaggagggggcttagaggtttgcacttagggagctggcgggcctggatcaggacgcttagtaccttgaacttcccccgggggctgaagtgccgcacttcctccaccaagtactgctggaagaaggggtgtgccaaggcctcttccgctgtgtagcggttctggggttgcaccaccaggaatcg

SEQ ID NO: 125492 - DNA, 1075 bp, Homo sapiens
atttttgacgaaaccgatttctttcattcagttcatactacgcgtccacactgtgcctccaaaaatatttgcccttataactgaatgctcagaaaggctaagaaatctgcccaaggtcccctggcaatccagccagagatgtgagtcactcttaaggttggatttaatacaaatgtttgaaggacggagcgacaggccagctgccctagggaagcaaaatgctaagtgctctgatgcgaggaccggaggacaaggttcgcggatgaaccacaggaacttccgggttttaaagatcctggcgccaagttcagggcgttgaccgcgaaggacgaggcgtccccgtgacgtcctgctcttccaatgaacttcaggcctgcggagacgacggagaacggaagttctctgcctgtgtgctggttggttgcgcgttgaggccagccccgcctcccatcttccggtctcctcagaagtcgcttagctcttcggtggttgtcccacgtccggaggcctagccgtcgcttacctaggatgccgcgtggaagccgaagccgcacctcccgcatggcccctccggccaggtgagaccatcgcagggtttgagaccaaagcgcggccgtccggactctactggggcaatgacgcagagggaggccgcgggcgggggtgaactaaggtcggctgcggcgtgggctcgcctctgccaggcgggggtagattgaacgtaaagcctatgttaggggagtgtggggagggaattcacttacggaaaaagcttcctatccaaacaacgggaaaggcataacgttatggccaggtggtaggaaggcataaattttgacctagcttgatttcggggaaaagagcacccaaggaaataatccggaaatggtcagagggagcgtgatacatatgaagatttttaaatacgtgcaggacataattagtcttttgttatttgagaaggggtctcgaaattgttgaaagcatctgaacgttgaacagatgaggaatagttgaagttgcttttggtataatagttcagacgagtcactttggccagtcttgttttgtaatg

SEQ ID NO: 125493 - DNA, 1030 bp, Homo sapiens
tatagagataattctgtcactggcccttattagggttatgccctgaaaagctaataagttaatggcatttctccaaagttagagaatcatagaaagccgtttaaaaccattggggtcagtacttcttttggtttggacatatacttacatgccttcctcttgttcaagataactccctgcactatcagtacctttccatcatgttggttaaaggatataatcgaacccgaccaccgctggtcttcgctggacaccatgaaccacactgtccaaaccttcttctctcctgtcaacagcggccagcccctcaactatgagatgctcaaggaggagcatgaggtggctgtgccaggggtgccccacaaccctgctctcccgacgtgatccacatctgcagcgagacctccatgcccaaccatgttgtctggtccctgttcaacaccctcttcatgaacccctgctgcctgggcttcatagcgttcacctactccatgaagtctagggacaggaagatggttggcgacctgaccggggcccaggcctatgcctccaccgccaagtgcctgaacatctgggccctgactttgggcatcctcatgaccattctgctcatcgtcatcccagtgttgatcatccaagcccattgatagatcaggaggcatcactgaggccaggagctctgcccatgacctgtatcccatgtactccaccttccactccttgccctgccccggagccaagtcctgtatcagccctttatactcacacacttttctacaatggcattcaataaagtgtatatgtttctggtgctgctgcgaaaaaaaaaaaggatataatcatttaacaatacttcatcctgttcagagtgttctcacatccatcatgtcatcagagcctcacagcagtcctgaaaggaaatagatcaggtgtctgcctgtgtccatgctggagaagtcagtgcagaaagaaagaaaaagatgactgtggcttcccaaggcagcaggggaaaggatggtagattcgtgcc

SEQ ID NO: 125494 - DNA, 1021 bp, Homo sapiens
gtttgtagactaaggtttccatgactcaggtgttagatttgggcactgtgttctgaagtttcatagtggctcaaaagggagcaaaggtttatgatgagaggcacgaatctaccatcctttcccctgctgccttgggaagccacagtcatctttttctttctttctgcactgacttctccagcatggacacaggcagacacctgatctatttcctttcaggactgctgtgaggctctgatgacatgatggatgtgagaacactctgaacaggatgaagtattgttaaatgattatatcctttttttttttcgcagcagcaccagaaacatatacactttattgaatgccattgtagaaaagtgtgtgagtataaagggctgatacaggacttggctccggggcagggcaaggagtggaaggtggagtacatgggatacaggtcatgggcagagctcctggcctcagtgatgcctcctgatctatcaatgggcttggatgatcaacactgggatgacgatgagcagaatggtcatgaggatgcccaaagtcagggcccagatgttcaggcacttggcggtggaggcataggcctgggccccggtcaggtcgccaaccatcttcctgtccctagacttcatggagtaggtgaacgctatgaagcccaggcagcaggggttcatgaagagggtgttgaacagggaccagacaacatggttgggcatggaggtctcgctgcagatgtggatcacgtcgggagagcagggttgtggggcacccctggcacagccacctcatgctcctccttgagcatctcatagttgaggggctggccgctgttgacaggagagaagaaggtttggacagtgtggttcatggtgtccagcgaagaccagcggtggtcgggttcgattatatcctttaaccaacatgatggaaaggtactgatagtgcagggagttatcttgaacaagaggaaggcatgtaagtatatgtccaaaccaaaagaagtactgaccccaat

SEQ ID NO: 125495 - DNA, 1052 bp, Homo sapiens
gacggcggcggcgttagccggcgctcgagctgtttcccttcctggggcgccgaccccgcccgcttgcttgcttgcctgcctgcctgcctgcctggcgccatgcaagagaaggtgccaggggacgcggagcgacgagaggcgcgcggtcccggacagctccgtctctggcgttggcgctgcagccgtgacggaggactacggcgacgactagggccgctctcccagctctctgcgtgccgcgccgctgcgctctgccgtctgaccatctggagtgcaggctgggaggcgggatggagtgatagggaagatgtttataaattcctctgtgggatcagagggcacgccaattgtaaccagaaaactccaagtatggcagcaaggatgggtgaacaggctgtattagggccaaaatcaaatgctgattcagactttagacaaagggccctggcctattttgagcggttaaagatttccccagatacctggcaggtgtgtgcacagaggctgtagcccagaggacatatagtgatgaacatgtaaagtttttctgctttcaagtgctggaacattaagttaaatacaaatactcagaactaaccacggttcaacaacaactaattagggagacgcgcatatcatggctgcaagctcagatgctgaatccccaaccagagaagacctttatacgaaataaagccgcccaagtcttcgccttgctttttgttacagaatatctcactaagtggcccaagtatttttgtttacattctctcagtagtggacctaaatccaaggggagtagatgtgtgcctgcgaatcctcatggctatcgattcagagttggtggatcgtgatgtggtgcatacgtcagaggaggctcgtaggaatactctcattaaagataccatgagggaacagtgcattccaaatctggtggaatgatggtaccaaatattacaaaattatcagtatactaattctgaagtgaccgtcagtgctttgaagtagttggggcttacgtctcttggatagacttaccccttatagccaat

SEQ ID NO: 125496 - DNA, 1049 bp, Homo sapiens
agtaaagctttcagcaacaagcagactataaaacaatgtggctgttctgaagtttgtctggactgtttacagacattcctgccagccctcagttgtcccttacaaaaggatattctcagaagtggagtccgtactttccttcatcgaatggttatttgcctgggggaagaagtttttccgttcatcccagctgcttcagaacgtatgctcaaagattgtgaagcagaagacctccaggagttcattcttcttatcaaccagattacggccaaattcaagagacaggtatctccgtttttacaacagatgttcatgcccctgcttcatgcaatttttgaagtgctgctccagccagcggaagaaaatgactagtctgctgctttagagaagcagatgttgtggaggagttactttgctttcctgcaaacagtcacaggcagtgggatgagtgaagttatagcaaatcaagctgcacaaaatgtagagtgctggttactgttacccaaggagcagttgaatatccagatccaattgcacagaaaacatgttttatcatcctctcaaagttggtggaactctggagaggtaaagatggaccagtgggatttgctgattttgtttataagcacattgtcccctcatgtttcctagcacctttaaaacaaacctttgacctggcagatgcacaaacagtattggctttatctgagtgtgcagtgacactgaaaacaattcatctcaaatggggcccagaatgtgttcagtatcttcaacaagaatacctgccctccttgcaagtagctccagaaataattcaggagttttgtcaagcgcttcagcagcctgatgctaaagttttaaaaaattacttaaaggtgttcttccagagagcaaagccctattgactggatttccctgtgcctacttcatgatcaggaattccagttaatttataaagaagcgatttgtgtgtgccattcacactggtctttttcacattgttttgagcttattgcagtatatgttttgggatttttatgtgaaatggg

SEQ ID NO: 125497 - DNA, 1072 bp, Homo sapiens
tcttaaaaatatggctaaactggttgcatattagggtgtcttgttttttaaaggatttgctggatgtgtgatactttaaaaaatgccaccgatgctatatatactggtatatagaatgtcattctctgaggttttcttttcttttttatttttattctagatattaattttaattactttgcagcaacataatttagtaccaaatgttgaacaagtacccattataatggctaaactgtgaagtcaaagtcactattatttgtatctgaccagctatacaaaactcattaatttttctcttgacaaaatgtagtaaaaatcggaaacaataaagaagatactactcattaaaagtcatgtttactaatctaacaccataattccagtcttagaacctcccatgcagttagaaagggagtatgggaagaggtgagtatgttggaaatgtagggtagttctcaaattggggccccattttgcttgcgctaaagcaaaaaacacagagtctagcaaagaagaggagcactgaggctggagataaaaacaaaaacttttagttcagatggtaaaggaggccctcaagagcagtagaatcagcatatcccgaaggcagtgctggaggcagtctcatgaactagggagtttcttcttggcatccaagtcctttttaatttcttcaagttttttagccaggtttggtatgtcatagttctgagccagatatattccaaccacattgcccaatgtaaatccaagcaggaactggagcatgatgtcagtggggagggcgaggagggcgctaaggactgctgcagctccgcgggcccggccgagcctgcctccccatgagccaggggaggaaccctctctggggttttctagataccattttatttctcatcagaaattcacactctaagcccttatggcagacacgtgtttgttatgtgatgggaacatgaatctcactgagctggtacaggtgctgcacccattcctaacttgttacaccatccaacaagtaaccttttgatgaaaggatcttttattttaagtttcttcaggcagactc

SEQ ID NO: 125498 - DNA, 1068 bp, Homo sapiens
cactggcaaactatcaattcaaaaactcaagctttaccctagatcttcagagtcaaaatctacattttaacaagatctcctgttaattgatttgagaataagatgtgagaagtatgcttttaactcaccatgaagtttccatatgggaagtatagacaactcatcttatattatgtaaatatagcattaagaaatgtacatacctgtgttaatgtcctttatttaaactgtatcatcaagaaaagtattgcacatacactggtttcatgatcttatgccaccttttctcagagttaaaaatacattagagaatatctctgtgctggaaagtatcctattggataacttcagtaactcatgtaagtcagaaccagctctctttactctcattttacctgacgtcaaatcaggagttctttctatggtcacttggtaaatatgttttgttttccagggagtgttgacattcagggatgtggctgtagaattctccccagaagagtgggaatgcctggactctgctcagcagcgtttgtatagggatgtgatgttggagaactacagaaatctggtctccttgggtgagaataacttcaatatacaactcatattctacattaaatattttattctggttttttttttggaagttctgctttgcataagtgagttccagaatcctgcttcaaaaagaaaaaattgggtatctgttcaggtagaaaatataatctttaagatgtttcatcttaacattaatctttcccttttttgagctcatctgtgtagagtctaaattagtggtaatatcagaaatttaatgcataaaatattgttacccacacctaaaaatgcaattttcacaactgacttttgattcagtatcactgggtaatagagctaagaacccacaaatttaaaatactttctaaatattctaaagtttatgttagtaaacagtagattggaattaattttctagagtcttctataatgttctttcttctctactgagcatagtactagattagtaatcggattatcctagcaagagtcatgttatttttttct

SEQ ID NO: 125499 - DNA, 1055 bp, Homo sapiens
atttatacatctatgaaggaattatggcctgtggtattttgatatggcattttgctaatgtaccttgtgtaattttatatatttcatgtgtagaatacatttatatgagtccagaaagtggagtaacttgtgctttttgtgtctttcagttacgcgttcccatttcacccaagaccttcagccagagcagggcatcaaagattcactccaaaaagtaataccaagaacatatggaaaatgtggacatgagaaattacaatttaaaaaatgctgtaaaagtgtgggtgaatgtgaggtgcccaaagaggttatagtgaagttaaccaatgtttgtcaactacccaaaacaaaatatttcagactcataaatatgtcaaagtctttggtaaattttcaaattccaatagagataaaacaagatatactggaaagaaacatttcaaatgtaacaaatatggcaaatcattttgcatgctttcacacctaaatcaacatcaggtaattcatactagggagaagtcctacaaatgcaaagaatgtggcaaatcctttaactgctcctcaaaccatactacacataaaataattcatactggagagaaaccatatagatgtgaggaatgtggcaaagcctttagctggtccgcaaacctcactagacataagagaactcatactggagagaaaccctacacatgtgaagaatgtggccaagcctttaggcgctcctcagcacttactaaccacaagagaattcatactggagggagaccctacaaatgtgaagaatgtggcaaagcctttagcgtatcctcaaccctcactgaccacaagagaattcatactggagagaaaccctgcaggtgtgaggaatgtggcaaagcctttagctggtcctcaaaccttagtagacataagagaattcatactagagagaaaccctatgcctgtgaagaatgtggccaagcctttagcttatcctcgaaccttactagacataagagaattcatactggagagaaaccctacacatgtgaagaatgtggccaagactt

SEQ ID NO: 125500 - DNA, 1055 bp, Homo sapiens; identical to SEQ ID NO: 125499

SEQ ID NO: 125501 - DNA, 1051 bp, Homo sapiens
aataatattttatgacgtgaaattatatcaaattaattttcagggctcatatatacattttattggaacacaatcacacccattggcttgtatatcctctgtggctgctttcttgatacaatggcagagttgaatagttgcaacagtgtcttagtcccttttttttttttgtacttagctatttaattaggttcttaagacatttagaacaccaatttgtgaggataaattccattcgtcagggcaaacacagatcgcaggtagccctggagctgagaaatagctttgacttttggtaaaatttgtgagtccacagctttctgatcaatcttgcgctgctctgtaatctcatatttctctttttctgtgtcgaagatgttgccttcctggtgtctgggcttccgcagctgctgcttcttgaagtaagcatcagtaagatgttttgggatttttacattgctgatatcgattttggttgaggtggcaatgacaaatttctggtgtgttcctcgtagaggaactcaattgaggaccagaggtccagtcacaagtaacaagccactagccagctgcttcaggaaaaccaccctcttgcccctgtggcatccagtgaggatgatcagaatggtcccaggggtaatgctggcttgcagttttctcacatgctgactgaagggttttttgctgtggctcaacagctttcgaggtacatcttcggtaggatagtatctaggcattttgtgaagtttaaccacctgggtaccaccattcttgtcaccaccaactggttttgtaacagttgcaagaaccttctcctttttcttttcaatctttgatttagcggctgagtacttcctcttatacatggcctttctagaatacatggcagatcgggaatacctgccagttcctctgacaaggacagggttgtggctgcaatagggcttccccttcttgggctttttaactttaagattaccctcttgcaccttgccaccagcatcagccttcttggcttcgggtttcttctctttagtatctggcttctcaa

SEQ ID NO: 125502 - DNA, 1049 bp, Homo sapiens
ggtctccctgggtgaggataacttcaatacacaattcctaatatatttcttttctctcttttctaaaatgttttttggtaatttctgctttgcatgagtgaattttagctctctgatttgaagaaaatcttggggattcattggtgtagaacaaattcttcaagatgttttatcttgacctgaacttttccctttcctgagcttatgtatctttcactctaggttagtggcaattccaaaaatgtcatggcataaaatatcgttgcccacaccttagaattcagttgctgccaccaatttttgattcagtagtactgagtagtgaaattaaggacctacaaatttaaaatattttctaaatagttaaaaagttctgttatgaatcaatattaattttctagaattttctattatatcctctttactaagcataatactcgtttggtaattaaagaattcagcaagatttatgttacttttttttcttaataaaacaggtattgctgtctctaagccagacttgatcacctgtctggagcaaaataaagagccttggaatataaagagaaatgagatggtaaccaaacacccaggtaagtgagagtggatgaagcggatgacacagatgagaggtgcaaaagtcaaggaggaagccagtccttaaaatgtgatttggggagatgtgcttccatggaaagagtttctaagaagcccgagtcatttttttttcttttgctctcagatagggataccttctgccccatgcttttaaattctctaaggattctactttcgcttcagtaatctttcttcaagttcacagtgtgagccaaagttttctttatggcttatcagagactgactgctttaccattgttttgggggcatgctaatatctgcatatttttgagaaactctatgttaaaccattaaaaatttttttttgcatcatgtctaaaacgtgtgagaatagtagtttctgtttcattggtggttgtccgtttttctgcacatgccattctgttgtcattactatagacttgaaatat

SEQ ID NO: 125503 - DNA, 1278 bp, Homo sapiens
attctttctatggtcacttggtaaatatgttttgttttccagggagtgttgacattcagggatgtggctgtagaattctccccagaagagtgggaatgcctggactctgctcagcagcgtttgtatagggatgtgatgttagagaactatggaaacctggtctccttgggtgagaataacttcaatatacaactcatattctacattaaatattttattttcttctgatttttttggaggttctgctttgcataaatgagtttcagaatcctgcttcaaaaagaaaaaattgggtatctgttgaggtagaaaatataatcttcaagatgtttcatcttaacattaatctttcccttttttgagctcatctgtatacttcagtctaaattagtggtaatatcagaaatttagtagcataaaatattgttacccacacctaaaaatgcaattttcacagctgatttttgattcagtattactgggtaatagagctaagaaccacaaatttaaaatactttctaaatattctaaagtttctgttaggaaacagtatattaaaattaattttctagagtcttctataatgttctctcttctctactgagcatagtactagattagtaatcagattatcctagcaagagtcatgtttttttttctaataaaacaggtcttgctatctttaagccagacttgatgacctgtctggagcaaagaaaagagccttggaaagtgaagagacaggaggcagtagccaaacacccaggtaggtgggagtgaatgaagcagatgacacaaatgacggatcccaatgtcaaggaggaagccaaacctttaaacatgcttccagaagctctgctccagtggaaatggtttctgagaaaccttcatttctttctcttgctttaacatagggacattttttgtcccattcttgtgaattttccaagcactgtacttccccttcagtaatgtgtgtgtgtgtgttgtgtgtgtgttttgttttgttttttgtttttagtttacagcaataatgaaagtctttcatggcttgacagaaaatgtgtgatttgactgcttttccattgctttggggaaacagcaatatctgtatttttgagaaactatattaaaccatttttttaagttctgtttttggataatgtctaaatatttaagttttggtgatattacagtttggatcagaaatcccaggaataccacaaaaagatgtgtgcttcctgctttataattttctattctatggaaccttcaaac

SEQ ID NO: 125504 - DNA, 1498 bp, Homo sapiens
tagccagtcttcaaaccttactgaacataagaaaattcatactggagagaaaccctataaatgtgaggaatgtggcaaagcttttaaccgattctcaacccttactaaacataagagaattcatactggagaaaaaccctataaatgtgaagaatgtggaaaagcctttaatcaatcctatcaacttactagacataagatagttcatactaaagagaaactcaacaaatgtgaagaatttggcaaggcctttaaacagtcctcacaccgtactatacataaaattattcatactggagagaaaccctacaaatgtgaagaacatggcaaagtttttaaccagtcctcaaaccttactacacaaaagataattcatactggagagaacctctacaaatttgaagaacatggaaaagcttttaacctattctcaaacattactaaccataagataatttatactggagagaaaccccacaaatgtgaagaatgtggaaaagcttataaccgattctcaaacctaactatacataagagaattcatacgggagagaaaccttaccaatgtgcagaatgtggcaaagcctttaactgctcctcaacccttaatagacataagataattcatactggagagaaaccttacaaatgtaaagaatgtggcaaagcttttaacctatcctcaacccttactgcacataagaaaattcatactggagagaaaccctataaatgtgaagaatgtggcaaagcttttaaccaatcctcaaaccttactacacataagaaaattcatacttcagagaaaccctacaaatgtgaagaatgtggcaaatcctttaaccagttctcatctcttaatatacataagataattcatactggagagaaaccctacaaatgtggagattatggcagagctttcaacctatcctcaaatcttactacacataagaaaattcatactggagagaaaccctacaaatgtgagtatggcaaaacttaattgatcctacaagcttactacacataggaaaattcatactggagagaaactacaaatgtgaagaatgtgttaaagcctttaacaagtcttcaactttttctgcacacacgaggtattttatactggtgagaaaccttacaatgtaaagaatgtggcacagcttttaactaatcttcaaaccttactgaaagttgagaaaattcgtactggagagaatcctacaaatgtgaaaaatgtggcaaatcctttaactgatcctcaacttttactaaacataaggtaattcatactggagaaaagccatacaaatgagaagaatgtggcaatgcctttaatcagtcctcacacctttctacacataagataatttatactggagaggaactctatagttgtgaagaatgtggcaaagcttttaaccaatcctcataccttactatacagaaattcatactggagagaaagcctacaattgtgaagaatgtggcaaag

SEQ ID NO: 125505 - DNA, 6286 bp, Homo sapiens
caaaaacattgacattattggtgagctttttagaaatttagaatatcagactgttccagatcttctgaaaaaataatctgcattaacgagatctgaagtttatcatacacattaaaacttgcgaggtaccttttaactcaacatgtctttttcatctcaaaaatacacacaactcattctgtatgatgcagatatagcatttaaaaatagacatgttggcgtttatgccctaatttatactttattatccagaaaagtaccatatatacacagatgttgtggatcttcttataccactttcttttctcagggttagataatacattagaaaatatttctgtgttaaaaattcttttatggatagtttcattcactcctataagtcagaaccagttttctttactgttttattttaccttgaaatttaaaattatgcccatggccacttggtaaatgtatgtgattttgtgtatgtgtgtgtttttgtgtttttcagggaccattgacatttatggatgtggccatagaattctctttggaggagtggcaatgcctggacactgcacagcagaatttatataggcatgtgatgtgagagaactacagaaacctggttttcttgggtgaaggtaacttcaatacacattttctaatataccctaaaggttttaattctcttttttgtagaatgtttttggtgatttatgctttgcataaattgagtttcagatccctgttttcaaaaaaatcttttagatttgtcattgtagaaaatagtttattcaagatgtttcatctttaccataactttccacattcctgagatgatctttatcattcagtcttgattagtggtaattttagaaatttattggcataaaatattgttgcccacaccttaaaatctaactcccaacaacaattgttttgattcagtagtaccaggtagtgaaattaagaaactacaaatttaaaatattttctaaatctttagaaatttttgttataaattagcatttggggattaatttactagaatattctattgcattctctttactgagcacattaccaagttggtaattggagaatatgtgcaagatttatgttatttattttcaataaaacaggtattgctgtctctaagccagacctgattacctgtctggagcaaggaaaagagccctggaatatgaagagacatgagatggtagctaaacatttaggtaagtgagagtgaatacacagatggcacagagaagaggtcaaaggccaaggagaaggccacagcttaaaatgtgatttggtaagctgtgttccaaaggaaatagtttctggaaagcccgagtttttttttatttttctctcacatagaacatattttgtattgtttttcaattctctaaggattcctctttccctttagtgatctgtcttcaatttcacagtgaaagccaacatcctcttcatgggatataaaagactgcacaatctgactggtttttttttgttgttgttttgggggacacacaaatatgcataattttgagaaactctatgttaaacagttttttaaattctctttttgcatcaagtctgaaatgtgtgagtagtgatttctgttccattggtttttttgttgttgtttatttttctgtatattccattctgtttttactactatagctttgaaatatagttacatatgtaaggcatatgcagtgccaatataccttttcaggatttggctattttggattggctttttctttttatttggcaggacagatttgctgctggtattattctcacttgacagctattttcttcaggacttggacaatgtcacacagttagttcccttctggcctgcaaattttcttgagaaattcactcattacctcataagactatgcttataaataacatatcacttttatcttgcaactcacaatattctcttgtctgtgacttttaaaattgtgcttatatatgttcttgttgtaaatatctttgtgtgtattctagtttctttgttaacctttttaatttttacatcagtttttcttataatttttcagttccttttttatattttttacctccacaatatctgttttttgatatttttaatatttttgttatcccaatttttatgatttttaatagttgtctgtgtttctatttcattcatggagtattattcaatttatgttaactttttaaaattaattttttaatggttgctttctgaaaattttataatatctgatagagctatgttgccctaaaattttgtatgcattgtaatctttaattgaaatttgaacattaaaaacaagctacctgtcacagtgtctataatgtagctttgtcctggcaaagtctgaaaccatttgtcttagctagagatcctgagagtctttcaaacatgttcttaggatgtgtcttgtctgaaatgttctagttgttttttagttaaaagactttattcatgtttcttcttaatagtcatcacttgccacaactgttccctgtctgtagtacagtctctttcctgctgtaacatttacctttgatctcagcagactcaaaatgtcattccaaagtataccactgttaatttcagcactttatgtcattggagacagaaaccagtgtccgccaaagcacctaataaagccagaaataaagatgtgggtgtgttatttttcttgtctgttgaaaaagaaagcaaaagttggtaatgtacttctaaagacactatgttatactgaggagcagaaagagctgtgttgggtaaatgtaaccaacttttctcttccttccatgtggcttttggaattgtgataacctggaacactgcacacacgtaactcatttataaattttctataaatgcattttggtcaatatgctcttgttacatttatatgtctatgaaggaattagaacctgtggtattttgctatgccatcttgcttatgtagtttctgtaactttatgggttagatttgtaaagtatattcatctgagtcgagcaagtgaagtagtttgttacttttatttctttcagttatgttttattattttgcccaacacctttggccagagcagaacataagagattctttccagaaagtgaccctaagaagatatagaaaatgtggatatgagaatttacagttaagaaaaggctgtaaaagtgtggttgagtgtaaacagcacaaaggagattatagtggacttaaccaatgtttgaaaactaccttgagcaaaatatttcaatgtaataaatatgtagaagttttccataaaatttcaaattcaaatagacacaagatgagacatactgaaaataaacattttaaatgtaaagaatgtcgcaaaacattttgcatgctttcacacctaactcaacataaaagaatccaaactagagtgaatttctacaaatgtgaagcatatggaagagcctttaactggtcctcaacccttaataaacataagagaattcatactggagaaaaaccttacaaatgtaaagaatgtggcaaagcctttaaccagacctcacaccttattagacataagagaattcatactgaagagaaaccctacaaatgtgaagaatgtggcaaagcctttaaccagtcatcgacccttactacacataatataattcatactggggaaattccctacaaatgtgagaaatgtgttagagcttttaaccaagcctcaaagcttactgaacataagttaattcataccggagagaaacgttatgaatgtgaagaatgcggcaaagcttttaaccgatcctcaaaacttactgaacataagtacattcatactggagagaagctgtacaaatgtgaagaatgtggtaaagcctttaaccagtcctcaacccttactacacataagagaattcatagtggagagaagccctacaaatgtgaagaatgtggcaaagcttttaaacaattttcaaatcttactgaccataaaaaaattcatactggagagaaaccctacaaatgtgaggaatgtggcaaagcttttaaccaactctcaaaccttactagacataaggtaattcatactggagagaaaccctacaaatgtggagaatgtggcaaagcctttaaccagtcctcagcccttaatacacataagataatccatactggagagaatccccacaaatgtagagaatctggcaaagttttccacctatcctcaaaacttagtacatgtaagaaaattcatactggagagaaactctacaaatgtgaagaatgtggcaaagcctttaaccgatcttcaacccttattggacataagagaattcatactggagagaaaccctacaaatgtgaagaatgtggcaaagcttttaaccaatcttcaacacttactacacataagataattcatactgaagagaaacagtacaaatgtgatgaatgtggcaaagcttctacctgatcctcaaaactcattgaacacaagaaaattcatactggagagaaaccttacaagtgtgaagaatgtggcaaaacttctaaccatttctcaacccttactaaacataagatgattcatactggagagaagttacacaaatgtgatgaatgtgacaaagcttttaaccaatcttcaaccctttctacacataaaagaattcatactggagagaaaccctacaaatgtgaagaatgtggcagagcttttaattgatcatcaaaccttattaaacataagaaaattcatattggagagaaaccctacaaatgtgaagaatgtggaaaagcttttaaccagttctcaactcttactacacataaaataattcatactggagagaaaccatataaatgtgaagaatgtggcaaagctttcaacctatacgtaaaccttactacacataagaaaattcatactggagagaaaccctacaagtgtgaagaatgtggcaaagcttttagccaagtgtcaactcttactatacataaaagaattcatactggagagaaaccctacaagtgtgaagaatgtggcaaagcttttaaccaagtgtcaactcttactatacataaaagaattcatactggagagaaaccttacaaatgtgaggaatgtggcaaaactttcagtcgatgctcaaaacttactacacataagaaaattcatacaggagagaaaccttacaaatgtgaaaaatgtgctaaagcttttagccagtcttcaaccctttctacatataagataattcacactggagagaaatgctacaaatgtgaagaatgtggcaaagtttttaaccgatcttcaaaccttacagaccataaaaaaattcatacaggagagaaatcctacaaatgtgaagaatgtgacaaggcctttaacctgtcctcaacgcttactaaacataaggtaattcatactggagagaaactgtacaaatgtaaagaatgtggtaaagcttttaaacagttctcacaccttgctatacataatataattcatactggagagaaactctacaaatgtgaagaatgtggcaaagcttttaacttatcctcaaaccttactgcacataagaaaaatcgtactggagagaaaccctacaaatgtgaagaatgtggcaaagctaacctatcatcaacccttactccacataagacaattcatatttgagagaaaccctgcaaatgtgaagaatgtggcaatgcttgtaactaaatctcaaactttactaaacataagaaaattaatactggaaactttacaaacctgaaagatgtgacaatgattttgacaacaccttcaaacttttctaaacataaaataaatcatactggtgagaaatcttaaaaatatgaagaatggtacaaagcctttaaatggttgtcacacttgattgtaggtaagataatttatactggaggaaactcccagaagtgtgaagaatgtggcaaaacttttaatttttcacaccttatagcacaggaaagcacttcagaaaaattgtacaaatataaatgtggaaaagccattaatatctgcttacatcttactcaacattagagagttagtgcttaataaaagcattataaaagcaattagtgtaaaatcagaaaatgaaagttttttttttttttttagatggagtcttgctctgtcacccaggctggagtgcagtggtgtgatcttggctcactgcaacctctgcctcccaggttcaagcaattctcctgccttagcctccagagtagct

SEQ ID NO: 125506 - DNA, 1004 bp, Homo sapiens
atgtggagtaagggttgatgataggttagctttgccacattcttcacatttgtagggtttctctccagtacgatttttcttatgtgcagtaaggtttgaggataagttaaaagctttgccacattcttcacatttgtagagtttctctccagtatgaattatattatgtatagcaaggtgtgagaactgtttaaaagctttaccacattctttacatttgtacagtttctctccagtatgaattaccttatgtttagtaagcgttgaggacaggttaaaggccttgtcacattcttcacatttgtaggatttctctcctgtatgaatttttttatggtctgtaaggtttgaagatcggttaaaaactttgccacattcttcacatttgtagcatttctctccagtgtgaattatcttatatgtagaaagggttgaagactggctaaaagctttagcacatttttcacatttgtaaggtttctctcctgtatgaattttcttatgtgtagtaagttttgagcatcgactgaaagttttgccacattcctcacatttgtaaggtttctctccagtatgaattcttttatgtatagtaagagttgacacttggttaaaagctttgccacattcttcacacttgtagggtttctctccagtatgaattcttttatgtatagtaagagttgacacttggctaaaagctttgccacattcttcacacttgtagggtttctctccagtatgaattttcttatgtgtagtaaggtttacgtataggttgaaagctttgccacattcttcacatttatatggtttctctccagtatgaattattttatgtgtagtaagagttgagaactggttaaaagcttttccacattcttcacatttgtagggtttctctccaatatgaattttcttatgtttaataaggtttgatgatcaattaaaagctctgccacattcttcacatttgtagggtttctctccagtatgaattcttt

SEQ ID NO: 125507 - DNA, 1359 bp, Homo sapiens
gaccagatactctgtctcatttgctcttaaaccaaaatcctttcgctttttagaggggaaataattatcatagggccaaatggaacattttaaaaatgcatttaaaatgtaggtatcagtttacaggggaaaatgcatagatgtgacaaaaagctcacatttgttgttggttattcagaacaaagttaataggctgattagactctcagatacgctttgagaaccattgagtgtcttttatgcaaacattgttatgttatttccactttcagaaaggacttttaaacttacaagtaccttccacccaaagttagttgaatgaataaatatttaaggaaaacattatgcagcagcacatttcaagtattttaagaaacaagaagaactaaaaatgacttttgatcctagtttaatatggaatttaagcagaattattaccaattttagatttttttttttttgaaacaagtagtctataataaatggaccttttaatattggggcatggaaagagtacttactgtatgcttaagttcttttttttttttttttttgagacggagtcttgttcttgtcacccaggctggagtgcaatagcatgatctcggctcactgcaacccccgcctcccaggttcaagtgattctcctgcctcagcctcccgagtagctgggattgcagacatccgccatcatgcctggctaatttttgtatttttagtagagatggggtttcaccatattggtcaggctggtctcgaactcctgacctcaggtaatccacccacctctgcctcccaaagtgctgggaatcaagcatgagccaccgcgcctggcctgcttaagtgcttaaaattgacttggccgggcacagtggctcacgcctgtaatcccagcactttgggaggccgaggtgggtggatcatgaggtcaggagttcaagaccatcctgaccagcatggtgaaaccctgtctctaccaaaaatacaaaaattagctgggtgtggtggcatgtgcctatagtcccagctacttgggaggctgaggcaggagaattgcttgaacctgggaggcagaggttgcagtgagccaagaccacaccatggcaccccagcctgggcaacagaatgagactccatctcaaataaataaataaataaataaataaaaataatttaaaaaattgacttttctttaaaaaggtgtatttagcatacactctaaatattctcatagttatatcctgctagagctgcgtgtttgtgcataaaacatcaagtagtatattaaaaatatgtataagtacatgtaagactaaaggtaactggatctctttatagttttaaatgtgaatttaatat

SEQ ID NO: 125508 - DNA, 1102 bp, Homo sapiens
aaagccatttatatctgctcacatgtaaaaacatcagttcatacttaataaaatgcaattaccgtcaaatctttcagaaaatataagcctttaatacgaggaagagtattcttaagatgaacattacaaatagaaagagggttgtagtacctttagttttatgatagatcttattgtacacattttgtaccagaggaaaaccctaaagcattagttgctcaaactttgttcgacatcagggaatttgtattggagaaaaaccctgcaaatgtaataaatatggaaaaacattttttcaaaaactacagcttggaaaacatcagagagttcatactaaaatatatttttgcagatgcagtaaatatgaaaaatatttaatcccaaattaagtctatgtaaatatcagaattcacagtagaaatcataaggcataaggcactgatacttcagacattacactaaattagagtgttgagtataggagatccaaaactaaaattgttaggtaagttatttatatataactttaaaagaagtagaagattttttggagatttataattacattcaaagtatacttttttcttgaaaaaaattacagattttttgaaaagcaattgatgtaatttaactctcaaattcatgtttttcttcattcctattatattcacatgtgaaagcaagtgatctgttgttgctgaatcagagatatgagagattcttttttataggtgggcattatttatgcccctttctgtggaagagtaagaaaattaaaatacaagatgcatgaggaaaatgtagagatgctctttgtgattaacttagaatattaagtgctacttgaggtacatgttcagactaacattcttttgcagtatagtgagaaaaaaacattttaaaattaattatcattttgttgattgtgcttttatgtaataaaatgcagtactttaaaacatttagattgtgtgtgaacttaattttgtaattaaacattttttttagcatgctaagactagtgtattcgatgaagtgttattatgccactaactttaaccttatcctaccttactcaagggtgtggggtaaaagatggtaa

SEQ ID NO: 125509 - DNA, 1060 bp, Homo sapiens
ttatgacacgtttaacacacacatttaagttacgtgtcaggtggcacagacgtgtcacacgtgtcactcacatgtcggtgaagtgtctcacatgtcacacatgtgtcagtcatatgtcacacgtcagtcacttgttagtcacgtgtcatacatgcatcacccatgtattattcacgtgtctgtcacatgttggtaatgcgtgttacacaagactgtcatgtgactcgcatgtgacatgactgacatgtgtgatgtgcgtgacacatgggtgatacgtgactgacatatgtgtgaatgggcttgacaagtgacagacacgtgactggtatgtgactgacgtgtgtgaatcgtgacagacgtgacaaacacgtgactgacacgtgatagatgtgtgtgacatgtgacttagacgtgtgacacatgactgatacgtgactgacacctgtgagacaagtgactgacacatgatcaacacataaatgatatgtgacacatgactgacacgtgactgagacctgtgtgacacgtgacacttgtgtgacacctgataggcacatgtgtgaaacctgattgacgcgtgtgacacctgtgtgacacgtgactgaaatgtgtgtgacacctgacatgacttacaggtgtgtgacacctctgtgacatgtgaccaatatgtgtgtgacacatgatggacatgtgtgtgacacgtgtttgactcgaccaaattttttcacacctggctgacactgtgcgaaacctgacggacatgaatgagacatgtgtgtgacatatgactgacacgtgtgtgacatgtgaccaacacgtgggtcacaagtaattgacgtggtggacacgtgtataacgtgacatgtgactgacaggtttgtgatgtgaccaacacgtgactgacatgtgtgacatgtgattgatgtgacacgtggctgacatgtgtgacacgtgactgacacatgactgacgcgtcttttaaaagtaactgacgtaatagacatatgacttacacatgtgacacgtgaaaaattaacacgactgacacgtttgcgacatg

SEQ ID NO: 125510 - DNA, 2656 bp, Homo sapiens
gaaaccccgtctctactaaaaatacaaaaaaaattagccagacatggtggcacacgcctgtagtcccagctacttgagaggggctgaggcaggagaatcacttgaacccgggaggtggaggttgtggtgagctgaggtcgtgccactgcactccagactgggtgacagagtgagactctgtctcaaaaaaaaagaaaaattaaattcttgtctaggtaaggcattcgctgcttcggatttgaaagataacaaagcatgtacagtgaaaagtctccttcatatcccttccaccagacagttctcccgctcagtagaccgctgtgaaacttttcagagccgtttgacacatagacaaacatccacgtgaccatatgattcctccctttttttaacatggaagtatcacgtatgcatccttattgatagcctgctttttgcttggcattcgttccattgctcccatactttaaatgcttatgttcatatttagtgaaatgttaataactgctagtacgtaaaagagaatttgttctagtagttttgactaaccaagataaatttcagaaataaaattcttaacattatcattgtttcttggtatggaaatttcagaagcaggttgaactgaaaagagtccaagaggaatagagaaatatcacaaggaagtgaatctggactgtagtagagataaatgttaatacttacagataatgcttactatgtgctaggcagtgttctaaatgttttgcatacattattgaagtctctcaagagtcccatgaggcaggtagcttttatcaccattttacacatgagaaaactgagcaacgcagactaacacttgatccaggtagtacagtggcagaggcctgattctaacccaggcagtctggctcaagagtccaagctctttaccactactctttcgtcttcctttcttcctttccctcccaccctccttcttcctttcctttcttttctctctttcttttccttccttcttttctttctttttccttccttccttccttttctttatttttccttcttccttcctccttcgttccttgcttccttctttccttttctttttctttcctttcctttttttttctttcctttcttttctttcttctttaactttttgagacattgtctcactctgtctccccaggctgagtgcagtggtgcagtcatggctcactgcagcctcaacctccctgggtcaagtgatcctccaacctcagcttcctgagtagctgggtctacagttgcacaccccaccatgcctagctaattttttctatttttcatagtgacgaggtctcactttgttgcctgagttggtctcaaactcctggcctcaagcagtcttcccacttggcctcccaaagtgctgagattacaggtgtgagccaccacgcccagccttttaccactactttaaattccatttagatctaatattgatagagtgataaccatatcaaccagattttttaaatatgcaaacaatggtgccagtttctgtatctatgtgacaaaaatatatagagtttgtggtatcacttttacctgtttagagcactctttggaaaggcagggaaattactgtgaaggtattggtattccagaagtaagttcctggagtgtttgccttctaaggtgtgaggacgtggtttgtcacacccagttaactaacagatagacggtgtagtgagctgtccggaagacttagcaggttagcctagggaggaaggagaaaggggttctgggcacatggagggagggggagggaaaagagtttgtttgaatctgtcctagattggggtagctttttcggagggaggccttgtcgtgtggacctgctgcatataaagacaggagaattggacctgaggtgtggtgctagctaaagcgccacacagatctgggaatttaagaggagttcatttcctcaatcattaggaagaacttgaaagggtagcaaactgtggtcatttgagaagaacagcaagtggtcatatttgaatgtaacatattcaactgggttgggaaagaaccagaatctagatcttgcccatagcaagtgcaaaaccaggcgttcttataaaccatgtactcttgtaaacactgataagacatagcactgagtcctgagcttttcttctataaagttattgtacaggttgaggatccctaatccgaaaatccaaaatctgaaatgcccctgtgagcatttccgttgagtgtcattggcactcaaagttttggattttggaccatttcagattttgaactttcagatttgggatgctcaaccggtatataatgcacatattcccaaatctgaaaaaatcccaaatccaaagcatttcagctccaaagtgtttcagataaggaatattcaacctgtactacattgtactaggcttgtattagattcccagttttcaaaatttgtatctcagaatccctgttctctgtcaatgaaacagggatttcatacacctttgattcacattttaatgttttaagtttaaaatattataaatgtttatacacagtcaaatgaatctcatgctaaattttaatatattagagacaactgatttgtctgccaggttatctcaagagagttaatactgagtgaaaa

SEQ ID NO: 125511 - DNA, 1021 bp, Homo sapiens
gaggttgcagtgagctgagatcatgccactgcactccagcctgagcgacagagcaaactctgtctcaagaaaataaaataaaatagactgggtgtagtggctcacgcctgtaaccccagcactttgggagactgaggcgggtggatcacctgaggtcgggagttggagaccagcctgaccaacatggtgaaaccccatctctactaaaaatacaaaattagtcgggcatggtggtgcatgcctgtaatctcagctactcgggaggctgagacaggagagttgcttgaacccaggaggcagaggttgcagtgagccaagatcacgccattgcactccagcctgggcaacaagagtgaaactccgtctgaaaaataaaataaaataaaataaaaagtaaaaaagcaaaaaaaaaaaaaaagtgcatttagaatatttgagagaaaataagcaaaaggaagaaaatgtaaattatctataatgcttacacccaggacaataatccttggaatagagtgtctcactttgtgtatagaaatgaaacttttaaaatgccattttattttttaattaaaattttttctttccttttttttcctcctcagagttagaaaggataaaaatgttattgattagtaagactgtagctttatgttgatattttgaaattttaggctagtgcttgtttgttcatgtaacatataagcacattcagtactattagaactgttgcattatgcaataacatgactgcctaatgcatatatcaggattagtacatattgtaaagtttttattttttaccaaaatgtttacgactaccaagtattcattccttaacactattacataattaatttagaaatgttttacttttaaaacttctggacaggtgtaattaaatccttagatagcgttaatgtactatttaaaaaacacacacaaaacattatcattggcaaaacatgctttatcatctattcatctttgtgaatccggtttttcttgataccatgccatcaaa

SEQ ID NO: 125512 - DNA, 1889 bp, Homo sapiens
agtttagactttatcacttagtgatagtgggtttaaaaataaaaattgtttttgttttagttaacattttattattattcaccagccattaaggaacacattaattactatttattctttctcgttgaatctgtgcaattttctgagaagtaggtaaacccgcccctgtgtgtgtatgtgtctgtgtgtgtgagatgcaatttgtgtggtgctagaaattgagaaattacagtaatttcttattattctggtcagagatccctggaatatcaaaattgtctgcaatctatagtcactgttttcaagtctatagggtccctgggagaaatacttatattaaatatttgcactgacaaatggacaacaaaaggactctacgttttattcttaactaggacttgggcaccaaactccagggtaaaagactggaatgaacccagctggttcaggtggaaatgttgtttttttggaatctagttaagcttaaattgtttcaaactaaagcaggccatgagatgaacccttttcatcttcccagttctcaaacacactgagatcttccccacatttcactcctttctgtcagttgctcgaggtcatgtaaccagagtgagcccatttgccctggctgactgctgatctggccttggacacctgccttggcctcttctaccgaagctgcaggtttggccctgtctctcccttactgcggtggtgaggggggtgcaggggggagttgacaaccttcttaaccacttcagtcacatgaaagaagcagacaagtgagcttgcatctgtgtgctgaccttttaacagtgatgctgcccagtacactcagacccaatcagtgttctcacatctgccttcctccttcctgagaattaggagaaagaagagctcagccttgatttcttacctcaaaagacagcacaaacaaacttgcagccattctcagaagtattggttttctgttgggttgttgcttgtgtcaagtcagctagaaagaggtggagtaaaaactggcctgctgagtagtacccataatccatgtcctccccaaccccccaactacacatcaacctgcagggagtgacttcttactcttgagacgctctttcctcttgcttaatggttcgtgacagttcttcattttcctcctaccactctcaatttttttttttttttggctggcttattctcctgtatctggccattaaatgttgatgtcccaccaagcagccttaggcccttctgtcattcttctttcccttaacagtcacagccatgtccatggtctcactcatgggtgaatccaacatttttatctctaccccaacctctgctgttgagtacttcatttgctaatatctaattgcctactagacatctctacttggatgtcccaaaactaataaattcagtatgtccaagatttatttcatactcttcctccaaaaatgctgttggctatctcagtgaaaggcatcaccacctaagcagttgtgcaagtcagaaacctgggacttgtccatgattctcttcctcccctcccccaccaaattcaatcaatcaccaggccccattgattgtttttcacgttcttttattgtgaactataacttacagaaaaatcattgagcggtgcatctttttgttgttgtaatcaccaaagtataaccctgtaaccaacattccggtcattaaatagaccaatgccagcactccagaaagccctcccttaactttcccctagtcaactatatgcgtcccccttctcaaaagttacctctgtcctgacttttatgagaatcattttcttacttttctaagatcgcacctaaacttagtagtttagttttgctatttgaactttatataaatggaaccat

SEQ ID NO: 125513 - DNA, 1221 bp, Homo sapiens
catttttaagggtactgctcagtagtgtaaagtatattcatattgttgtacaaccagtctccaaaactttttcctagccattaaacaagtacttaatacttcccctacccttggcagtcaccattctactttctgtttctatgaatttgactactctagatagctcatgcaagtggaatcatatagtgtttgcccttttgtaactggtttgtttcacttagcacaatgttctcaaggtccatactattttgtgacttttgaatactttactttgtttattatccatttttaaaagagcactaaagtaaaaagacatgaccttattcagagctgattaattacatggtaaaaagttgaaggctggcgtgtcttattcatttcaaccaatattaaatgccagtttgggcagcaaaacaactttctgccaaagtgccatttgaagcctggtttatgacatgtttctccttttgtcatctttgggtgccacccaaaatgcaggctcaaggccgcagcctcttgactctgttcaacagtttccccccttggcttattgtccaacattggcctactcttccaaatccacctctttatcccaggaacaagctgcttctatgccaagggcatggcttcctctttgcagattgtctcatatctctgacctggaaaaaagggggtttttcattctgctagctttttagtgctgctttgagatcattattctagagccctctgcagtaatgttttttctcatggattgaaattcattgtttccagtaggatttttgactagacgtggaaacagaaggacaaattgaaatgactctgaagcttatgggaggactgagtatcattaactggcacagagggagaaaggcaggctctaggtggaaggtatgtgacttgcttttgaaaacagtggtgtgagattctggcctgtgaaaacagctggagttacgagatagaaatggggacttaaaaaatagcttcataccagacgtggtggctcacgcctgtaatcccagcactttgggaggctgagacaggcggatcatcttaggtcaggagtttgagaccagcctgaccaacatggagaaaccccgtctctactaaaaatacaaaaattagccaggcgtggtggtacatgcctgtaatcccagctactcgggaggctgaggcaggagaatcgcttgaactcaggcggcagaggttgcagtgacccaa

SEQ ID NO: 125514 - DNA, 1295 bp, Homo sapiens
gcttatctcactctccagtttgaaagctactaaacgtctttcatagcaattagaataaaattcaaactcttcggcatggcctacacacaaggccctaaataatgtaaatgattggactcgctcccagttctcctgtcactctcctcaatcaccatgccccagcctcagtggccttccttggcacacccacagctcattcctacctcaaggcctttgacttgccattgctcatgagaccgattgcttaccatcactcaggatctcattcaaaacttcattcctggaaaaggtccttcccgaccatcaagctagaggagcttgctgcaccccttctctgcccacagctatggatctccaagtgtgggcttcagaccagaagcgtcagtgttgcctgcaagcatttcattttgtgttgtgttttctctggaaatgcagagtcttaggccccaccacagacccactgaaggaacagctacattttaaccagaccccagagtgattgtgctttaaaaatttcagaagcactgatctagagtttccccttctaattttcctgtgtatctgttacaaggtgtgtccattgctgcaggtaatctggcatttgtttacctgtttattatttctcttccctaaatagaatttaaggtccacaagggcagcacctcgtctggctcgttcacttctggatccccggcacgtagcgtcagtgcacacagtacatgctcaataagtatttagatgagtgaaagaataaatgaatataatggaaattattttatgttctttgaaatgtataactgaaggctgggtgtcatagctcagcctgtaatcccagcactttgggaggccaaggtgggaggattgcttgagtccagtacttcaagaccagccttggcacatggcaaagctgcaactctataaaaaaataccaaaaaaaaaatatatatatatagctgggtgtggtagtctcagctacttcgggaggctgaggcaggagaatcacttgaacctcggaggtcaaggctgcagtgagtcatgattgcaactgcactgtagcctgggcaacagaggaacatcctgtctcaaaaaaacaaaacaaaacaaaacaaacaaaaaggattgcataattctacaataaaaatcttcatggctttcacttgtttgtaaaatcggggtgatttttctctcccaacatcatcgttatacaggggtttcattctatatcttgggcatcaagtgctattaaactattgtggcctgtgaagaattacttatttatccttgctttggggcag

SEQ ID NO: 125515 - DNA, 9055 bp, Homo sapiens
ctgccttagtctcccaactagctgggattacaggtgcacaccaccatgtccggctaattttttgtattttgagtagagacgggtttcaccatgctggccagcctggtctcgaactcttgaccttgtgatctgctcgcctcggcctcccaaggtggtgggattataggtgtgatccacgggcccggccctacatttaaaaaatacattcccagtatatttcttaatgcatatcctggtgaaatttgtgaagaaacaacttttcaatctatattctttgagtgaataaatagcacaacttacattctatggttttcaactgggggcagtcgtgtcccagcggatgtttggcaatggctgtgactgcatttttggtagtcacacctgggatggaggagtactggcagcatctagttgggggagctctggggtactgttagttatgtaatgcacagaacaccccacagcacaaagaattatctagcccaaaatgtcagtagtccactgttaagagacagtggacaactgtctccttctgcatagagaagtctccttctgcaaatactaatgccattggaaaacgaatactttgccctaccttctggagaagagaatatatagaaattggcaactgagagattcagatgggtatactggcacctttagatatgttcattttagatgattatttctaatcagaaatctagtgactggcctccctctctttggggcaaatcactctctcaacacaggacatttaagacatttcacaacttagttgattttagaattggataacgttctcaaataatgatacattttttaaaatagggaaattcaaatatagggttactggttttccttattttacagatggggtcgaggatttggtcttttgggttccatttttggaaaggatggtgtattaaaccagccaaacagtgtctttggacttatattttatatactacagttattacttggtaagtatttatcaatacaaaaataagtttgttatattccgtttagtactttgtgtctttgccctgaagtgtcttgatgttaaagcatgtgttatttatagaaccactagcgtgtacaacatttttgtgttatgaaaacttgattcactgagatttttattatattattgttgaatttatgtcaattgctgtttaatcatggagagcagtatctcatgatgtccagaaaaaccagtcccattccaggaaattatcactcccatcttccctgttaacgtttttccttattttatagactcagtggccttgaaaaatatcatatattaaggggacattaacaagaaaccatattcataatcccattacctttacatatccactatttccacagtcttctgcttttaaaaataatttttgggctgggtgcggtggtgcacacctgtaatcccagcacttagggaggccaagataggcagatcatctgaggttgggagttcgagaccagcctggccaacataaagaaaccctgtctctactaaaaatacaaaattagctgggcgaggtggtgcatgcctgtaatcccagctactcatgaggctgaggctggagagtcacttgaacccgggagacggaggttgtagtgagctgagatcgcgccattgcactccagcctgggcaacaagagcgaaactccgtctcacaaaaaagaaataaataataataataataataacttggggccaggtgcagtggctcacacctgtaatcctaggactttgggaggccgagaagggcagattacttgagcccaggagcaacatggtgagactctgtctctgtagaaaatacaaaaattagccaggtgtggtggcacacacctgtagtcccagctacttgaaaggctgaggtgagagaatcacttgagtccaagagatggaggttgcagggagccgagatcacaccactgcactccagcctgggggtcagagcaagacgctgtctcaaaaactaataatttaatgtgaactgtgtttcaacatagtgtcgtttatcctaagtgttattgttaacatctaggtttcactccttttacttccaaataatgctgcagtgatcaactttgtttaaagacctcctgctccttccttcctttgaattatctccacaaaataaatttccaagcatagtatcaaaaaacacagatattttcaattttaatcagtgttaccaatttgcttttccctcagttctttggtttccctgaagctccagcggtctttatttttaagacatgctttgtaaaatttcttttttttttaattgtaacgataatcttcacctggaaaaattgctaatagttacacattagtacctattactttaatttttactctttttaatttccttttattgcccatttagcatttagttattggatcccgatactagtacatttttatatgtgttacaaacattttatgcattctttatccttttttgttagtgttatgaatttgtattgtattaagtttttatacttttagagttaaatccatctgttgatgcctttgcattttatttttcttcttttttgtagatcttgttgcataccaatgcttttgtattttaattgttaatattccattacctgtcagctcttctgatttggttcattaaaaatacatgtaactcttctatctgaaattgatttgttatgaggcaaattataaatctaaatcatcctcagtagttctgtcgagtttgcccagttccatatctatgtatttatcttgcagaagtagaaagatgtgtgcacaaggatattcatagcagtacagtgtaaaatagcaaaaaaaaaatggaggtaggttacaaatagataatggttgaataaattagaaaatactatgaaatactatgtagccattaaaggaaaaaggagatctatgtttatatcctagaaagataaagacactatttagtgaaaaaagcaaattttggtataataggtataggataaacgtgtttgtatacatgcatgtaaatgcatagaaaagggtcgggtggttggggaggagggagaaatttcactaggtattctgcatgtttccattttgctggatttctagagaagaatatgaagtataagcccagatgcaagatgttttcctttaaaggcaaagaacctaagaacagcctttgactagattaactcttgaagatagaggtgtgacagccaaatttttgttttaccattaatttaatgccatggtatatacatattttaaatcatatttatcacatgtgttttttcattcgcattttttgactcgcatttagatgcttcacgtgccttttaatgttggtgtcttcatgggaggcacatttgaactaacctagcaatttccagagcacagcatctgtactcccttctaacctgtttgagacacagcatttttaatttaattttttcataggtaatccattcacgtggttcaaaagtttttaaaaaggaccgggcacagtggctcatgccaataattccagcattttgggaggccaagatgggtggatcacgaggtcaggagttcaagaccagcctggccaacatggtgaaaccccatctctactaaaaatacaaaaattagccaggtgtggtgccgcacacctgtaatcccagctacttgggaggctgaggcaggagaattgtttgaacctgggagacagaggttgcagtgagctaatgtcgcaccattgcactccagcctcggtgacagagcgagactccttcaggaaaaaaaaaatatatatatatatacatatataaaatgttacacaaagaaaaatctatcccaccccttccctttatgcctggtttccagtgctcctcagccccgactggtagcttgttattgtctctttatgcatatacgagaaagtacaaatacacaatcttaattttcctcctttttaaaatataaaaggcagatgctatacccactgttctgcagcttgcattttctttttttgcctgatgaatatatcatggtgatttttccatatcagtatattaaatgtcttcattcttttctacagctgcagaataatccattgcataattgtaccatcatttatttagagttacagcacattttaaattccactgggaatttgaccctgagccaaacgtacctagctgcattacagtagcatttaatggatatctggtatttatacactattctaagtgctttaatcctgcattatctcagctcatttaattgcccagcagtcttaagaagtaggcatgattgttatcccaattttacagttgagaaaagaaaggcatagaggaagaaataagttgcccgtatcattctgaagttaactttcttaggtaaaattgtgaccacattaatttcgaaatgttagttgtttagcataggtgaagtcagcaaactttttcagtaaagggcctggcagaaaataggctttgccagttgccgcagccactcaactcttctagtatgaaagcagtcacagacattacgtaatgaatgacattacataaatgaatgagcatggctgggtgccaataaaactttatttacaaaagcaggtagctggccagatttgctagtccctgcaacaagtaattcagcagcaccttagtcttgaagtgccctatgaaagcatctaggcccgtggctgtgcggcagccggcccacaggcgtcttcttgttgcatttttttttttgccaacagggcccaggatttcagctctttaactgacttctttatacctgctcccacctgttattttgttcctgtttctgttatccttatccatgagtcattgggtaggagggtagtttaacatgctctgccttctctgtccttgaaaataaatgcacatattctctatactgttgcctataagaaattaaaaacaatacatgtgaagatagagtccagaattcaggtgcctttttttttccttttttttttttttttttttttttgagacagagttaagactctgtcgcccaggctggagtccactggtgcaatcttatctcactgcaacctccgcctcctgggttcaagtaattctcgtgcctcagcctcccttgtagctggggttgcaagcgtgcaataccatgcccagctaattttttttttctcttgtactttttagtagagaggggctttcaccatgttggccaggctggtctcaaattcctgacctcaaatgatctgcctgccttagcctcccaaagtcctagcattacaggcatgagccactgtgcgtggcttcaggtgcctttttgtattgagagcctggatttagcacacatgtccaccatttttcttgatcaggtttgacccacatgcagccaacgggcaaaatgtggtttcccttatccaccagggtgagcccttcctgaaatgtttatcaagagtttctttttctctcttcagcagcttgttggtgtagtcacctctcattgtggatttttaatcaatttgatctaaacatggaaaagcaaattttactttccacagatgggcaggatgtagtgaaagtccagagaaggttctcaccaaatgtgtgcagctcggaagaaaaaggttgtggtcctcatgtcccgttattcatttggtgtcttggggctgttgatgttacaagtcagcttcattgcttaatgtgattgtgagattgcatgttttctttgtgtgcatattttcaactaggctagtttgtgaaattagtaatgttttacctgaaagattgagaaatcaaaaacatcacagctataaaactggcatttggctgggtatggtggcttatgcctgtaatcccggcactttgggaggctgaggcaggaggatcacctgaggttaggagttggagaccagcctggccaacaaaaaatcagccaggcgtggtggcacgtgcctgtaatcctggctacttgggaggctgaggcaggagaattgcttaaactcaggaggtagaggttgcatgagttgagattgtgccactgcactccagcctgggcggtagagtgagactccatctcaaaaaccccaaaacctggcattatcaactgcagagtcaacctgtataattttaacaaaacagagcagtatttctgttctcaattttcagagttggcaggaagatcagtattcaaacactgcagcaagtcacacagtgttattccttgtcactcagaaagcctctctccagcaccaaggcctgactgagcctgcgtctcttctcttacaggcatgacagcaagcgctgtggcggctttgatcctcatgacgtcctccatcatgtcggtcgtggggtccctgtacctggcctacattctgtactttgtgctgaaggagttctgcatcatctgcatcgtcacgtacgtgctgaacttccttcttctcattatcaactacaaacgactagtttacttgaacgaggcctggaagcggcagctgcaacccaagcaggactgacgcccgacagactccaccctaacagtctcaagcccctttccattcagtttattttgcagcaggtttttattattattattattattattattcacaacagacactttccctaagaatctcaaactgatttttaaaaatccggtaaattagaaggggccctcgctattttctgtgtcagtcttcattttaaatatggatacaaaaaggatacgccgagccaatcaaagacaagctttaactttactttgaagtgtttctgaaatgataaaatgtagccctagccccctgccctcaattgtaaagtgagcaaccattgctagtaattctttaatgtgtataaattcaatttcaggtataacaaatgtgatcatgacatgaaaatattctagaatagatactgtattaaatattgccatgtttacaatatgtaatatgtttttagccgatggatttaaacatgtagattcaactagaatccatttgtgatatttgtaaataaaggtagaaatattagatccatttctgcagaacttactgtacagtttagttggagtgtagcactgaagaactgtcagctcagcgttgactgaggagatagtgaaaatagcctatacacagcatcttgtgaaaagtactggcagccgtggttgcagcaaataatagggcaaaaaaaataataatagggtggtcggttccctttcatctccctcttctgaaaggaaaaaattgaattggaacgttcaagtccagtttgtgttcagtcataaaactgggccagttgttaaccttacagaatgagtcatgtggccagaccttcaagtccaaggccttcagacactaaggatgggaaaatgggtatttttctttggagaaaagctggaaatataaacatggcatttttaggtaaagtttcttccactagttgaattttcatgcagatatttttccttaacgttggtgccagtcaagcaaagagtattatgatggaaaagaccagtccaagccccatcgctccggagtgggagccagtgttcttgctaattgtttctttctgcactaaccactcagatgtctaatttaattgttttgcagtcaaatactggatttgtaaccttcagggctgacatgctgcccagtttgcttcatcgggagaatagcaacaggtagacacatctcaaggctaaatctgctcatgtcgccactgctctcataatgacacacatgcagtaagaagacttttgtaaggggatttgagtacacccaaatgaaattgtgacaggatgtttgtatggttaacatctgatatcagaatgttaaaagtgccttctgtcttaaatctcaaaccaaatattttgtgtgttgaccttgggcagaagaagtgtccttccctcctttcttcaccgtcaggtagaaaacctgcactctgcagaagggtcctgtgtgatcacttaatcctctggttgagaagcagcagtaatgtttttgcttccaacctgattaatcattttatgttgaaaatagtcaatgagaccagtatctcttgagtgctttatttgccttctctttgaagggaggggacgggctctgctctgtaaactcaaatgtgtagagtcagcaacaattccgtagcttccaactgactcagaattgatgcaacgtaggtcttctggcccgaggcaggtatcaagtccaaatcataatgaacttttcaccagtttcaaccagtttcttaaaagagagcttaagtcaagatttcatcaagacttgtgttttcccatgaatgtgaatctttcaatggctgttggagtatgtatgtactgttcttgcattctgaagtagttaaagaactctagaaagtactgattggccatctggtgtctatggagaaagaagtcctcacgtttgagggctgtacagtgaggccatcttgtagcagcgcatccagctctaccaaggcagtcctctggttcttttttctaagctacagtggaaatggcctaatggttaaaactgtggtatacatgacatcggttgtgctaaacaagttcctcgtgtcccaatatccaatggtttttcatcctattttgtatcaatcaacagagtatagttaaagcttgtcttgatgttgcattcttgcaaatgtcttcaactcttacctgagaaaacatggcaaaatggtcagccagacccttccagtttttcctttgcttttctaagcctcggggaaaccactgtttcagttgtataaaaacttttgccacattcctatggcccagtcgaattaataccctttttctcactgagagaggaacacgtactgcctgtcataacagcattgtaatgccagtgtctcagtaacagaatcctggtgggtgttaattgggtgttttttgccctggagaattcagattcctttctatacctccgattctgcccagaagagggggggaatcaccagtgttacaaaattagaagattgttttgcctgttttagactgaatatttgaacactgcagcattactagccaccagtgttaaaggacagatgaggggaa

SEQ ID NO: 125516 - DNA, 1513 bp, Homo sapiens
tgaaattaaaactgtttgctggctgggcatggtggctcacacctgtaatcccagcactttgggaggccgaggcggttggatcacctgaggtcagaagttcgagatcagcctgaccgacatagtggaaccctgtctttactaaaaatacaaaaattagctgggcatggtggcggcacctgtaatgccagctcctccagaggctgaggcaggagaattgcttgaacccagtaggtggaggttgcagtgagccacagttgcgccattgcactccagcctgggcaatgagtgaaactctgtctcaaataaaaaaataaaaataaaaactatttgttgacttttgtttttcatttagttttggaaaagactatttgcaaaagtacagagttatcttcagcaattacttcacaacttagattggtaccaagagtgacaggagatcttgtcttggaagatcattattagatgccaacaaggagacccactgtgatttctggtaacctatttggggaaaaagacctaatgacctaatatgcaatttctgtcctcgtgtctttttctctaacacacagtcatgggtgaaacatttcagacacctcaggcagcacttatggtttctaattgtgagaactacccttccatcaaacaaaaagggcaagggtgggagccccggctacttggttaaacattttttactacaaattcgcccagaaaaggtgaaatattttgttataaaactgtattaagcatggcctaagtatttattaggtatatgatctgtgtagtatgttccatcagaaatatttcttactagtgctttaagctccagagtaaacagtcatttaaaatggagttcactgggcaggtttcccctttaatctagatagaaatactctttatcagagatttaaggcactgttttgctaactggtaaataaaaccaaatgtaaatatgtaagaatgtttatttgttgcacataacttttttggtataaaataaatgtagaagttacctgtggaagttgtgctcccattattcttaaactgcagggttgcattccaaaagaactgaaacgaagtctttttagactcagtaggagccttatattcttgaagtcaatactgtaacctcatttctaaggtatacagggttgattctttttctcttaaatcatatgtaacttgcagaagattcagagtcctcagacctctagttcttggaattcctgtaggtttacggtgtatgtgattgtcaagaattaatgacaaaaatgtgtcactgcctacagttctgtgaacactcagaatgtattaatgagctgtttttccatagttttactttagcttaccttgaatactccctgtataatcctctaaaaaggtagcatcggcaagaaagatgaatccgttggaaatacagctgagccatacttcacggaatagaacaagtgtgttctgtgctggagctcaagacctgtggaaagggactgcccccactgggtgcaatggctcatgc

SEQ ID NO: 125517 - DNA, 1020 bp, Homo sapiens
catgttttgtttgactttataaccttattcagcaaagcagtagtgttgggactcaactgcaagtcactgtgatacgatgtcctgtgtcattttttctttttttcgaggtggagtttcgctcttgttgcccaggctggagtgcaatggcgtgatcttggttcactgcaacctccgcctccccagttcaagtgattctcctgtctcagcctcctgagtagctgggattacatgcgcctgccatcatgcccggctaattttttttttttttagtagaaatggagtttcaccatgttggacaggctagtcctgaactcctgacctcaaagaatccacccgccttggcctcccaaagtgctgggattacagacgtgagccaccgcgcacctggctctgtgtcatttttttctacagcatgttacttcctctgaagcatttggctctttaatcattttagtttttgcttcaggcacctagttcccaaagaactgcagcctggcttgtagccccagctctcatactgacatctcctccctaaagtatacagctctgtgttagggttgggattaggtctgccgggaatatagcaagaggacttgccttcaagacccagcttagatagggtcataaataactttgcatccctaaaaaggactcttctgggcacagattattcttgggagttgacaacgtatttggaatatgttcctctgggaccagcaaagctcagagtcgacggatgagttgtaggtttcctggtgtctgcagtcgggtaccctggctgctttcagagagtggagtcctgccccgtatctccccagagttttcccctttctctcccatgaacttttgcaagtcggggcttccctagctctttctctcatgtatgcttcagattacgtttacctcatggcagctttgtcttggttgttggggacacaaagatgaacacagtggaggtgctatggtagggacacggtggagagacactgaagtgtcagcaaacaccatgtgccaagtagg

SEQ ID NO: 125518 - DNA, 1046 bp, Homo sapiens
ttaaagatcctacttctagctgggcccctcatgtatccattggccgactgcagagtgtctctacctcctctccagagtatcattcctatctgctgccagagccacactgccatttactccaaggactttgtaaaattccacacctggaaagacctttagttgctcagtatccactttgtgtctccaaattgtgtaggactctgtaatcttttgactagtttctgagaaaacacaatgaagcatttcactttttttattgaaggccatttaataaaacacagctggtcagcccagtgcaaaccttattatctgccaccagtatgtaccattggttctcctcattccttgggccagcttctcaggtagctttagacctcaacaagttgtatctttgccagtgttccatcttgttcccctaaattaataaaatgcttttctccaggattttggcaaaggttggtgtggctgtggttttgctaatgcacctcctagatttcaaagatttaccagttttaccatgactcatatattaagatctgtttctactattcagttcctcaaactgaagctcattgaaaaaataatgtataatgttatttgttttattatagcaattattcctcattaaagcagtatttaatgcaatttccagttatttctttggagaatgttatgtccttgttgcattaccttaaaggttgtgaagatgtgatgtgtgttgcttgttcatcacaaaaatcagtaagcacaataaagtggatgccaaaccatcaaacacatagatgttcctgctgggtccctggatatgtaataagcaggtataaaaatattttaattatagttttcttacaaatataacttacgagaaaaaaatttgattggaataatactgtatattactaatttttaactatccctacccaaaccttatgactcacagaattttctcatatacagtattcagtgcacagaaaacttatgactggctcaagtacagtaagttacttctaagtaaaactctcaagtctgagtccatatttgtagct

SEQ ID NO: 125519 - DNA, 1014 bp, Homo sapiens
caggatggtcttgatctcctgacctcatgaaccgcccacctcaccctccctaagtgctgggattacaggcgtgagccatcatgcctggacccagaattcttttttaacaaaatatttgctttaagaaaatctgctttcaaatagtatatttttgagatcagattagtgatgtacatattgataggaaatatttgaaatattttaagtaaattaatgaatttgaattatttggcttatataaaagaacattttttaaaaatgtaatatgcctctgggactcatatttgctcaaatccaagagttggaagctgggtgatgggcgggtgaaaggaagtactatactttcctgtttatccttcaaaaccactgaccttggatagatatatttctcaaatttattcataaacgtcttttttgtatctcctcctaggtatttcagttactaactgatctgaaagagcagcgtaaagaaagtggaaagaataaacacagctctgggcaacagaacttgaacactatcacctatgaagtaaggctgggcttctgccaggcctacctaaagtaccattgagggaggggggtttattctcccaatgactggcagctgaaattaagattgctttttatatgatctgaatgttttattctaacctgatttttgtttgtttgtttgttttttgacacagagtctcgctctgtcgcccaggctggaatgcagtggtgtgatcttcgctcactgcaagctccacctcccaggttcatgccattcttctgcctcagcctcccgagtagctgggactgcaggcgccctccaccacggccagctgattttttgtatttttagtagagacagggtttcaccatgttagccaggatggtctcgatctcctgacctcgtgatccgtccgcctagacttcccaaagtgctgggattacaggcatgagccaccgcgcccagcctactctaacctaatttttattctgtttatagaagtgagaggagtttggtcaagt

SEQ ID NO: 125520 - DNA, 1050 bp, Homo sapiens
atggcgaaacctcatccctactaaaaatacagaaattagctgggcatggtggcgggcacctgtaatcccagctacttgggaggctgaggcaggagaatcgcttgaacctgggaggcggaagttgtagtgagcgaagtgtagtgagcgtgactgcactccagcctgggcgacaagagcgaaactccttctctagaaaacaaaaggaaataaaaggtttcacttacagtggcaagcacaaaggacttgagtgagaagttccctatattaacactagagccattttttctccctgggttcagaaaacagtcccagcatccaacatttattagcattcacttggaagccaggtgtcttttggaggctgaagcctcacctcttcagttacgcctgggctgtgatttgctgtggccctctgatgactgcctgctgactcagaggctcggtgaggaaatgaggtggccacccagcttaggacttgttgtgcccggttgtgtattgatttggaatgatttgtgagccctccggcctgaggtcagtgaatcctgtgacctcacaggccactgccctgaacagcactaccatctaggcctgttagtgatttcgtgattatgaagtcttgactcatatagagcgttattgcttgtaaaacactgttacatgtgttctccttttgtcctcgctgtaggcgttactttcattttacattagagaaagttgaaatttagaaagccagattcagtgaactgttctggatcaaatatttaatagtatacattgttgctatcagatctttgaatcattttgaggaaagtaggactttaggtttggcgacttcaagttgccatttttggaggtcggcaacccggtttgatgctcctgggattgagataataaatgtatcatttatgttaacccagctgttgatactttggatttttaagttttatttccccttatgttctcaactacctgaaatggttggtatctgagaaccttgagatggtgctttgaactttacttctttatttggactgtttctcctgtgttgga

SEQ ID NO: 125521 - DNA, 1052 bp, Homo sapiens
cctccccggtttaagcaattcttttgcctcagcctcttgagtagctgggacttcaggcatgtaccaccacgcctggctaatttttttttttttttttttttggtatttttagtagagacagggttttgccatgttggccatgctggtctcgaactcctgacctcaagtgatccacccgcttcagcctcccagagtgctgggattacaggcatgagccactgcacctggccatagcagtggtttctgatcaaatatttgatgcccagcttttcatagagaacatcacaaaattccagctccaagtaattttgggctagaggcataatttcccacaacaaacatgggaaacctactttcatatgagagtgactaggctaaagcaaaactaaactggaaaatatacaggaaaggtagagctatttgccaggctactttctagcctccgtatatatctgttatttcttgagtccaaatctagttctccattcttaatctctcccagatgaaatcttcagggacttgcagaaagtgtgcaaatatgcatcctgctcatttttataagtaaagcataatggctacatggatttatagttttcttctgtcattctaattagatctgaggtggtcatgataggacaattctggagaaaatacagttcaaaagctgagtatatttttaaaaactatttgctaatgaaagccttataaataatagcagatggtcttaaatttacttcatttgcaccataattgttgcatacctggctttttgttcatgccaagcctaataatgactgggacgtaccatggtatacagtcagacctgggttccagcttggcaaataatttgccatgtagcagtatattaaggaagttttttattccttctgggcctcagtttccttatgtgtaaaattctagaacagaaatgttcctttaccttatttttcgttgcagcaatgtaagggattgcaaaaaagattttgattcattcatcaacaagagtgcaaagtgatgatagaggcagatgaaatagactgatcaataaaggg

SEQ ID NO: 125522 - DNA, 1064 bp, Homo sapiens
aaaaaaaaaggaggtgaactctgtatttttagttttttttaaatgtagtcaaaccatattataacactggaaccagaagaaaaaagtaatgttctaatcctaggaaagcattagctgtctgggcttttattgagaaagttttagcaggatcagtcaatgcacatttatcaagtgctcaatatgcttgtagtatattgttatatactatggagaaactgaaaaagataagatatagtcaatatgtcccaagaactcacaactaattatacttatagaatctaattacagccataattaccttattggcaatctaaaattcattaattcattcaaaaggctctagtttcaaggagctcacagcctactggaaaaacagacaaagtaaccatgtagtgtgagatgtgatatagggtaaatacaagggcactaggaaggacacctgtgtcgtatgtggcagagagctttcaggaaagctgcgcaggaaagatggcattaaagtggaatgttgaaggatgagtgagagtcatcaggcagagagacacgcaaaagctgcagtgcatgcggaggctcaaacaaggaagggatgcttcaggtggatgacagtggcactgggtgagtgtgtgggggtggtgggtgggtgggtggtgaaacaggctggggagcagacaagggctgggtcaggaacggccttgtactaacgttatggtgaggacttaatttttttgaaaaaagtagaaagttgtggaagaggtttaagcaagggagcatcataagtatatttgcattttagaaaggtcgttcctggctgggagcggtggctaacacctgtaatcccaatgttttgggaggccaaggtgggtagatcacctgaggtcaggagtttgagaccagactggacaacatggtgaaaccccgtctctactaaaaatgcaaaaattagctgggtgtggtggcacatgcctgtaatcccagctactcgggaggctgaggcaggagaattgcttgaacctgggaggtggaggttgcagtgagccgagattgtgccactgcactccagcctgggc

SEQ ID NO: 125523 - DNA, 1064 bp, Homo sapiens
ctttggaaggccgagatgcgagtgagcccaggatttcaagactagcctgggcaacatagtgagacccccatctctacaaagaatataaaaattatccaggcatggtggcacatgactctagtcccagctacttgggaggctgaggtgggaggattgattgagcctgagaggtcaaggctgcagtgagctgagagtatgccactgtactgtagcctgggtgacagagcaagaccccgtctcaaaataagaaaaaagaatgaagaaaaattatatttgtagaatgctttcttatcagcagtcttccactgcattttaaggataactggctcgttggggatagttcttagggtattttgctcagtttctaggaatgatactcactgttgggagatttattctcagccaattactgcagatctgcataaacaccataattattagtgaccttacttctgatttctttctttctgtaaatctaatagccactttacttttaaacctttgtttagatgaggcataatttttggatacctaaaagctaaacattggttacactagaaaaattattaaacactagccttctgattaagagaaagttgctattaaagtgacattacagtttttattttaataagttatgctcacgtctttacaatatattatttcagaaagtgctgaaaattcagagctagattatatagcctaccagttgagtctatttcaaatcagatcttatacattcttttctttattgcagtaagatatatttaacataaaatttaccactctgacactttttaaagtgcacaattcagtggcattaaatacattcacattgttgtgcaactgtcaccaccgtccatctccagaacattttttgtcttcccaaactgaaattctgtacccatactcttcattgcctggtccctgtcaactgcagttttttgtgtcacttgtatatattcttttttgaaactacatttcaaataagacaaccatgctagcataagttcactgataggctatttgattccaaggtgaaaattccttggctttgtctgata

SEQ ID NO: 125524 - DNA, 1176 bp, Homo sapiens
atttgagacagagtcttgctctgttggcacaatcttggcttactgcaacctgtgtctcctgggttcaagtgatgattctcttgcctcaggtgggattataggcacatgctaccacgcctggctaattttttttaattttttatttttagtaaagttagggtttcgttgtgttggcctggctgatctcaaactcctgacctcaagtgatctacctgccttggcctcccaaagtgctaggattacatgagccactctttaaagttttatatgtattaaagttttgtgagctctttgtaattggtaattcatagctatctcctttgcacaatagtgaaagggttttttattaccaagatacatgtacaatgctattttgagggttcttaggcagtagacattatagttttcctacatgcaaattggcttggctagattatcctttgctttcttgagtggtgggttgggaagaatgctatggtttgaatccatgtgactaaagaatctatttcatacacacttgtggtttttgaaaggatttcaaaatacccactgaaattaaaaaacacccacccttcccccccccctcccccaccgtctctgcctatctttaaagtgacagataattttgaggaagaaaagatgaagtgtgaactatagtggtgtttttgggccttttgtggtaatgcatacaaactgacagtcttgtcttgtgagggtaggtttcataagacctttttgcaaactaaatcctgtgtatcttcaaagcttttttgcctgtaataagtcagatgctaatgtatccagcactgatgatcatgaggtttttgtaaagcagtgcttgaaaagagattgttgaccgttagctatgatatgagatgggccccagagaaagaggtggctggcgaaggtgttttccttagttatggggtgagagtgggagaaaaataacattttgactgagaatataggatttatatctctaagcctaaaaatactgggttggtttttttttttttttttttttggtacaattctgggtagtctgcaagtaatattgagtcagcacattttagggacatattacccaatattgaatggataatcatgcttcatggttactgtgactcacatagtaaattggtaatgaaacgttaacatattttataccctgtccca

SEQ ID NO: 125525 - DNA, 1042 bp, Homo sapiens
ttgcatagattcttaaccttttagacttaggaacttatttgagaatttgatgaatcctgtggatccccacctcagaaatacagacacatgaatacacagatttcactcacaatttcagtggatacatagatataccagaagtccatcagattaaggactcctattagccacaatttcagtggatgcatgtgtgccagaagcctgacagattaaggactcctattttatagtctccttgctcaagctcatccactcatagggctttcattacagcctatttgctgattatcataaatctgtatttcctagtgggtctctttcctgagccctaggttcattatttccaactgtcttctgtatgtgtccaccgaaatgctctcaaggacctcaaattcaaagtccaaaattgaatttattttctaaacttgttccctgagaggcagaagctaggtggaattgttcattaaactgagcaggaatccaccttgagagtggggatgatgctgtgctcatctatacttgcggtacctatgagccagagagcagatttgaggaacagagtcctcagggcacatggctcaaaccccaaaacaattcaagaacctggttgctaaagttagagagctgaaaagcagatccaatttatgaatggaatatttagttggaaacctgagtagatagtactgaggaagagcaagtgatcaaatggaaaagcatgtaccaaggtgcagaacccacagtaacagacaagaagaaacatgaaaatgaagtcagctgggggacaggggttagattaaatccctaaaccaaacaacaaaaagctgcagcagcagttggaattgatattcttacattaaaggtaaagcctggaatgaatgcatacttgtgttttctggttcctatactcagcaaaaactgcttgttcctgtttttttctatctccatacatagcatgcttattcacccagttacccaaattaggtctcctcacttaaaattcatgaatgactccactgttactacaggatagagtctagacttc

SEQ ID NO: 125526 - DNA, 1046 bp, Homo sapiens
agtaaaagttccccagtttgagaaaagaggggaaaaggactccagtgaaaggaaattgatgaaattactgttgactttacttgtatatattaactgtctttcagtgtctctgaaaacttgatttgggactatttcctttgaacagaaataatagcattcctgcctgataaatgtcctgtggtcaaataatatgatttcctaatcattctgcacactaaacttccccccaccaggaaatcaatgccttaatgctaaatttcctctgtactactttctgtaagagtaagaggttcctatttcacagtcacgacacattcccaactcaattcacattccaatccatcttgtccaacttcattgaaagttgatacactgaaccatttcctttacttaaaagaaatagaattcttcctaaattctatctactgttggaatagaaagaatatcatgcttctagactgactaattttttttcttcttgatataagtattgacaacatttattcatttgtttctaggcagcacaagactgttgaactttcctagaactgagtctgagatttgcaaagctgccaaaatattttgaaacaaatgaaaatatgtaaacatgaatgttatcagctgttttacagtatttgtgttttagagataatgagcatctggtggaccacaggagcccagggggatttcaaactccagattcctttttgtgtaatcatatctggctggagttatttgttttctctgcatgtgaaactatcaagtcataattcttcaaaggggaatgtttattgcattatttaaaaataataaattatattactaaataaataacagcaggccaggcataaaccaatgatgaaagtttgtcagaaactaaggcttctgattaattctgtgctctggactataattggaaggaaggattatattagagtttacaatgagtttacagaaagaaaggagagggataaattatatttagttcacagtaaatctgaattcagaacccctggttgtaagactagtcttttaacctttagagt

SEQ ID NO: 125527 - DNA, 1169 bp, Homo sapiens
gcccctgatctgcaggaacctccccaaccgcctggcttgtctaggcctgtagctgggaaggaagagacgaagacacagggagaacacaccgggactccacacctgtaaccacattctgtttgttcgccctaggaaagattgctgccttttcagcagaagggaaattcctaggattggctgtcccctgccaagcttggtggagcgtctgcaccttggctgcgccgcctgtgcatttgccagtttcctcccactgagaggatggaggtgtccgcacagctttgggcctcgtgagggatctgcctcctgagcaaagagctcttgatcccgatttcatgcacagccctgcagtaaggagcccagaaggaacatgtgtttcctgttaaaactcctcttgttctcttttcttacattatgacgtttgttttcaaggagagggtttaaaaatgggatcctgtaagcagacttgggcagtctccttttgaaataggttgtctgtacatgttctaatgttttgtagaacacgtgtgcctgtttaagtgtattgatgtgaataatattaaatatcctaattatttaattcattgtattgtttctgagaagttgggaaattaccattatacatttacaacctaatgacttttgtattttatttttcaaaataaaagctttcaatgtgaagcattctggtagttacatgttttcattaatgtgatttcagagaagcacagaccttatcagatgctgatgtgataaaccaaagtttccttggttggctgtattgtagatactcccctggagccatcacctttttttggaggggggtggtgggtagaggcagggtctcgctacattccccagcctgggctcaaacgatccttctgcctcagcctcccaaagtactaaaattacaggtgtgagccacggtgcttggcctgcattatcattttgtagtgaagttttctttttatttcaagagagaacctattgccatccactttgagaatcctgttctatttcatgcttgcagactgtatttaaggacatggaagttactatttccacttgttttctagaagcctttgttatgaaacccaggatgtccagatagtagtaataattcccatattgagtgtgttcacatatgtgccagccatgaaaagggtatataa

SEQ ID NO: 125528 - DNA, 1768 bp, Homo sapiens
ctccacttttctcttcctccgctgatgcctcccagctctcgtcagcctcctgctggccatctccttaacaccaaacactatgccttcaattcagttgcagagttttgatggagagatatttgcagttgatgtggaaattgccaaacaatctgtgactatcaagaccacgttggaagatttgggaatggatgatgaaggagatgacccagttcctctaccaaatgtgaatgcagcagtattaaaaaaggtcattcagtggtgcacccaccacaaggatgaccctcctccccctgaagatgatgagaacaaagaaaagcaaacagacgatatccctgtttgggaccaagaattcctgaaagttgctcaaggaacactttttgaactcattcgggctgcaaactacttagacatcaaaggtttgcttgatgttacatgcaagactgttgccaatatgatcaaggggaaaactcctgaggagattcgcaagacattcaatatcaaaaatgactttactgaagaggaggaagcccaggtacgcaaagagaaccagtggtgtgaagagaagtgaaatgttgtgcctgacactgtaacactgtaaggattgttccaaatactagttgcactgctctgtttataattgttaatattagacaaacagtagacaaaagcagtggcaagtcaattgtattagcagaatattgtcctcattgcatgtgcagtttgagtacagattccaaacctatggctgagtttcttctagtatgatcaaaagtttcttttttttttttttgctctgaataaaactgaactgtgggttctctataagtggcattttgggttttccttcttttttgtaaagtaatgtctgcctagtttattgtccagttaactttagtgaccttttaaaagttggcattgtaaataaaacaacttgcaaaaaagttttctggaatagaattaacaaaatattatctttattcatgagttggaaactggaaaaaggcttcttgaagtaaatgttctgagtggagttaactaggatgtcttccagcctcctgcagtcaaggagtaccactgtaatgattagtctgtatgtagcagggctcccttcattgcatttgaggacttgttttctttttctttaattttatttttaatcctcttagttttaaatatattgcctagagactcggttactacccagtttgtggttttttgggagaaatataactggacagtttgttagcttttcaattaaaaagacacttaacccatgtgggatgtcatgtttttataatcattgttcccatgtggagaaaattattcacactacttgcatgtaaaaaataatttaactttttacattaaaatatgtggtaaaacccagaaagcatccatcatgaatgcaagatactttcaataaaaagtaagttataaaaaaaaagtcttacccagtcttacccaattcttatttataagttccatataagtagaaaagaaaaataaatagatcaagacatagtaacagtaattataacctagaattaaaagattaaaggaaccaaacaataaaataagcaaaagttatgtaattcacacagtagcctcataagggaataaaagcactcaaaagttaagataaggcctgtgcactgcccaatgtatctgtcccccacacgttgtctttcatggcagatgggccaaggagggttccccaggaagctgacctcagggatgatctaagagctgaaagaaccctttggtatac

SEQ ID NO: 125529 - DNA, 1056 bp, Homo sapiens
gaacactttcttctctctcctccctctgccccaccctcatcatctgccaagtcctacccattctaaccctcatagctcttttttttttgagatggagtttcactcatctcccaggctggagtgcagtggcgtgatgttggctcactgcaagctccgcctcccgggttcacgccattctcctgcctcagcctcccggagtagctgggactacaggcgccctccaccacacccggctaattttttgtatatatatatatatttttttagtagagatggggtttcactgcgttagccaggatggtctcgatctcctgacctcatgatccacctgcctcggcctcccaaagtgctgggattacaggcatgagccactgtgcctggccccctgatagcttttaaatcaggtctctccacctcaactccattatcgctgctctagagctcaagccttcagtgtcctttcacttcctgaatttactatcttagtgctcttgctcacattgtcttctttgcccaaaatgctcttaccagtctccttcttctgtctatatggcaagttaaatggacccatacagtgttataggttgttcactgcataaaagcacctggatgagagtcatctgctatgtgccctttttctttttttttttttttttgagacggagtcccagcctgtgtcacccaggctggagttcagtggcgcgatctcggctcactgcaacctccgcctctcgggttcacaccattctcctgcctcagcctcccgagtagctgggactacaggtgcctgccaccacgactggctaattttttgtatttttagtagagatagggtttcaccgtgttagccaggattgtctcgatctcctgacctcatgatccgcccgccttggcctccccaagtgctgggattaccggcgtgagccaccacgcccggcctgctatgtgccctttttctaattcacaccaacacaccatacagtttagtggcatctactcattctagaaatttctattcaagttcccctcatctgtgagcatttctgtctactgtcc

SEQ ID NO: 125530 - DNA, 1011 bp, Homo sapiens
actaaactgtatggtgtgttggtgtgaattagaaaaagggcacatagcaggccgggcgtggtggctcacgccggtaatcccagcacttggggaggccaaggcgggcggatcatgaggtcaggagatcgagacaatcctggctaacacggtgaaaccctatctctactaaaaatacaaaaaattagccagtcgtggtggcaggcacctgtagtcccagctactcgggaggctgaggcaggagaatggtgtgaacccgagaggcggaggttgcagtgagccgagatcgcgccactgaactccagcctgggtgacacaggctgggactccgtctcaaaaaaaaaaaaaaaaagaaaaagggcacatagcagatgactctcatccaggtgcttttatgcagtgaacaacctataacactgtatgggtccatttaacttgccatatagacagaagaaggagactggtaagagcattttgggcaaagaagacaatgtgagcaagagcactaagatagtaaattcaggaagtgaaaggacactgaaggcttgagctctagagcagcgataatggagttgaggtggagagacctgatttaaaagctatcagggggccaggcacagtggctcatgcctgtaatcccagcactttgggaggccgaggcaggtggatcatgaggtcaggagatcgagaccatcctggctaacgcagtgaaaccccatctctactaaaaaaatatatatatatatacaaaaaattagccgggtgtggtggagggcgcctgtagtcccagctactccgggaggctgaggcaggagaatggcgtgaacccgggaggcggagcttgcagtgagccaacatcacgccactgcactccagcctgggagatgagtgaaactccatctcaaaaaaaaaagagctatgagggttagaatgggtaggacttggcagatgatgagggtggggcagagggaggagagagaagaaagtgttcagatggacccgtgggcttgagtg

SEQ ID NO: 125531 - DNA, 1059 bp, Homo sapiens
attactgctatcttgtattttaattttttctgcttattagatgtttgaaatggtggctcacgcctgtaatcctcgcactttgggaggccaaagtgggaggattgcttgaggtcaggggttggagaccagcctgggcaaaatagcaagactgcatctctacaaaaaaaaaaaaaagatagccgggcgcagtggctcacgcctgtaatcccagtactttgggaggctgaggcaggcggatcacgaggtcaggagatcaagaccatcctggctaacacggtgaaaccctgtctctactaaaaatacaaaaaattagctgggcatggtggcaggcgcctgtagtcccagctactcgggaggctgaggcaggagaatggcgtgaacctgggaggtggaacttgcagtgagccgagatggcgccactgcactccagcctgggcgacagagccagactccgtctcaaaaaaaaaaaaaaaaaaaagatgcttgacgtgaatgtatactcatttcctagttgtttctttctataaggatgtctgacctggctaatttgtaaacaggaattctgcattcatttctctctttgctttctcaaccccaattgagcacacaagtgtttaatgagtacttaactgatttgataagaataactcattgatttctttgattttttgttgctggttttcagtgaaaaaaatgttatcagccgcacacggtggctcacgcctgtaatcccagcactttgggaagctgaggcgggtggatcatgaggtcacgagatccagaccatcctggctaacatggtaaaaccccatctctaataaaaatacaaaaaattagccgggcatggttgcaggcgcctgtagtctcagttactcaggaggctgaggcaggagaatggcgtgaacccgggaggcggagcttgcagtgagccgagattgtgccactgcactccagcctgagcgacagagcgagactccatctcaaaaaaaaaaaaaatgatatcagtacttactcattgtgatgtctacatatagaactaaaattctgtttacttatgtg

SEQ ID NO: 125532 - DNA, 1111 bp, Homo sapiens
acctgtaatctcagcactttgggaggccaaggcgggcggatcacgaggtcaggagatagagaccatcctggctaacacagttaaaccccgtctctactaaaaatattttaaaaaattagctgggtgtgatggtgggcgcctgtagtcccagctactcgggaggctgaagcaggagaatcgctggaacctgggaggcggagcttgcagtgagccgagatcgcaccactgcactccagcgtgggcgacagagcgagactccatctcaaaaacaaacaaacaaaactacagaataatgaaatagaatgtccaaaatttatcataactggtgtctcacgagataatacgtttgggtcctgtttagcaagttggattatatttttatttgtgtaaatttattggccgttgcagttggggttgtattgagaatgtagattttgtctgatgagagtgtagattttatttgtagtgagtgcatgtggatttttatttgtctagggttttaaaagttgtatagtcatgaatggacactttttaataccatctatgagaaattcaatggcaaagtgttttcatacccatatgctaactgctgatgctttttataaaacattgttaaggtgttacttgccccaggaaatacaatgttttatgacagagacagtactgaaattcagtatttaagttctttaaataccagctatgttgagtagatattactttctcccaagagcctatttttggtttatgacatattagggaacaaattgcagacacagttttttcattacctgtaagagcacttataggatgtaagctatttccttaaagaggaatttttgcctttttaatacttctgtctagtaactcaatgcattaaaagatacatatttttctagtgctataaatatattggtacatttaaatataatatacacacatataatggtgcttgagaaataagttgagattattttaaggttaaggttcttagattctgacagaaaaactgatcagccagttggactacaggtccaaccagttccagccccaaacatgagcaatagtgattatggtagtgattctgccatttacgtcagtgaaatgcaaagat

SEQ ID NO: 125533 - DNA, 1014 bp, Homo sapiens
caagaattgcttgaacccggaaggcggaggttgcagtgagctgagactgtgccactgcactccagcctgggcaacagatcgagactctgtcttcaaaaaagagagagagaaagagaaaaacttattggaaggctttgctaaatgaattttccatcttggaatcaccattttggtgagttattgtattaatagtttaaaaaaaaaagagcttcaagtttttagggattctttatggattcaaccttcactgatactagactttaggatatacttagcacatgtgtgtgtcagagaaatctccatttgtatacctcagagagctctacgatgttatggtaaacctcagaaaaatgaaaggataagtttcatcagcattcatcagtcttgggagttgcaaatgcctttgtaatgtaggacagggagtgaccttgctgaagtctccccatttggcagggtgtacactgttaggtcctgtcagacaacttcagttagaactgaggttgctgtggaaggcagcccaacagttggaagaagatttttttgtttgtttgtttgtttgtttttgtcgagacagaatatcactctgtcgtccaagctggagtacagtggtgtgacctcggctcactgcaactctgcctcccaggttcaagtgattctcctgtctcagcccccgagtggctgggattacaggtgcgtgccaccacacccagctaatttttgtatttttattagagaggagatttcaccatgttggccaggctggtcttgaactcctgacctcaggcgatccacctgcctcagcctcccaaagtgctgggaatacaggagtagagccaccgcacccagctggtaagttttttttttaagcgtatttttaaatataacattcttatacttttgttctgagtgtgtttaatttatttctagtaaattagttttttgctgtgtagacagtgctatgaaaatatactcttggccgggcattctggctcacacctataaacctagtacttt

SEQ ID NO: 125534 - DNA, 1083 bp, Homo sapiens
ctctgttgctcaggctagagtgcagtggcgtaatcaatcatagctcactgccgcctcaaactcccaggctcaagccatcctcctgcctcagccccccacgtagctgggactatggacgtgtgccaccacgcccagatcttgtgtttttgataggtacaatactggggagaaatcctgctttattcagttgtcccctgctattgttggatatgtagttttccattttttaacaattgcaaacactccaaaaataactctgagtagttaaatctttggagcaatgggtgtttccttaggtttagttcttagaagtagaatgttggagataaaatatgccagattttaacactattgatatgtatagccaagttggtttccagaaagtttataacacagctgtttccacgcccctttttaaggaacttgtgttcttgtaacttgtgggttgctagagatatctttgggataatcttggtattgccttttgcttgcttacagtgccgtctgatgtttagcgtcttcactgagttagtctcagagatctaaggtactgtgctgatagattttcatcacatgttctcacgtgcttgtgaatttgccttttggccatgttcagtgtaccctaaatccctgaacttttcagagaggcagcttcccagcagtggtcatttctttcttcatcttggtcaataccaggatgccctaattggagttggaatgaatttagcgggaggggtcaaatagtgtgctttcttttatctctttttctttttttttttcctaaacagaacttaatttattcattaattaaaactaacatttgccactgtgacgcttacagaaattttctcgtaactctttgcagaggggatacatttatttagtcttcattaatttcctatttgaaaacgcttgtgaatggtagaaaggaattttaagtttgtaaaatgtttggaatcttaatagttttattcaagctttcttttattattattattattttattattattattattttgagatggacttttgctcttgttgcccaggctggagtgcagtggcacaaagtcagctcactgca

SEQ ID NO: 125535 - DNA, 1018 bp, Homo sapiens
tagagaaagagagcaaggtgtatggaattgaccttttgggacattattttaaggtgactttatttaaagaaaagaattgtagttgcaaaatgagtttggattaatgcttttcttcaagcgttcttttcaagtttggttctgaggctagatcattttctctaagtgtaatatgctggattttttaaaaagattttcttgaataaattgatttgatttcacagtttattgagtatcttgtgccagtgaagagttcatattttaggttgtgaatataaaagtgattaggaaagccacatcatgctgcctgtgaagagggtggtggccgagttgtcatgatcttaaatgatcagctctgaattgtagtttgctgatgtgctgcggtgccacactggggtcttacctgtattcccgcagtgggagacaggcgctgcttaacacccatttctctttctttcactttcccaaaggattggaatacttttctgctacggttcaatgatttggacttgtgtgtatcagagaatgaaaccctcaagcatctcacaaacgacaccacaactccggaaagtacaatgaccagcgggcaggcccgagcttccacccagtccccccaggccctggaggactcgggcccggtgaatatctcagtctcaatcaccctaaccctggacccactgaaacccttcggagggtattcccgcaacgtcacccatctgtactcaaccatcttagggcatcagattggactttcaggtatgcagtagccactctccactcaggctccttaggcaaccactgttacaaaaagaggatgcaccgtgtatgtttttactgactatattgtactagattgtagtcttgcgcgtgtcttttttttgttgagtttgaactacatgaaccatttctgttccatcgttacatggtaaagtacctggctagaagtagtttctcaaaagcctgtaggaatgagaaactgtgagaaaactgttaaggcctgtctaatatttacaaacatgta

SEQ ID NO: 125536 - DNA, 4254 bp, Homo sapiens
gatcacttgagcccacgagttcaagaccagcctgggcaacatagtgagaacccttctctactaacagttaaaaaattagccagatgtaatggtgcatgcctgtattcccagctactggggaggttgaggaaggagaattgcttgagcccagaagttggaagctgcagtaacctacgattgcaccactgcactccagcctggacaacagagcgagaccgtgtctcaaaaaaacaaaaaccagttaattctgtctccgcacagtggttccagatgggccgcgtcttgcaggagactttgagatttctagtaatttcttcctaggtgagattttctttttagggatttagtaacttcactgtctggttgatatgtgcaattagtgtggcatcctggtctttgggtaggggctgagttacctaggcttcccttttttgactggtttccctggcttgctgtcttccaggtggctttggctgaagcctaattccacagctccttgttttttgagagagactgagagaaccataatccttgcctgctgaacccagcctgggcctggatgctctgtgaatacattatcttgcgatgttgggttattccagccaaagacatttcaagtgcctgtaactgatttgtacatatttataaaaatctattcagaaattggtccaataatgcacgtgctttgccctgggtacagccagagcccttcaaccccaccttggacttgaggacctacctgatgggacgtttccacgtgtctctagagaaggattcctggatctagctggtcacgacgatgttttcaccaaggtcacaggagcattgcgtcgctgatggggttgaagtttggtttggttcttgtttcagcccaatatgtagagaacatttgaaacagtctgcacctttgatacggtattgcatttccaaagccaccaatccattttgtggattttatgtgtttgtggcttaataatcatagtaacaacaataatacctttttctccattttgcttgcaggaaacataccttaagttttttttgttttgtttttgtttttttgttttttgttttcctttatgaagaaaaaataaaatagtcacattttaatactactctagttaggacagacttgtgcttttatcctgactaaaaagttaaatatttaagtcacatacatggtaaagatctaagtttcattttccacatggatgaccaggaacctggtcttgttggagctggcataggaggttctactgtcttgtcgtccactcttgtccctcccttctgttatcaaagttaaagcgcctcttcactcaaaagggcttcaaaatgtaaatggctctagagttagagtgactgtttgctcttctgctttctggaatgcagatgacagtatggaaagaaagaataatgattctatctaataggaaaggatttcttctttcttttttaaagagtgggtggattttctcccttttgttttgcttttattttcatgctactaacatatcttcagaaggaaatggcaactagtagatcagtaaaattacgaaaacgatgcctgcaaaatttgaaggaatgcaattctgatttgccatttatcagggaaaactgaaagcatttttcttataactttttttctttttctttttttttggaggggggaggcagggtcttgctctgtccctcaggctggagcttagctcagtgcagcctccaactcctgggctcaagcaatcctcccactttagcctcctgagtagctgggactacaggcgtgtgccagcgcgcctggctaattttaaaatttttttgtagagacagagtctccctctgttgcccaggctggtctggaactcctagcttcaaatgatcctctcacctcggcctcccaaaatcctgggattccaggcgtcagccactgctctcggccctcttacaccattttgtttgattgtctagtccctgtttctttttctttctaatccttattcatttaagcaaaaccatacattatcttttccagtcctttcttgtattcttactgtttttttaaaataactttttgccttaatagctcattgtcactaataacttctgtgttctcccaggcagtgttataacagaagggcaatgaaaacattggacatgaccatgagtgcttcctttccttaactctaggtttgtagtctgttttaaattaggattagttcctgcattctgaaatacattggcctagaacattttatcccaggcatttttgaatagaaaacagttgcgtgcttttattgaagattgttaaaataatcaccatagtaacttgatatgttagtatttttctttttccttttagtatgtttcaagtgcagtaatcgtacttgtctatccagtttctatgtatgatacgagttgcttacacgatgcatggctaacttgttaatttagttttctccttagagactttgagacccttaagagacaagattgagaaagagccatgtggcttggctctagaaacgtcattatcattaggaccatcagattttagattaagctgctattgaattaataaaatcccaatgaagcagagttatagggatagatttatagctggcagagtggtatcaaaggagaaaaacagtgaaaaagccaatttcactggttcgttcaatccagcttgttgctaatattagttacccttgttttaatgacagagagtggctggaatctgtagctaggggaggggcaacactgttagatgtgaggaaaggaagtgccaaaaatgcctggacagatggcttgtcccaaggccaggacacacactttaaaatccaacattcacctaagcaagtaattcttaaagatcttacagaaacgcagagtcaatcaggtttataaaggaaggctgaggggagagaggaggcctgggggcctggacgaagaggcctaggacctgaagagactccagcgagtctcgggaagcccaggggacctgtcaccatctgggcacttcccaggctcaatgctcagccagagtttgctggtggacctcaggattcgaagtgtgcaacagacggagtgcgcttgctgttcagggcggccccgtgcaggagcaccagctcaccctcaggcatctcggactggagggccagcagaaggtcagcaacttactcttaaaacgattgtttcggatcatattgatctctttcctttttccttttgtcctttcactgtatgacttgaatcagttttgattctatttgtaagtgtttcttgtcgtgaggcacctgccatgtctgttgcgttttcctcggcagcgtgtagggcttcagcttcctgggttttcacccttcctgcaggcactgtggggtcctgagggccagtgggtccatttcacctcttgctgcatgatggtcagtagctgatctgttatggcattcacttccagattaattttccgtgtttgaagtatgtgcatatgtgctttacagaataaaacatctgaatttatttgctccgcgtcttcttcctccagccggatgggtgttttctaagggaagaacgtgtgcgatcagcagctgagggttttttgcaagctgctgctttgaaatgtcacttctcatttggacgaggggtggtcattattctgctgaaggcagcctcacccagcacatgcatcttccccctgagggtacaaaacctcctgtagcttgctagaccaacaagtgcttgcaggcctgaccctaatcctgcccaaggaagtaaataataaataccagcagggagcactgaatagacataggagttccaagacacccctctcggtgacataaaccctcagcatgcactaagcctgtatgcccagccgcaggtgcccagcccgctctgcggtctcctgttgcagagctctggcccgctctagacctcctttgccaagacagtgcatcctctgcagtttccatagctaaagggagatcgtattcactaatgtgaatccttcccctttccagcagccagaggctctgtgtcccttcccttccctccccagcaggtgctggggtcgcaaggtcagtctcatggttgaggaaggtgctactcaatgagctctttgttccttctgcctccacctctccctgcctcctgcctggaacaggcaaactctgcgtggagcgcagtgttatttcctgctctctccttggactcaagtatttgtgtaggtggtgattcccctccatcccagtacagaatacg

SEQ ID NO: 125537 - DNA, 1041 bp, Homo sapiens
aagggaagggacacagagcctctggctgctggaaaggggaaggattcacattagtgaatacgatctccctttagctatggaaactgcagaggatgcactgtcttggcaaaggaggtctagagcgggccagagctctgcaacaggagaccgcagagcgggctgggcacctgcggctgggcatacaggcttagtgcatgctgagggtttatgtcaccgagaggggtgtcttggaactcctatgtctattcagtgctccctgctggtatttattatttacttccttgggcaggattagggtcaggcctgcaagcacttgttggtctagcaagctacaggaggttttgtaccctcagggggaagatgcatgtgctgggtgaggctgccttcagcagaataatgaccacccctcgtccaaatgagaagtgacatttcaaagcagcagcttgcaaaaaaccctcagctgctgatcgcacacgttcttcccttagaaaacacccatccggctggaggaagaagacgcggagcaaataaattcagatgttttattctgtaaagcacatatgcacatacttcaaacacggaaaattaatctggaagtgaatgccataacagatcagctactgaccatcatgcagcaagaggtgaaatggacccactggccctcaggaccccacagtgcctgcaggaagggtgaaaacccaggaagctgaagccctacacgctgccgaggaaaacgcaacagacatggcaggtgcctcacgacaagaaacacttacaaatagaatcaaaactgattcaagtcatacagtgaaaggacaaaaggaaaaaggaaagagatcaatatgatccgaaacaatcgttttaagagtaagttgctgaccttctgctggccctccagtccgagatgcctgagggtgagctggtgctcctgcacggggccgccctgaacagcaagcgcactccgtctgttgcacacttcgaatcctgaggtccaccagcaaactctggctgagcattgagcctgggaagtgcccagatggt

SEQ ID NO: 125538 - DNA, 1090 bp, Homo sapiens
tgtttacaagtacaggccctgttctaagcactcttcatatggacttattcagttctcctgacaactccctaaccctaccacagacacaggcagagaaaagaaagggagttaggaagttgtctagaaacacaagccatagtttaataaacataagagtggttttattgattacatacaattttagctatattaatatatattataaactttaagaattagaaataagtgacttttattttttaaccaagaataatctaagttatggcagcatgttcaatgaaaggtaagtccggcacaatttttctatatctgtttctcagataatcaggaacatcatccaagctttacattacgataccataatgaccctcagaacacaagttccattaagtagaaatgaagcatcatatgttttcttttttaggaaagacccccccttttgttgtatagacatacccctaataatcttactctactgtacaaataacttttcacccacaagagctgcctcaagtaactttcattttggaaagctatcaaggcatgagacagagtagcaaaatgccactctggactttgcatcttggagtttcaattttgctttaggatttagaccccagtttataattaaaaccaaatcattcccacattattatacttatgtaggaaagccttgctgtgtccactgttaacacaaagatagaaaatgtcaaatagtttaagcaagtatttggcagaccacagacatgaaacagtgccgtcggaaacggaaacactttagtgttttagaggtgaagagattgatgggtgtcattcaaatttctcatctccttcttctacatctttcagattgagtacttccaaagaacctttgcctttagtttccttttttattagctcatcaatttctcggaagcagcccgggtcaatcagacatacctgaaacatttaacgtagcagattaccacatgaggatgagcaagacacagaataaactcagctttaacttcctttgaggcaagcacaatgctgtccagatctctaataataccacagttctatggtgcaatagataagacaatgggtaggg

SEQ ID NO: 125539 - DNA, 1026 bp, Homo sapiens
gtgagccaagatcacaccactgcactctatctcaaaaaaaaataaattaacatacacatggtgtctacataagtcttcacattgctttttctccttcatacgtggaggtgactttactgagctataaaatgtaatgctaaattttagtatgagaagaatcagagttttctagtttgtcccttccatttacagctgaagaatcagaataagtgtttaaacatagggattaatgccttgtcacagggggctacatggacacttgagggcagaggctaaactggaacccagtgtgccgccctacccattgtcttatctattgcaccatagaactgtggtattattagagatctggacagcattgtgcttgcctcaaaggaagttaaagctgagtttattctgtgtcttgctcatcctcatgtggtaatctgctacgttaaatgtttcaggtatgtctgattgacccgggctgcttccgagaaattgatgagctaataaaaaaggaaactaaaggcaaaggttctttggaagtactcaatctgaaagatgtagaagaaggagatgagaaatttgaatgacacccatcaatctcttcacctctaaaacactaaagtgtttccgtttccgacggcactgtttcatgtctgtggtctgccaaatacttgcttaaactatttgacattttctatctttgtgttaacagtggacacagcaaggctttcctacataagtataataatgtgggaatgatttggttttaattataaactggggtctaaatcctaaagcaaaattgaaactccaagatgcaaagtccagagtggcattttgctactctgtctcatgccttgatagctttccaaaatgaaagttacttgaggcagctcttgtgggtgaaaagttatttgtacagtagagtaagattattaggggtatgtctatacaacaaaagggggggtctttcctaaaaaagaaaacatatgatgcttcatttctacttaatggaacttgtgttctgagggtcattat

SEQ ID NO: 125540 - DNA, 3003 bp, Homo sapiens
aggtggtgccaacgctgtgttttaacccggtcactaaacatccgcgagcatcctgtcagagctctcagctcattggcgaaagtaaatacgccaaggaaaagcacctccctttttgggcgtggaaagatggcgtaaaaagccacaatacgcaggcgtcatcgctcacttttcccctcccggcttctgctccacctgacgcctgcgcagtaagtaagcctgccagacacactgtgacggctgcctgaagctagtgagtcgcggcgccgcgcactggtggttgggtcagtgccgcgcgccgatcggtcgttaccgcgaggcgctggtggccttcaggctggacggcgcgggtcagccctggttcgccggcttctgggtctttgaacagccgcgatgtcgatcttcacccccaccaaccagatccgcctaaccaatgtggccgtggtacggatgaagcgtgccgggaagcgcttcgaaatcgcctgctacaaaaacaaggtcgtcggctggcggagcggcgtgtgagtagccccctccctcgggcctgggcctgggcctgagccgtcacctccgaggcggcctgtctctgcccaagtcgagtgaatgggccaggctggggtgttggccggggaggaaatggaacattcctgctgtgagcatgagacgtcgctgtccgagcttggcgcctaagccaagggtttcttctttatttggttggttcggattgggttgttggtttggggttttgttttgttggtgtcataaaagctgcagccaagaaatctcgtaattgtggtccttttcctagaataatgatggctgagaacctagtcttacgaatactgtcatagttgtgggtacatctggtgtcatagatctcagtagccctagcagtttaaagtgcgtagtgtcttcactgctgccatctagggactggcattccgtggcagcagctgtctgcaccccaccccacccttgtgtttcttacgtcctcccatgacatttttctccagtgagcaaatggtaaggcaaatacggttctgagttttgaaaatgttccctcaggccgatgcgggcagttcacttgaggccaggagttcgaggccagcctggccaacatgaaaccccatctctactaaaaatacaaagttagccgggtgtggtggcgcatgcctgtaatcccagttactcaggaggctgaggcgggagaatcacttgaacccgggaggctgaggttacagtgacccgagatcgcgccattgcactccagcctgggcaaaaacagtgaaattccatctaggggcgggggttggggggtaagaaaaagaaaactgccctctacactaaaggtcatcagggggatttgttgtgtcttgccgttcatgttgttgccatctcgtatttaaatgtaaatgcatgtccaagtttcaagtatattcacataggactttctctcctgccctcacaagggaaaaagacctcgatgaagttctgcagacccactcagtgtttgtaaatgtttctaaaggtcaggttgccaaaaaggaagatctcatcagtgcgtttggaacagatgaccaaactgaaatctgtaagcaggtgggtaacagctgcagcatagctaaccctaataaccatttataacgtatttgtagatatattaaacattaaaggctgtttttctggaggaaagactaaccaagcaataatgtgaactgcacagtgtcacttctaataataaagaacttggtggttttgtttgttttttgtggtttttttttttttttttttgccaaaacctcctgaaatcagattttctactaaattacctcatttttctataaattgccccatttatagaatgtggtatacctgaaaactgaatttgttttcaagtatttcatctttcagatccttttttttttgggtggggggacagagtcttgctctgttgcccaggctggagtgcagtgcacttcactgcactcagctcactgcaacctctgcctcctggattcaagcgattctcttgcctcagcttccagggtagctgggattacaggtgcccaccaccctgcctggctaatttttggatttttagtagagatggggtttcaccatgttggccaggttggtctcaaactcctgaccttgggtgatatgcccgccttagccacccaaagtgctgggattacagatgtgagccactgagcccagccaaaagattcttgcatcttttgggcaaagctcaaaccattacttacatattgatagctggagaggatgaaatttaattttctctccatccagttactcattttttatggttagttaataaatagtgtgtgatagagaaagatagtgatttcttaaatgtgttggcatttttttagattttgactaaaggagaagttcaagtatcagataaagaaagacacacacaactggagcagatgtttagggacattgcaactattgtggcagacaaatgtgtgaatcctgaaacaaagagaccatacaccgtgatccttattgagagagccatgaaggacatccactattcggtgaaaaccaacaagagtacaaaacagcaggtgagtggtttctcatgtcatcaaaatatagccatggaaatcagttttctctgaagaaatcattaaaataatgggtctggggccaggcacaatggttcatgcctgtaatcctagcactttgggagccaagatgggaggattgcttgaggcctggaaacagcctgggaaacatagggacgccccatctctaaattttttttttttttttttgagacagagtcttactctattgcccaggctggagtgcagtagtatgatctcggctcactacaatctccacctcccgcgttcaagcaagtctcctgcctcagcctcctgagtagctgggattataggcacgtgccaccacactcagctaattttgtatttttagtagagttgaggtttcaccatgttggccaggctggtcttg

SEQ ID NO: 125541 - DNA, 1096 bp, Homo sapiens
tcgatctcctgacattgtgatccgcccgcctcagcctcccaaagtgctgggattacaggcttgagccaccgcacccggcctgtattttttcttgattgatttggattttgtttccactgtggcaaattagcgatgatgagaatgtatagtctggataacggaatggcgtatatggtgaaatataccaggaggtatactggcaggagcaagggactgggttttctcccccgtgcaagctgttcttgctgtgtttcttagtcatgcccttcacttttgaagatgaaccatgtttatgaaggtgccctttgttctttgagatgagtatgctttttttcaaaggattttcttcattgagataatttatgccttgtatgttccactgaaacaattactttcttggttaggtgactagtaaaaatgtctgtgtcttcctggttgcgacatacactgacggcctaccaactgaaagtgcagagtggttctgcaaatggttagaggaagcatccattgattttcgatttggcaaaacttacctgaagggtatgagatatgcggtatttggcctgggaaattctgcctatgctagccacttcaacaaggtaggtctatattgaattataggaataaattctccccataaacacacacacacgcacacacacgtaaacacacacacgtgcacacacgcacacacacataaacacacatgtatgtgaaataatccacaaactttggtagctagtaataaatacatttcttctattattttattaattgattgattgagatagagttttgctctgtcgcccaggctggagtgcagtggcaccatctcagctcactgcaacttctagctcccgggttcaagtgatttctcctgcctcaacctcccgagtagctgggattacaggcatgtgccaccaggcttggctaatttttgtatttttactagagacggggtttcaccatgccagccaggctagttgtgaactcctggcctcatgtgatccgcccaaagtgagccaccgtgcccggcctcttctgtttttttttttttggaaacagagtcttgctctaatccccagctggagtgcag

SEQ ID NO: 125542 - DNA, 1012 bp, Homo sapiens
tttggaaaaagtaaattctcgacatgagtctttccattagaaacttgagtctaaggagaagttatcaagaagagtctaggacaaggaccagcaaacaggctcactggccagatccagcctattgcctgtttttcttttgagacaggggctggtctgttccccaggctggagtgcagtagtgcatagctcactgcagcctctaactcctgggctcaagtgatcctcctatctcagcctcctgagtagctgggcctacaggcatgcaccatcatgcccagctaagtttttttaattttttgtagagatgaggtcccactgtgttgcccaggctggtctcaaactgctgagctcaagcgatcctcctgccttggcctcccaaagtgttgggattataagtgtgagccactgcacccagcttgttttttaattttttaaaataaaagttttggaagcatagccatgttcattcatttatgtattgtcatagctgctttggtgttagaggggcagatttgcatagtaaagacaggattgtatgccccacaaggtcagaaatacttacaatttggtgttttacagtaaaagtttactgacttcttgtccaggataacatggtgagattggactagatgatccctgatgtctcttctgtgtctaatattctgaaatttattggaaatgatgaggtaggagcatagggcacatgggcaatacggaacttcttgcaattctaggaaaatgagtgcatcaggagatcctaatactgaaggtattgttatatatttagacaaactggttgggagacactggactagaagatctaaaaatggactaattgttagcaagtatgtttcacgtggtgtacttgtctcttcttgacagcttgggcatgaggctgggatatcagggtggagttaactggcagagactttctgttgaagctgggctaaattaaagaacacattcatacacttatttctgggaacaatttattttgtcatctggaagcaag

SEQ ID NO: 125543 - DNA, 1031 bp, Homo sapiens
cccacaagattgaggctgcaatgtgcaatagttgcaccactgcactccagcctgggtgacagagtgagaacctatctcttaaaaaaaaaaaaaaaaaaggaagaagagacatgagagggcccaagtcacttgctcactcactttccgtgtacatgtaccaagaaaaggccatgtgggaaagagcaagaaggcagccgccttcaagacaggaagagagccctcaccagaaactgagccagaaccttggaattccagcctccagaactgtgagaaaagaattttctgttgtttcagtcccccacactatggcattttgttacggcagcctgagctaatactcctactttgtcctgcatttacttggtcttccagttagttttttagactttgggaatcagagcagtcagttgtcagattttagcttacagttgtcctacctgtgcaactgaaatttcttccattttaaaccagagcagagttttagagtcaaaagaaaccagatcttttagtgcagaagctttcacactgtattagaagtgaggaagttggttttgtgagttgcagccagcagttctcttatgaagtgcattgcctgcagttttgtgaaagttgtattcccagcttgtgtgtgtatatttgcgtgtactagattgagatataaagtatatttttgactgtaggtatggtaaaaaaaaaaaaaaatttaagtccattgtattgctcaaactaatcctttactctctcttagaacacccatggtaaatgatcatgttagagtttgagggtgaaggagcatcaggattatgaaccagaggggtcagacttcagatctagaaatcaaaacaccaaagggacacaaatagggaagaagagagtatggtcatctcttgtctttcagcaagcaacactgggatccccaaagagactcctctacagggccaagcttgtgtgatttatcacacctgtccctgtactccccaagtgccttgtacataacctcacctgctatacatgctatgttgtattataat

SEQ ID NO: 125544 - DNA, 1028 bp, Homo sapiens
agtcacatggtaacatggaaacatttaaccctgtgtcagcgggactgcttgagataaacttgacttgtcttccgggcccagcaaaactgcaggcccaagggaaaggaagctctcctgtgattgtagcgcatcttggtttgataggaagtcatgtctggaacatggaagaggtttttttgtgtttgtttttgtttttgttttcttgacgtgatagggagaaaagatcagacttgttcatgattttaaaaacattcattttttttttctagggatgtttttacttctgacttgacacatttttttctttccagtttaaaattggtggtgaatggtggacatggatcgattataaccgcttccaggagctcatccaggaatatgaagatagtggtggatcaaaaacgttcagcgcaaaggattatatggccagaactcctcactgggcattatttggtgccagtgaaagaggctttgatcccaaggacacaagacatcagagaaagaacaaatcaaaggctatttctggatgttgagattatctgatttcaaggtactgaaggacaaaaacttggatggcctcaaaaggttcttgaacaccactgtgattctccaaggacgaattacgtaaattatactttcatacaaaggagacgataaggcagtaaacatggagacacgggggacagcgtccacactcagagggcctgggccacagccccgatgtttcttttcagaactcagcccctttcctgattttacttctaagaggaaaattattttggggaggaactacacagtcgtgattagaatttatctgatggttttgtattataacttgtaagacctgccagaatgctagtcccgagagtgtcagacaaggaagaagtccctgggcctcttccccttacccggcccttagatttcatggagcagccacttagcattgaattgcactaccctgagctaaacgtgtctgtgctttctaagataagagcttgatccctttcttctatcttaagacagcacct

SEQ ID NO: 125545 - DNA, 1031 bp, Homo sapiens
ttgtgatttctttgcgcctccccccattacccccccatattctttttttttttttttttttggtgaagctggggaagggggcgttttctcctggttgggagaaaggagggaggaggggagagaagagggaagggtggaatagctctctgtattctgtatggggttctgttacagaaagggttaattataatattatctatacacatacataggcacatgtgtgtgtgtacatgagcaatttagttaaaggacagaaaaaggtacaccagggaagactggtgggagggaagaataaaatcctagctgctatctgaagggcttgtcaccaattgtccctctccctttccttttttgtgttttcttttttttctttctaagtgattggctttgtgtgtgtctatgtgtgtgtctttctttattccttgggcacctgcagcgttgattttcaaatgcacattttccttccagccaactggctcctagggtagggggaaagggaaaagggagggagggggagactgtccagggttggggggaaactgtctttgcctggacctgtctcctttggtgtggtattggtcattggcctctataaatttaaccgcctaatttcctcccccacctccctgtccccaccccccacacaccatgcacacacacacagaaggctttgagattctgcagagttggtccacctttcttaagcacaaaaccaagatacggtttatagttggcttatagtgtttcatgcacctgatgtgatggtttgaggttcctgaaggaaacttttccctttccatttttttttttgcgttattatggtattgtttcacatgctcagatgcaagctttgttaatgacagcttaaatctcacatacggtaactgtacaggtttagattgctggttctgtttatgtgtttgggtgtcagctttaaatatttttttcaaaggaaggcttcctatcagtgttgtccttttctgtgtgaactgcttttggtttgggctgctggtggtgatggtggtggatgg

SEQ ID NO: 125546 - DNA, 1011 bp, Homo sapiens
tgtgtgtgtgtgtgtgtgtgtgtgtgtgtgtgtgtgtgtgtgtgtatatctcacttatgcagttctttttgatggttttatttttaacaaataggtatttgactgggcttgtgatatatatctatttatttggcttttgcgagaaaatgtgctcattttaatttattttgtgcctaaaaaacttgtaattttaaaagcagaccaagttcaaaatgtacagttaataccatttctttctttgctctgattatttttttctgctacttttctagattaaaatccaggatattttggttagctgaatactatgtcaccttcatatctaaatatcatatgtctatctatgtgtaggtagaaaaggtctaacttttaaaaaagtttacttaaaattctgtagaaaaaattaaacatacagaagtagacagaacacccaacatccaggtttgagaactaccaactcatatctcatcttgtattttctatatttcatctatttcctctcccacatatgatctcatccatatttctcacacagaaatacttctgtatgaatccctaaaccataatgactccaaaaatcctcagaccccaccaaaacccgcacagcagtattatcacacttaaatgaatgtataacagttcactaatatcaaatatcctgtcagtgtttacattttaagaggcccaacttttgtagggaagccgtaaatacatttgtcagattaaaaacacacaatgggaaatagaaatcatcatatatgtctggttctttggcaaaaggtagttttgttggctgtgtgctatcacattgtgtccatgctggatggtcagaacatatgtgttagtgattgttaaattaaaacctctggtggtccactctattcagtctggaagatttattgaactatcaccaagaaatgtgagggcttattgggaacaggcaactaaactatgagcttggacaaaaatgtgtgttgggggagtgtttgtaaaagttaagaattattatag

SEQ ID NO: 125547 - DNA, 1487 bp, Homo sapiens
taaagccagcacctatgaaataattttgaaacaggtacttgaatgcctgatatcaactaagcgccataggcttttagagacaggctagtgagataggctgaagtgttccagaaggcttcatgggtggggaatgggacctagaagggtgaagtgatttggatatatggggaaggagttggagctagggagagcattctaaaggaataatgaaggcacaggaacaagatgctacatggttaggacttgggggcaaggaaaggctggtggaaatgagtacaaaggtggtaagtaaagagtgcttgttagtggggcaggagacctgtggagacccacatgccaggcttggcctgcctaactagtgtggcctttgaaagttaactttctaaaagcatcatttcctttatccattagtggagaggtttaaactagtttagagtaaagcttctcaagctggaagggaacatagctttacaggatgttcataaattgttttttagtctgaaacagagtgatctaccgccaaatagtttctgaaacttgatgggctagacaaaattaaatggatgccatgttctgtcagaattaaaagtctattgtgtgaatgtgaattttgaatatcagagaaggcaatgtgttgtgcctaatttcctaaatctattttgaccacagagcacttttattctctgcattgtaatctataatccagtatgggaaatactagaaaggatccaaaaaagtccctccagatcttggaatctggtgatctctgagtctggggtgagtgggctgatggtagacgacttggaaaaccaggcacagaagcttgtagtcggtgcgtgggagctgcttcttaagcaggagtggcaaggggagtgaaagtgaggaagatgtaaacagtgagggagactagtccatgtcttttcctgctcccctttcctgcctgacatctgcctttttactgattgttaccaaccccaccaggaggtgaatattggtgagtggttctcattaatagctctttcagtgtgatgatactagcccaattctgatgccaccaagctgcccttcagccaatgttttatcctctttgtcccttctggtttcatatattgctgctctttggcaacctgtaaaaaaaggttggttgggaaaggaggttgacattgatgttaaaacaacgatttcaaattatctgcctttggcttgctgtatatgaagtggtagttcaaaaaagggtcagaaccgctcttttgctgttacatagccaggaaaagctgtggaactgtgtttctgttgcatttttcactttcttttttggaaaatttggccatgggactgtaaaataaatgggtcagttccagcatttgacttctgaaagtatgcatagctttaggatctgagaagggatgagagaatttggaggaaaggaagggtgtgaatagtgtgtgtggttatgaattcaagtattttactgtacttactgagtt

SEQ ID NO: 125548 - DNA, 1487 bp, Homo sapiens
atgattcaaggagtgttgagggtgatagattctgagactcttctacaccacagttttatgtattatcaaagataaatggtgattatttagttttaaagaatgttaggattagaaatgaggtccccagatggacacaacaatagttgaggctagctattaggaataatttaggtctaagagctacgagatttggaagcctttggacgagaaggtctgtggcatttcgggtgtttgtgtatgtgtgcacgcacctgtgtgcacgcaaagggtgaaggatggtgggttagtggctttacattttattttattttacccctatcctgtatagtagtcataatatactaaatgcagcctaactttgtaaaagtgtttcatgctgtttttttcctcctcaagaagcaacttttttttttctttcagaattaggattaaacccaatatgctgcagatgtaggataaagaacctagtaatgggagagcaactgttaattttagaaagttctgaaaagattcaggtagatttgaaaacttagatcattgaagtttagaagagcaatatgataatgaatttggtaaaacttgagacaggagaagatcaaaaataattagtgagctggggcagaactgttttctcttatataatcagaacctgttccatgaatgtagacttttttcccctctgggaggtgaagaggacatagaatttaagactggtgagaccctaagtgtgtcttctttcttccaaatctgagctgtgttctccttcgtttcttctaacacaatagcagagtaatgatagtttctattatagctttgcatctgttggtatgcaattaatacatactgtgaggtcacaaagaataggccctttttatgctattagtatgaggaggggaggagtgagttttctagaatttgactgcccctgcttgtttaggaagaaactagacaagtacaggcttctgtgtcttagtcctgttcaggtctctgattccatccattgcaaggggctctggaccctgaaatcatatgaattggtgccttctttgaaggtgtttatttcatatattagtgtatgtggctctcttagggtccagttagattccccgctcacctgctgcccacctccctcctttcctccctttctctctccttcatatccttcttctttctctctcttcctttactgaggtagagctatcaaaattatgaatgctgttaataaaaggtaatgcatttaggacattgtgtatgaaacgcagaaattcaaaaatttttaaatttcattatttgaactgtgacaatctgcttgaggaactctaatttagctctctaaaggtgaattgcttgccacagttttcttggccattacagctcacttttctaatttctcagcttatgtctgaattctagttagtttgtttgccagagcaaaccttataaatgatcaactacatacaaatatttttaaaatgacttaactgtca

SEQ ID NO: 125549 - DNA, 1049 bp, Homo sapiens
ctgtgacactatgggcttcatgtttactttgggatctggtgggaagttcaagtgctattaatttttccttggtctgttttatgctttgtaatggctttctgtgtgttttttgggagttaagactagaaccttggaaaagagagagccagagttttctccctatatttctattttaaaacttttttttttttagacatgttctcgctctgttgcccaggctggagtacagtggcgcagtcatggctcactgcagcctcgacctcctgggctgaagtgatcttctcacctcagcctcctgagtagctgggaccacaggcgcgtctcaccacgcctggctaatttattatttgtagagacggagtcttcctatgttgcttaggctggtcttgacctcctgggcttaagcgatcctcccatcttggcctctcaaaagtgctgggattataggcatgagccactgcgcagcattttatttcttatgtattgttattctctctgtattctctgcctaaatgtaacccctgcactctttctgtatatatccttctggggatatttgaggctttcagaactgtttctttcttcactcagtaatctatgcatagtaggtactcagtcattgcttatttacagttgacaacaattccatgaaaagaaatttttgaagagggagctgctatttactattcgccttgtgccaggcattgtgctagcaattttgcattcgttatcccattgacgcaccccatgaaaaaaagaataataatctctgtttgatagttgaagaaactgaagcacagagccgttaaatcaacttggccaggatcagtataagagaggcaagaaatgtagcagtttttgcctgacttgaaagcttgggctccttatccctttactcattttcatacagatgcattttgtgaaagatggccacatggtctctagtagaccacatttgttcattgttgtgctgaaaattgttacaaaggattttctaggtataataataggatttagggaggggagagtacttattgtccaggtcttta

SEQ ID NO: 125550 - DNA, 1080 bp, Homo sapiens
attgtcaaaggcaaggattcaggctgatgatatagagggttattgtatgtcagtgtctgttctaaacccttgcactcatttatctcactgaattctaaaagtagctctctggaacacaaatgtaaaattggaatgaggactagcatgccctcacagattactgtgcatataagcttatattctgctatagattctgaagtattttgtcttgtctgcttttaaactgttctaggaagcagcacttgtcttgagaatctatttcacaataaaagagaccttgttttgagggctaggtgtatttttttaaaatctattaggaactctattctttctggtaaaagaccacactaaatagctctttttgcttttcttgatatctgtatcttgaagataccaggtgacaaatagtccattgatttcctctgtcattgtttcctttcattattctaagcagatttgcaaattgttctctcccatttcccattccaccctgttaaggtttgtttatgctacaaagagtatgctaatgaatataactgttagatttacttcttaaggaaatcccaactgcatttagagtactgtacatttttgagaaggctcctcctcatttcccctcggctaagatgggcctcctcacaggtcattctctgggacttcacgattcagaactggtccattaccattcatttacaaggaatgggggttagtataaagatacacacacagaataccctcactgggcctgaattttctaaagatttctagatgaatatgaagatcagtcaagttacacacttctctcaagagtcactctccgtctctttctttctttctttctttctttctttctttctttctttctttctttctttttttaagagatgggatctcactctgtttcccaggctggagtgcagcagtaatcatagctcactgcatcctgaaactcctggcctcaagcgatcctcctgctgcagcctcctgaggacctgttggtgtgtgtcaccatgcctggctaattttttaatttttttttgtagagacagggtcttgctgtgttgcccaggcattctcaaa

SEQ ID NO: 125551 - DNA, 1014 bp, Homo sapiens
ctattcatgtcctgtgcagaattcttttctaggatgctccctcaacctctgtttttctgaatgtgagcccaaagcaggctaagccaggaattattttatttgggggtcatttagatataaaaagagactaagtggtggagtcaagaaagtaccaggtggctgccatgttgcccaaatatttcctcccttgtacagcatctatctccacatgggtctcaagtccacctcccttcttcctttcccctcttagaagcaatgggattattgcagcctagaggctcagtggtaggtcctagaggccgagggaccatgtgatagagcctggaaagagaccaccccctgaatcctgccctttgtagttggatgttttttccccccacaactagataggtttactatctggctgtaaatattctagggatgcaacagttgtgggacatggtatgatttgaattttcagggtcctttttgtagttgccagtgaatagtaagtgaaatcgcagaatggaacatcattcatcaaatttaatatttcttctttggagtttaacagaaataatgtggatttggggactttcagagtgataagggactttggagatcctcatgggcagtggttttgggtacctcagggtacgctgagtcatttgaggggagatcctgactttattaaatcagaactccacctttacctgtcttctatatttatacttatgtattaggattacattctctttgagaagaaaaaagtgtctggatttgtttattctttcattcaaaaaaaatttattgacagcttctgtgtgctaggcaggcagtactccaggcacaggaagtaccatagtaaattagaaaaaatagatatctattttaatggagtttatattctaacaaaggatggggggacatactgtaaataaacaaatatataatatgttgggaggtgacaggggattttataaagcagggtaaagcaagagtgagaacttagcacagcaggtcctcaaataacat

SEQ ID NO: 125552 - DNA, 1005 bp, Homo sapiens
ctgtaccctctttcagaagtgctatcaattatgtgttatgtgtggcctgattatcctctgtgggccttggctccatgcagcacctccatccccgtctgcccactcattcattcaacaaatagttgctgagtttctcttctctatgccaggttctgttctaggcacttgggataaaaacagtgaactaaacaaagcttctgccctcaaggaatgacattctggggatgtgggggagaggtgggtgagtgggtggtgttacattctggtgtcgcattgttttttgatgtgtctaacacagaaaaagatgtgtaactgtaatcctcctttagaaagctctaggggagccatttggcaggtagggaagtgttttgcctaatttggcttaaattatgattttttgattctgaggattttgattacaaatgccttcatgaatctacttcttcaagagaaattaagtgctgagacattaaagcttccagggaccttttgaattggttggattttattagcagcttaaaatgagcatgacatacagtaaggttcaagcttaggggagatgctgaagaaataaggatacttgattttctttccacttgaagtggaatccactaatccatctgtgctcataaatttgagagaaggagggcggaaaacgaaagtttatttctagggctctctactgggcaaggctatcaggttaccttcattgaaaagacttaatcagaagtgaaacttaaatctgttacagtcttccacagctgtccagggaattgggcactgatgaataccgtcagatggacccctgaatagagggaatgccttagaggtcatgtttggagttagtcaataaaatggatctcgagaagaaaatagaaagtttgagggaaaaaaattactggaaaagaaatcttaaagcttttgggttagatgttagatggatgacgaaaacagtgggtgatatgatttcctttctggattaccatcttcatcagatattgttgt

SEQ ID NO: 125553 - DNA, 1071 bp, Homo sapiens
ataatgaaaatagggaaaggctcctagactgtgctgtggaaaaacacatgttcagattttactgaagacccagaatcccatgtggccacagataatttgatttcacagtttctatttctagatatacaggatggggttgccagcagaagttacatagtgataataacatatcagcttcctttttagggaagatattgtaattgtgagaaaaatattcagaaaagccttggccaaatattgtttgtagttggtaagagaatactcagttattaaagcttctgcgaaccttttccaaataattacactttttccctaaaggaatcctcccacctcagcctcctaagtagttgggaccacaggtgctcattaccacacctggatgggtggatggatggagatatatatatatttgtagagacggagtctccttatgttgcctaggctgtgttacattttttgtcacacatgttgggtatggagaatttggagtaggtagtttcagatttgcacatcacaagttcttgccttgtgcagtggtttctaaaccgagttgcatatctatactccatggtaacttggtaaacatactgattcctggaccctgtgtctgatctactaaacattaatccctgctctgtggctctggaacattagtgttttgttttctttttggggtttgtgacagggggacaaggtctcgttctgtcacccaggctggaatgtagtgggacagtcatgactcactgcagtctcaaactcctgggctcaagcagttctcctgccttagcctcccaaaaagctgggactaccaccaccacgcccagcaatttttttttttttttttttttttttgcaggggtagagacagggtttcaccatgttgcccaggctggtcttgaactcctgggctcaaggaatctagctgcctgggcctctcacagtgctgggattatgggtgtgagacactgtgcctggcctggaacattagggttttttgtttgtttgtttgtttgtttttaacatcaagttccagtatagaagtttcagaaacactatttcttaaaatatttt

SEQ ID NO: 125554 - DNA, 1091 bp, Homo sapiens
caatgaatgatccaatgaatgatcacaaagtgaatacccaggtaaccagtactcaggtaaagaaatagaacattgccccctccccacaaaaaatgatttttattagattcctcaaattttcttttctattcctcctcaaatcccaagaaattagagatataagtaaaggttgatgaaacaatataataaggtgtaagtgaaaaaagcattgtcttttggtaggtggtgtttcttaattactcttttcagtaagtttttggtgatgttaagtttgtgttgtttatctatgttttgattcagccttaagccagttcttgacagtgactgtctattaatgctcacagctgatattaagattacgttctaagatctatcttttctgcaatctgtttcactgaaaatattctcatgatagttttgaaaatgcgtaaggacagattatcttctgactctaataaacaagtgagtcttgtcattactgtccaggtaacttaggaaacctgtctcagtagccaggtatctttatctggtacatgataaaatgtggtttcttagttttttttaaaaaaagttccttcctcctctctatccacccagaataatctctcctccattccaacccaatcagaacatttaaagccctgatggtttttcttttttccactgaagaatcattcaattcttagtgagagaaggtctagctgtattaaatagcaagcttgcccattttctttggaaagggatgctcatggtaaaaggacctcaagcaaaccctgcacttaagctgtgtgcaagtggagggagagagctgtctgcagccacctgccagcagctacacatctgtgctctgctagcaagcatgtgggctctgtggatgtgagagctgctccctttcccctctctgcctcatgctcccccatcttagtgatcgccactatcaactaaacaggtgacaagactccaatcaccctgctctgaatggctctccatcttcccaaaagtataccagaggcctgttttgtttcagtacattgattaaataaatattcctgtgtgcacaaaggaactgaaatctgttatggcactctgca

SEQ ID NO: 125555 - DNA, 2553 bp, Homo sapiens
agtgttatttgggctgcgcacggtggctcatacctgtaatcccaatactttgggaggctgaggctggaggatcccttgagtccaggggtttgagaccagcctgggaaaaacagtgagaccctgttctataaaaaatttaaaaattagctggatgtggtggcttacaatggtagtcctgtctactcgggaggctgaggcagtaggatcacctgagcccaggagattgaagctgcagtaagctgggattgcccactgtactccaacccgggtgccagagtggggctctgtctcaaagaagaaaagaaaagaaaaagacagggaagggaaagggaaggagaagaaagaatgacaatggaacataggaaattagggttgtagagaagactctatgaacattattgtggtgtgaaggaatggcatgcagagataagtgtgatggaagggaggtgttgaaatgtttacagctcctaacatctaccaccaaggagggggcacccctttgacagaaacgagagggtgttcctgagtagttgtgacattaaaaaaaattgcagggaaccttgtagctgcatggatggcagagacacataagtagggaaaaatgttggaataggtaaagtgaaatctcttagtgtgtgtgtcttccaactgactgtgggtaattagttggaaatgacattaacctgagcttaattgtaattttgcatagtaacaacataccagctgttcactgtattctttcctggaggtgcgatttaattattattatttttttttgctatcttttaagctccaattttctgttatgttttacttaaaccccgcctggttgccgtgtccacagtccccacagtttagcagtaatgtcatttttgttgctttcatgcccactgtgtgctgagggcttgggatgctcttgattttgctaatgacttggatttataaagggccacattggaaggtcactgagaagcatgggtgattggaaaccttgtgttttgggctcttccacaaggttttagtttattatataaatcatatgcataattctaggcctatcagaggtgctcaaagtatcaagtgaacaagctgaaagagaagttaattactgaacagtgattgttctgatataaccaattattggatcattaaatgtttattaccttttatatgctcctttcccccataagggcagtttcttttttaagtcattaaaacagaaatgggatcttaaaaaaattctgcttaaaaaatttccacgagactgaagtattaaaaaggtcttgtgtgatctgacagctaaatagcctgtttttctttggtctgttgaattagtaattaatgaaatgtattgcctgagcagagaaaataagattagttttgtttaggaagaaaacaaaagcaaaacattaacccccaaatgcaggttaatattaaagtgcagtataagaaatagaaataaaacagtcttcttgaatgataagatgcctaatggtaacatttgtttcattcattcattcgtcactttcttgagcaccaacattatgtttagaaggaatgggtttatgtaaatacagaggaggcaaggtgccctgtccccaaagacacatgggttagcagagcagttaaaccagacactttaggcggccaggcacagtggctcacacctgtaatcccagcactttgggaggctaaggtgggcggatccctgaggttgggagttgaaaaccagcctggccaacatggagaaaccctgtctctattaaaaatacaaaattagccaggcgtggtggcacatgcttgtaatcccagctacttgggaggccgaggcaggagaaacacttgaacccaggaggcggaggttgcggtgaactgagatcacgccattgcactccaacctggacaacaagagtgaaacgccgtctcaaaaaaaccccaaaaaaacaaacaaaaaaaaacaataaaaaaactcagacactttagtagctactgttgcaatgtagaaagtggtaggataataggtacaggggcatttctttggggaggagtggttatgaagacaggttacttctggaggctgaggcatcctgtggattaagagtaggggagagcatggttatgaagatgaatcttgctttttgaggtcacggtgtcctgtggattgagtagaagccccattacttgggttcacagcccagctttgccactacctagctgtgtgaccatttatctcagtttccttgtgtataaaatggaataatagtaatgcaaccctcacaggtttgaggattaaatgagttattatatgtgaagtgcatataacagtttacagcacataatgaacattataatcttaggttgtggttatgtcatttttgtgggataatgtgatagaacttcttaggggagattgcatttgattgaatgatgaggagcggaaagatgtttcaggcatttcttgtattgtcccatgtagccacatacctaatttataatgcctgcagtaatgtgtcggtaatgtgtgcttatgtagtgccattgtcaaaagattac

SEQ ID NO: 125556 - DNA, 1790 bp, Homo sapiens
atttttaaaatttcagttttgtgggacagaggaaattgaggcactgaatcaggcaggttatgcccagtctctgtggtcaccaggccttaaaattgggcataatttatacccttgaagatgttgcatggcaataccttctggtgggtggatcacctgaggtcaggagttcgagaccagcctggccaacatggaggggaaaccctgtctctactaaaatacaaaaattagccaggcgtagtggtgcacacctataatcccatctactctggaggctgagacaggagaatggcttgaactctggaggcggaggttgcagtgagccgagatcgtgccacttcactccagcctaggtgacagagcaagactctgtctcaaaacaaaaaccaaaaaacatatttctattgtgaaacaaaattttatccatgtcaggaatttcctctgaactagagtatgttcattcctcttttgtgatttgagtctgtgggagtcggaacttgtcaggaagacttagtgtagctgtgcttctaaggatgtgctattctcacaggcagccgtgctaaccatcttgctgtaaactagccacgagtaaacgtctggttgtgaatcacagcgtgacctttcagggaaaacaaaacaagcaaaccaccaaacacatgaatcagattttctttagtatcaggattgtaaagtctggtatttaacagtttgtcaggcccacttggagcagttgagacaacttcctttctctgtttttgtttgttcaagatgtggaagtgtatatccttctttagcaacatattaggataaaaactttaaagttttcttccactgagttaaactatattagttttcctaactgtcatggactttaaacaattaaagattcctggttaccactcaagacctactgaatcagtctcttggagtgggacccagaaatctattctgaagagcaccctaagtgattctatggttaatcagatttggaagccactgagatacagaatgataatattgtattttctatccacccatttattcttttttttttccttctctgtggtccgaatatccatttgttcttactcatttatccacgtcttgagtagattagaattgattacctatagggcattggtcattttaagaactaggcgtagaaacaagaggtagaacacaatgcctgccccatggggttcacaggtggtctcagaagtttttaactttgggttgagtgttaaaggattcacatacttcccaaaagccaggagcagaagattttgtgtacacacttttttttttttgttttaagctttcatcagattctccaaggggtcagtgacccataaaaggttaagaaccaaggtcttgtgcttgcacagctgttctggaaaaagtagaagagggcagtgtttctgttgccacttaagatgtttttgaccttttgagaggcaacagcggtttgaggactgtacctgttttctgtcctacttaaaatatttaaaaagaagaaaaaatagtttaacatctgggtcagggtcagaacaagaccaagggatatggaaaatagttatttcgtgaactgcatcacatttaatgttaaagagctgctgacagccaaacagcctggtggttagcgtgatggaggaacttcttaagctggatagcataggcaaggttcattccagttttcttacagtatataattagccaaattatggataacaattttcaccccatggatatacataaagactaattgtcttatttttgttccattttagccccag

SEQ ID NO: 125557 - DNA, 1031 bp, Homo sapiens
gggaattcaaactgggtattggtgacctttgagggctctccctcccaaagagactatgagtgtgtgatttttcagggcaaaatgttctaagtaaatcaagtcatggttcaaagtctagatccgctccttgtaattttttttttttctttttaaagaactcagtcttgggtgctgtttacttcatatttaagcccatggtccccatgtgtattgaactggcacaaactaaacttgtctgctcctctaggtctcttctcatagtctgagttcttaaaattaaggtcagttaaaagaagcaccttggcattttccttattggagtttgctgtgtgtttgcaaatcaaaatgggaattgattcagtcatttgggctatacaggttttcatctcaagtcacttaagtgaaatccataaggaaagatgttcatgctttacctaccatagggctcactcacctcttttcttaaatacaaaacaaaaagcacctgccagttttaagggactgaaaaggtgttttatgatggctgaaaatacatctgagaataataatatagttatacctagactggtgatacatcattacagtatctgcggggaaaagtagagggtggaagtctgtatgtggggtcagtcttaacaaggaaagctgacatgaatgctctagccctgcagtaccagagggcacctggattaatgttctgggccctaattcagcgtcctgtctctcagacacttggcactgatttgctcatctcagagctgaagtcttaaggactaagaggagagaggaacacatcattttctctgccagaggaggtacttaaactgggaaaggaggaggagaccttaacaaatcaagccttggcaaggaaatctgtcatgaatcagcaatgccttggaaagcctctttcgctgtattttacaaagctaaacacttgtcgctactgacatttctctattgcttaccttgaggatcagctttaggtagcactatgaatggaatgaatccttttttgtgtgtgcccattttga

SEQ ID NO: 125558 - DNA, 1420 bp, Homo sapiens
tcttaaacttgcatttcttttttccttactttctttctttctataatattttcacctatcctatttcattcacagtggaggttttaatttacttcaagcagtattgccatctggatgtcaaaagacattgaattgacttcttatctgtagatcccaataaaggtctcacctgcctagaaacaaaagatttagtcaggaattgaggaggagcaaagcaaaggcttcaccagaggcccaggtgctacctatctgcccacttgttctttgattgacagtggggcacagaggtgccttgtgtttctctaggaagtagcttttgcatacagtgtttgtttggaacttttcaatttgctagtgctgaataatgtctgcagtaaaagttggtttagggtaaacccggagaaaggaattaaagagaagttttaacatttctattgtttttcttctgtgactttagcctttcccccttcttagtgaattattatagagttttattaaaatgtaagttctggaaattagacaccatggtatttagaccagcatgggatactgtactcttaggttccataatatttcatagtacatctctttattgtatgttaaatgatagcgaagtataataaaatgcacctagagagtacttatctattttatgtcctgtaacattcagtacttgatgcaaatgtagcagatctcgattcaaacaggagcaaaactggttataactcaagagaaaggggataggctcatcttgatggaaagttccctgttggtggcataagttcagcaaaaccatagaatttgaggctctaagggacctttgtaacatctactccaatcttttattttgcagatggggaaagaattagccactggttcagtgtcactcagcaggttaaagaaagacctgtgggcagaacctagaacttaacgcctgctctgctgtgtcttttcattttctgatcacaattgaagcatgtggtctaccctgtctttaaaagagcataccatttgatgtttgttagcttgaaacctgttgtgcccaagggcacctaaaggcttccgtcttgctcccttttcctggatgcccaggtcattctgtgcctctgagggtgggtttggatatggctgaaatgaaagctgtgttgtggcagtgcttagagaattgtctctgatgataggactcttttaagaaagcagtgaaaaagcagtaaggagactgttacttcataaaacaattggctctggacttggagaagacccaggtggcggatggttacatcccttggcagcagctgtctttgctatatctcttacagtcttagagatctgggagtctttggctcttaattttaacctagattcactgtatgatcttggtcaaacgcctcacctcttgggcctcagttaccttgtagta

SEQ ID NO: 125559 - DNA, 1051 bp, Homo sapiens
acacctgtgtcataggccttatcataatctgctttgtatgtgaattacttgagggcaggatagagttgtctttgtccctgtatctctggggcctgcagttacagcatggactgcatattcgctgctttgtttagacttggagcaagttattggactgtgaaagctactcactttaagtaaattcagtaaataaaattatgttttatggaagacagattggacaggtggtggtattattagcattttctctcaatgcttaaatatgatttacatttcaagatttcagttacattttttaaggaattcaacaattctgcatcatgaagtattctttcacacaaatgttccatagtcattagtttttacagaacccttttcttatattctgcatttcatctggaatactataagcacaagttcagtttggcattctgttctccactagtgattgagtttgaagcccaaggtcaggatattgattgatgacatttccctttaaagtatttgtatccatttgcaatttggggacagagtgattcccagtatggtgcaggaaataactaaactggaagtcagcctgactcagttttgtagttaattttctttgtgaccttgggcaagtcacttaaccttccaataactgagggagttggcccagaactagcacagtcttctaatgcagacattccacgattctctagggaggattcacttccatagaggtttaaaagtggatacatttttaggttaaatggctttgttcatttagtttttttctccttaacccattttggagcaataagactgtcatggagtaaaaccaaattacctggaactctcaaaaggctgcagttcttatcctattttttttatttttaagggaagggaaaaaaatggcaacaaacaaatttatatccatgagtcaggacaaatccatcccagttttctaacatacacagtgtacataaacatattcaatgaagcactgcagattcttaaccgaaaatggaatatttggtttgacttaccatcctaaatgtgggaagaactg

SEQ ID NO: 125560 - DNA, 1218 bp, Homo sapiens
caagatgttgtcctgggctggggtctcacttacacgcttgactatggaagcataagctactgagcccactgtgattgttggtggaacttatttccttgcagctggaggactagagggacttaatgtttttgctggctaggggctgccctttgctccttgaggccacccacatatccttgtaatgtgtgcttccctaacatggctgctggccccctcagaagcagcaagggagagaacaaggcagtgctgcagtcttttggaatgtaatcacataatcatgtatacataatcatgtatgtccatcatctttgctctactctggttaaaagcaagtcacaggtccctcccacgctcaaggtgagatgatcacacaagggcattgacaaccaggaggcaagggtcatgggggccgtctgaagcatctgtcagccacaccatatttcaggttttttttttttctgtatcttcctttggatctgtgaataagtatctcacttcatactaaagcctcaataaacactgattgacagaaagtctttgtgctcatttaaaacttctcagctccacagagtatttgtaccatgcccttgttttatggagtccccagatactgatgagggcagggtttgagtttgagggctgttcattcttctgcccgccaaccccccaccccgcccccagcacagaactgccagtgttaggtgctcattaagtgtttgtcaaaggattataactgttgttccaattgcagcagtaagtaaatttgaagaagctccctgatattgagtgaattgtattctccaccccccaaattcgtatgttgaagctctaacctccaatgtgatggtagtcccagctaccagagaggctgaggtgagaagattgcttgaagccctggagatgaggctgcagtgagccttgattgtgccactgcactcaacctgggcaacagagtgagaccctgtctgtaaataaatatgtgtgtacagacatacataaggttcacaattcaatttaaaaaagagaaagtgaccatctacaagccaggaagagagcccccaccagaaccctatcatgctggcaccctgatcttggatttccagcctccagaactgtgagaaaatcaggttcgcctgtttaagtcacccagtctttggtatttcgttatggtggcctgagctaagacaggccctgtgttctctgtgtagcaagaggcag

SEQ ID NO: 125561 - DNA, 1041 bp, Homo sapiens
tttttttttctccttcttcccctacctccttcctgggcttagaaatgctggaaggaagaaggagggaccattagttgaactaagaggtatgttgtttatactgttgttgtggttgtccctgggtggtctgaaattttggaggagggggtagggaaaggccccctaaaccttttttaaactagtataatacaacctgactgctacctgcagtttcccaattacccaattataacacaaatttgcacatttttttaaaaaagcaggctgctactgtttctccttatacaaggattttagtcactgtacatcttgtgtctttaaataatgtattaggaacattttcaagtctgtaagtgcttttttaatgagagtgtgaagattttaatgggactagattgcttttcatgacatttcagagtgacttaattgtaacaatgttgagaggctgtattttaaagtttgctaagtatgtctgtgtggattatagtcagacacttaaaaggacggatggttggatagtggaatcagatagcttttccttactactttctccaaatattagctctttgcaaatatggttataccaaaccaggcacaggtcaggattctcttaaaccttttaattttcagataggaacagaggctaataacagaccaatgtgggtaattttagagacaatttccttaaaacttagttggactgcaatattggtcctaaggcctctcctctctccttttgtagacccaggaggccaggctgtctttgtgtatacttcctgttagtccctgaactctcttccctgtttgctttaaaaacatagtgaccttgaccgggtgcggtggctcacgcctgtaatcccagcatcttgggagggcgaggcaggcggatcacgagatcaggagatcgagaccatcctggctaacacggtgaaaccccgtctctactaaaaaaatacaaaaaattagccgcgcgtagtggcgggcgcctgtagtcccagctgctcgggaagctgaggcaggagaatggcgtgaacccgggag

SEQ ID NO: 125562 - DNA, 1027 bp, Homo sapiens
gttgtaagtctttgagttggccacggaaaggaggatgaggtgactctgctcacagcgccaaaggccaaaaaaaaaagcatacagtgagactctgacaaagcagcaaacaaaggaggcacaactggaccacgggttgttggcaactgtttcgtatgtccactctttaagagttaaggaacagtatcatccactggaacacaaagctgtatgtaacaggcaaaaggaggtagtttggaacccagctcattggactacagaaacacagtgtaccaaaagccaatgcagtttgctggatgcctcttgctccccaagtacctagactgtaagacaaactccgtttttgttttgttttggctgttgttagggtttccagcttactcaggaaaaccagagaggtccaaggtatctacaggtccgagacaaagtgtagtgaaaaactggctgattttctaacagcaccatgtacacacgtacaagaagagacattaatccacagctccgctcagcaaatgccatggaaaatgactggtctccagtcttgttcatttattcctccatgggttccagcctaaatgttgctcctacctacttacttaaccatcttggagtgattaaaccctctccccagccatccaacttaaatagcactaagttcttaattaaaacacactataaaaaatgatgaacaaccaaattcaggtgctgcataatttatttacatttatgtaacagtttcccccaaggaactcaaggcattttgcaaacttaaacctatctggcagatattaatcttcacaaaatcccacaagaaaggcaagaatgtaagacgtataatcaataacaggtcccttcacacatacacatcctccccctacatgactgtgcatcactctaagtctctctgggtcagagatctaaattaatttggaaaattataccaagtacaggtgagatttctcaagaaacctcacaaaaagaagaggagccaaagactgttctactacactatgaaaaaagttactacatc

SEQ ID NO: 125563 - DNA, 2149 bp, Homo sapiens
ctgtgtgctttgagggcccggatctgctcttcctcatctttatattccctgcccttagctgaggctctgccttggtcttctgttaagtgtgctgaaagggatacttttttaacctgaatcttttcttaaaacctaattaggttataggccattgggaatgcagatttggttcagagtgaggagttggaggctgtgttgccctagtagtgtcgtgaggactgcctgggcgtgactggtctgagacagtgtgaggaacggggtgtgaaacaaacttatgacatctctggcaagtagtgcatactctgctgttgacacctttgatagctgctaccctctgataaccagtgtttttttttctggatctctcattgaactctgagtttctgggaacagcagatttttctgagccacaggttcagatgtgttagcagaacctgaggaaatgtttcttgcaccaggaaggtggccattttactccgtggctaatatttggaactagtcatttctggattgtttgaactagcgtgttctggggaattccccaaagctggacgcacttgttaaatgaggttatggctctgtggggtgagaaatagacccgcctactatacttaaaaggactgactgtgtttctgccttcaggtaaccagaggtagttatgaatttgggtgaaacctcttcatctcatgatagactagcaactagaggttcagagaagttacacagaatattcaaggttgattcagatagtgactgaattgggactagaatccatggtttctattctgtggattttgagtaagatcactaatcaacatgtgaaatcttccttgtgtcattcaattagaatttaagtgtcaaatggatggtaaaatcatttcttagcttatgtagatcataaagattagcaaatcaaggcagaaaaagacccccacacatatttgttgccaggtctgcactaatttctggataaaggttagtatatatttggtctacagggtgtgatttgagtgtaagttttttctttagtttttagattattgttcaaagtccccactgacagaatgcagggagacagccttgattagattaggccagattagattaaatcgaatggttaaggcctttggagcctccagcttgtaggagacaccataatggccttcatagcgtccttaaatcctattaggtaagttaatcttattgaagatttcaggtctgcataaagcagtattgctcttatactctctatggtgggctctgcttgttaaggtgagcaggcattttaactttccgggaataagttggttttattggtttggggcaagttaatctaaataacttgaaagtagacacctgtgcctgatagagaggccattccatgtagcaaaataggctgtctcctggcttcccctttgcttggtggctgttagtacctgtgacagggattttttttctttgccctgatttggggaaagagagtcaggtgagatgtgtaataataatgtacggagacagtagtatggttatgacactgaggcactactagatattgagaataaagcactttggaacttaggagctggaagcattcttagctgtcattttttgagtgtttatagttttattataggtgctagttggctcttgcctgtttctacaggtgcagtgaccatttttctgaagcaaaatattcttgttgtcacaggcttttcctcaatttgtgaatttatggacctgcaaagttttacaaacacatgaattatgtcaaattttgtaatgtcttttgaaaaaaagggggaaaagtgtaagaaatttagaccatgtaggtctgaaagtatgcttactacatcgatagtgggggctggaggaactgtgaaaaaagtaatagtaaatttccttttttagatctttgccaaaggtagttttgttagatataaacaacttcaagacccacaagtgactactacacactggattggccttcagagatactgggattttctttccaagtatctttaaaaatgaggttcgtagtgctttagctaggaggctgagtgcccactattaagatcctgtgagttaattggtttggttcacaaactaactcatattgcagtgtatctggctgttttgtggctgggagaag

SEQ ID NO: 125564 - DNA, 1048 bp, Homo sapiens
ttatttaacttttctaatggggcagctctgcatctgtgtcctgtccccaaagactaaagagaaatttcaggtgtgggccagattatggagcctgaagaacagttttatgattgattaatggttttgatttgcttttaggaagaaaagtgcaactagcccattggatgaagatagtatctctctccagcactcctgtatcaagtgtacagtgttctcttcctgtatagcacttgtattttcaagagctagggtcattgagagaacacttctcactcatgagtttcagagcgtagcagagtacacacacctgaagcaagaaatgtaattttctctaagtgtactaagaattactttaattctctgtatgtgcatgcatgtgcccacataatggtggtgggtttggttttttttttttttcatgctccttgaggagaaataacccgttttttgcttttattgattcacgattacctacttttcagggttacctttgttaggaagcagctgctggaagaatgtgtgctcattttgtacttgtgtcctttacttctatgtcctctctgacctgaggctcaccctgcctgccacctcctctgcatcagcccagctttgttcttctgggcctgttgtttccactctatgaagagacctccttacttctctctgtctctacttagtatccatttctgctgaggcagatccagatgggcagaggttggggagggaatttgaatgaggggaaaaattggatcagttaggggaaatttataaaacttctgtattctgtgctaatagttctcagatgctttggaatcataagacgggatgttggtctggcgacctttgagagctgctcttaaccagccagtggacagctatgcttgctttttcttcctgtcaccatctctgcttttcttgcccaatttgccaggaagagtccaccaattcttcataagcccactttttattctctcttttgaagtcatcttgattcacttcctacacctgcagcccccagtcttgcttgatctagctcctaatcttctgc

SEQ ID NO: 125565 - DNA, 1006 bp, Homo sapiens
cccaccccagacctactgaaccagaaattctggcagtgcggggcacagtaatttgtttttacaagtcctccaggtgattctgatggactttaaagtttgagaaacactgagggtgtgggaagggtaatttgggggaagggaagtggagtcccctcttggccccacccagagatgagcttctctgtctagtggtgggatagttggcttgagatgtgatattgagaatatatgaaggctccctactgggtcaggaagttgggggagtgtctcaggggagggccgtgccttcctggggacctgtttaggagaagggtcctgggcagtagcttgttactagcctttcgggaacaatttcaatgtttcagtcaccctctgggctgttgtactattgcagtcagccctgctaggcccacaagttgtatggggcagaggagaagaggcatggggacagaaaccttatatcccaggcaaagccttagcaatgctgctgatgtcatatgctcatcgttgtcaagaattgaaaattaagatagtgatgaggtggtggcaggacaaatttcttcttttcactgtatgtcccctttctcttctggatctcatttccctgcctccagctatcttggcagatgggattatttaataattttcttggggcctgttggcaaatggcccctctgccccttccccagtgtgtggtgaccacaacagtgacatagcttcatttcacagccattaggaatcttgacgcagctgacccctagatctcctggaaaggcctcttgggaaatataagcttgccaccagagtgaagtgaattctcgagtggtattaccacagaggctcaggttcctgatgctccttggagtgctaggttaacagtctctctgttggggaaaaacttgatacaaatagaagatttgctaattttgctcacatttcaaaattgtttaatttgcttactttttttttctctttcagactattgggttttatctatcattccttt

SEQ ID NO: 125566 - DNA, 1049 bp, Homo sapiens
atgcagataaaacctagtgctgattagaggtgaccctctaataaacctgatttgattaggcagaaccagcgaggtgcaggcaaatatttgagactctggccaagctgatattccattgacctttcacttaggggaaaaaacctgtttgatttttttcctatcccagagtacttgaaaattattacctatggcagctaaagcactagggcgaaataaacaggtgagacctgtggacttgcccttaagagtcgcagtcagctaccacctgggttgtgcttgcttcctggcagatcagtggagaatggattttgccggaggtcctggcctggaatgataattaaaaaggatgtttcagaacacacccaggtgcgttctgataaagcctgagcagatgtgggtggtgaaggattttttttttaaagtcaaactttgtttataaaggtaacttctaacaatttattatagaaaagtcaaactagaattgcattagtttgtttatatcaagacctcattagaaattaaggagaaatttccttaattgctccatctctggctcctgtaacagtgggcatacttctcttcttagcatttatcacattgttctgtaattgttggtttaccttcccttttgtcttaaaaagcagggaaattgtataattattcttgatgttgctcaaatgcttggcacctgggccaggtacagggattggcaaagtttggtccacaggccaaaccaggccactacctgtttttatgcggtcatgagctaagaacagtttttgcctttttaaatgattgaaaacaaatcaaaggatatatatttcatgccacgtgaaaattatgtggaatttgaatttcagtgttcataaataaagttttattggaatacagccatgctcattcatttacgttattgcctttggcatcattttgcactacaacagcagaattgagtagttgcagcagaaaccatatggcctgaatagcctaaaatatttgctatctggcacttcacagaagtagtttgttgatccctttcctattatata

SEQ ID NO: 125567 - DNA, 2999 bp, Homo sapiens
acgctgacaatcaaagcagctaaacaagaagcaactcaggaattatgacattggcggcaagtcttttgcccctcttcagaggtaacactactagatctggagagagttctgtacattcagggaatcttcctgatctctaaaaaatttgagaggactagagaggagtaaagactggaacctggatagattgatttgtgagggacaaagattcagagaagacattttcttgaaggtgatgaacctgctttaccaaaatgttgtaaaaattctaaagaaaagttaattggatcaagttgacaataaatgttagaagggaaaaatcttaaagggtaaaatttgaaagtagaaagtttgtcctgtccacagtgtttgccatttcatagaccaaggtggttgggggaggtggggcaaaattactgtagtttccagtgatcattgccttctctcggtcctataaatgcaggcactatttagcactgaaaccatctggtgttggtggttgtttcttatgtcgtatgacctgcctctataaatacattgtgtataagcttaactgggacagtaattggtgtgatccttttctttttctgatctctaaggtctgaggcccatgaccaagggaaagagaagtgctttttaaaaaaacggacacttttgttgttttggtctcatggtttcactgaggtagtgttccacagtgtaagacaggttaggattgtatgttccagaattatgaacaagagtatccttgggaatgataaaaaccatgctgcagtgttgcatgtgtatttgtgtgttccatgtggaagaccttctgggctgtgtctgtctttgctatttatttatcacctgaaatggtgctgctcaaccactctgtgacagtgttattttaacttgaaatagcatgagggttaggagaaaatacctcatgaatgtgaagggggattctcctgggcgtatgtaattgcaatgatttgaaatgctttcacaggtttgtaggagagggtaatttttcttctttatttgctccttttatcttgttctaaagccagtattacctcctctcccaccgcccatgtatacttcttattcccttctccttccccctccctttctcccactctccatgtaaagaaactctttcctaataagaatcataggtattcagagctttttttttttttttaattaacagttgatttgactttttagtactgtgtaggagatgggaaaagtcagggccatttgatagtaattgcttcctggaagagccgaccaacttattataagggtgaggagtgtttggaggcattattttctggttccaggtgtgttttgagtattgctggtggtgctcagcactcttgacatttggggctggattactgcatgttgcaggagtatcttgtgtattgtaggatgtttagcagcatccctggactctacacaccagataccagtagcacccctcaagtgtgacaaccaaaaatgtctccataggttgccaagtgagggacaggatcactctggttgagaatttctgccttagaaagaggaaaatggattccctggaagcagaggttagccattaaccttatagggctggagccttcatttaaatgctttggtatattgaaagcaccactcaagtatcagtggtgagggcacatttagcttgttgaaattcctgtgtaattcataaatatcatattagctcttggcttcaatttcctaacactagaaatgtagatttttccccttattttcaaaatgaggaggattgtagtaaaatatagtaatctctgaggtcgctcccaacccttacattttatgattttagttataacagacatcttatggaattacacaatataagagttgaaaatgtatttgtgatcatttagccagccctcttctgttagttctatcccgtgtgatttccacaaatagatcagaccagaagaaaatagttgctttttacaagtggatgttattaaatgctcatatttagaatatttatcagaacagacttatattacagtgtttacttttctaactgattgagattcaggtgacttaactgcctaagcttcaactgtctgttgtttggaattaggcttttaaaagttggtctttatattaatattcctatgcctaagctggtactcttattgtcaaatagctttatgctctgttacattaatgagggaaactttgactttccagagtgccttggctgatatattggtgttaaattggtaagctttctatcccaactgctttatttatgctttaaacataaatgaaagcagagaatttttttttttggcctgagaggtagttaagagggaaatctaataccttttatgggtttatatgcttcatatgtgatgtgcccaaccagaaataataagatacaccccagatgtgaaggtaccagctaatataattatgctggagatcattttcaccttttgagggctgaattacattgaattcatttcttcaactctaacaggatttggtatagttacttaaatttgaattgggagctgagatgaagtcccaacacttgtgcttttactggaaggattgggttgtgtataccttttgtatttctgaagcttgataaactataaagccttgagtattcaggttcatggcaaggtttagatggatggggaggtatactctagtagaatctaacagcttagtatgctttctgtgggctcttgcctggaaacccaatctgaaggtatagtgatcagacacaatgctattcttaagccttcttggaaataacaggtgtcttagcctgtggtaaaaaggtaattttgcatgtattaaatattcaaccaagggcatgatctgtgcttattttggcaaacaaatagatcccaaaatgaatcaaacaaattgtaatgcagaacaaatttaaatacttgaggatttgttttagacatttaaactcatattttatcctctgtgtcttcatagta

SEQ ID NO: 125568 - DNA, 1077 bp, Homo sapiens
cactagactgagcttaccttttaggttgtatgacacttgatataagctgtccttacaggtttaaagctgtaggagtctggaatgcaaaactgaaccacagaagtatattggccttgcacttacatagtcaggatcatacggcattgtgatctatccagatttccagctgcagtcctgatgtggtctcttcattactttgtccagctgtttcttcccagacggtgctctgtgttagccttcccttctgtataatcattctcttccctaaatttttctgtttaacttgttaagcaccagattctgaataaattattcatataatcagtatttttgaagtagttaataatcagagtataataataaattttatgattgtacaggttgccatatttgccagaaatcagctttacacaagtgatttttgagataaatgctttattgggcatgttgctatctgttcatttcttcaggctctcttgatttctattattgtgtgaagttaggccattagaaatgcgcatacctggaccatattatttaggctcttcagagaactgccatcacggagttagagtgctatgtccttggtaaatggaaagtaagagccctcaatttaataatacagtattttatagtcaaataatacatctggcttttgtaaaaccttaaaagtaatctggtatcttaatgtttcattatacatatgcatatatgtgtgtgtatactcacatgcatatatacagacatacatatgtgtacatatatttacacatatacgtacacacagtcatacacatataaaaagcttctctaagaatttggagcgaggaaaaaatgtctgtcttctgaccaacatgtatacattcttctaactctcatgtgtttgtttagtgaatgaatgaatactatgtaattaggtaagagaactattgccttaccctggaaattcgaatcgtaattcagtaaacaattttaggtacccatcctaagtacttgttgatcaaatactattactcttttgcttggtgagtattatttttcatctacttttaacaggttcttctttggttaaaaact

SEQ ID NO: 125569 - DNA, 1035 bp, Homo sapiens
ttattacctttctgaatgtgctctctgctcccctggggcccattcccaatccagtagcggcaattaccattgggataaacctcctacctctgaggcccacagttttcctgaccatctctctacagcctcacttccacctctacctctccataaaacaatgtgtatacttctgttcatcagctaaatcactatacctatcttacttgtttttctgatgcaacaagcagccttccaaaaataccaccaagtctaataatccttttgctgtttagtacatcttttgtttgaggcttactgtcacatgacagatgatgacaggcaacaaatgactgtttaaatggtcaacagatgtgcccatccaggtgactctcctaatagttgacacacagtgggtggagggattgggttgttccagatattccctgttgttgggctagcttgctcttggtgattatagtttgacttattttgcttttattcagtttttgtggttctgttttgctacttggttttgatacatgtaggtagtgtgggttccattttggtatgtgaaatttcatatcatgaagaaagttatgattataatgtagcgttagtaattcccagtggtcattcccaaaaaatattttctgagaatgccaggtgtatataaaagttatttttgaaagtacacatgtagtgtgccacaccctctatcaaaacaggcccacattactgaaagaaggagggaaactacccatccactattactttacagtacttaaaatatgcagacaaatacattttagcacgtggtgatctttgtgaggatatcctgtcaatcaagagagtaaatatcttttctctttcccatgaacctagcaaccaatttgcttatagttccttcaaagctgttgttaagattattttgtggctggttatgtcacttggctagaaaaatggtactggaattaagtcagctttagccctatgctgcccatctttcttaacttatggtcagccatatgtttagaccagatgaggtaggaggtatga

SEQ ID NO: 125570 - DNA, 1065 bp, Homo sapiens
ataagggctgagaatctaatcagttatttttaatttattgggcaaaaatgaatcaaataaccgtggcaggcataatgaaattgaggtattcagtgtgtggtgaggatgaactgttttatcacagttcctctggtgtggcctgtgtgctttgattgcaggtcagatggctagggaaaagagtagtcaagctgaatgctctgtggtgaggctgtgagagggacaagaaacgtgggtcaggacagaaggcgtactgcaggaacagattccgaagtgtgtgcacagcatcctataatttgggctcctgtgtattttctttagttggttgcatttgttaatatgttagtctggtgtctttaaccctgtgactgacagttgacaatggtgtagctctttaaaagaggtgaaactggtctgaccacagtttacccttgatagtgctttcactttggcaacaagacagagggagaaagtccctgcttctctgctctgggaatcttaccaaatcaataaggagtctctggtagcactaacctcttttaaatagcctaagtgtgagatcctgacctttttttctgtatgtggcctacttccttgatgagaagctggcttttatattagaacttttttagacgtacatgaaacttgaatcttgctatttgtttccattgttgcttttaaaaaataattttacaaatttattctaataatatactaacgtattttgtctccaggactagtgaaactttttaagatttttaacagattcatctagacacctaaatctctctaggacttgatccttctccacccagcagaatactgtactgtgctgtgatcatttctcagggtggttttggctgagggtttttttttttttttttttttgagatggagtcttgctctgtatcccaggctggagtgcagtggtgtggtctcatctctgcaacctctgcctcccgggttcaagacattcacctgccttagcctcccaagaaactgggattacaggtgtgcgccaccacacctggctaatttttgtatttttagtggagacggggtttctct

SEQ ID NO: 125571 - DNA, 1012 bp, Homo sapiens
ttcacatctgaggactgacatcatttcgcagaccgggaaactaagtgtgaggagtacattttaaaataatttttacattatatattggcagatcatccatgtgcttgtagaaggtattatattggtaagctgcaggtagacaggaagactgaaagagaaggtagaacctgcttggatcccagtctgtgcatacctaaggagttgagttggcaattcctgaaccaaaggttctggtgttcagaaatatctccagttattcagaaggatggcatgacattctaaaaataagaaattatttgtagtcacatcagtgtgtaatataccttacagaatattagaagggagatgaagcatttggggattcaaaggaactagttgtagacccttaggtatggccctgagactacctagggtggcttttgtagcaatctaaacctgtatcctgggatgttagcatctctgaacaaaccttttctctcccctccattgagatcactttctttaaagtctttatgcatttagagagttgctgaggcaaggccatgtcctggtttgctctttttaaaatgcagatgtttctagaaatgactataaactgagtcctgagccacctcttgtaacttttcaggtcttggtctgggggaagataaagaaatggaggtcttatgcttcacaatttggtttaagtcaactatggcaaggtatcttgacttaaataagtgtgacttaagtaagtctgacaatttaaatattagaatggtaagacatttttgtgcctctatagccatatgtccatcttggggaggaaaaactgaaaataaacgatgattacttttcagtattctgtggaaatcttacttctctttttagttaatttttcagtggataggctccctacctgccagccctaaattcttatttattcctgaaactctggtttttttcttttttcttttttttttttaaagtattctgaaactgttttctgaccatgcttcatatattgaagtag

SEQ ID NO: 125572 - DNA, 3644 bp, Homo sapiens
gttgttatgccaaagcaagctcttggggtaaggttggcagtgatgctgctgataaattacttttaagatgcttggggctgaaggacaatgattttgtaatagtgttttaagttctcaggctgacctatgaaatctggaagtgctcatctgaaaggccagtattctttctgacaggcacaggaaaaactcgtcccctgcttgatcctcatgcaagcatttcttggaggaagccaggcctgtgggtcttgggggccagaacagagacactgagagcaacactactggcattttgaatttctgctgaggctgcaaaaacatttcaagggaaatctgaagttatcccttcactgtctacagcctcttgaattgacttctgggtgttacagatgggaccagcgtgtgtaaaagcagaatttatattctatttggatatcagaatcaagtttctctttttaaaataattttatggtaagtcgtggtttctctgatatgatttctgttgtgagcggaacaaaaatcatggcgaaatggtgttattacttaaccaaattgcctcgtgtacagacaggctgaactggtgctttgcctagagttggcctggagttttcagaaactcaattgtggcctttataaggctgtgcctggggttgtatttccaatctctctcaacttttgttcttgtggaagggaggaagtagagctgtgacagatatattgccagatagcacacaatagcacacaaaacgagaaagacacggcgtgagccattcatggagacagatttacgctctgtgctgccctcaaaccatagatccatctatttcagagaaacaacttgcccactgtattatatttcagacagggacatggcttagaagagagatgctgactccttctgtttagcttttgccgataatgctgcacgttttgctgtagaattacttttgtggggatgggaaagtatgtttggcaaaggaaggcctgtctctagattggaagtggaagaagggagatatcaggagagtaattggccatgctgtcgccatagtgaagtatatgtgtatatttttgctgggttttgtttccagccaactatattatcaggtgttggattttttaaacttacttcacaataagaaaaacaaagctagagagattgtgactggccaaggccagaatgtttggcattcgtagtttctctttagttctctctgtaggaccatttcctggagttacagaagaattgaccagtgtgtcagtgtctttcatgtacattaatgggcgatagtattggtagtggttaatataatagcatgggttctggaaccagtctgccaggatttacattcaggctcaacaatgccttagctacatgcctcagttatcttacctataaaatggggattccaggtcttaccttataaggcagctctgagaattgtttagttaatattgaggcagttataactaagtgttcagtaaacttagctattgcattttaaaatttgtgttgattttatggaaataaatgatgatgtgtgatacctggtagattgttcggcagacatttcaaatgtaaaaaaataactctgtctgcattgaaatctttctagattgatagttttaaataatgaaaaaaatacttctgggaatgatctacatttggaagaaatcaggaaagagaagactgtgtgtacttttgcatttctatgttttgggcttgtaagatatgtgattgtatatttcatgtcagtaataatttattttggggagtagaagcaaatgtcagttacatacatcatctatggaatagatttttagttttatttattttaactggatgaaatggttgagtgttgccttacttggttgaatttagacatttgagaaaatttttttttaacttttgtgacacacaaggacctttgaatgaaatcagtccccttttcttcctttaaaaaaacttataagaattaccatttcttgactaaacagttgttttcttttaacattatatacttgtctctacatagatactacattttttagttagatgtgttttggaagagcattgactttttttcctgttacattggaaaaatttaatggcacgtgtatgttattcttatcatgaagtgggtttaggcatgctgccttatactaaatagaaatcctatagtagttgtttttcagaagtaatccattgattcaagtcattcattgattcatttatgaatacttaagtatggttacataggtagggattgtcagaattggcttttgagcattttgtttagcagttataatccaggtggcaaatatactgtctgattcaattacttgcatgaaatcactttaaacagctacttaagatgagttgtccctaggcctgtctttatctacttattgtgcatgtgtgctagcatacacgcattatcattgttgttttttattgtgttaaaaaaatattacaaagtgtaccatcttaaccattttaaagtgtagatacttcagtagtgttaagtatagtcatttcattgtgaaacagagctccagaaatttttcatcttgtgaatatgaaactctataccccttaaacaacaactcccctcccttgttccctccagcccctggtaagcaccattctcatttctctttctatgaatctgagtattttattttattttttattttttgagacgggctctctgtgttgctcaggctggagtgcagtggtatggtttcggctcactgcagcatccatcccccaggttcaagtgattctcctgcctcaccctcctgagtagctgggattacgggctcgcgccaccatacccagctaatttttgtatttttagtagagacagggtttcaccatattggccaggctggccttgaactcctgacctcaagtaatccgccagcctcagcctcccaaagtgctgggattacaggcatgaaccaccacacccagctgaatttgagtattttagatacctcatctaaatggaattacatagtatttgtctttttgtgactgacttatttcacttagcacaatgtcttcaaagttcatgtaccatatgacagaattttctttcttaagactgaatactgttccattgaatgtatataccacatttgtttatctccttatcctgtgatggacatttgagttgttttcacctcttggctattgtgaattagtgcttctatgaacacgagtgtgcaaatttctcttcaagatcctgctatcacttcttctgcatatgtacctggaagtgtgggattgctggatcatatggcagttttatttttaatttttgaggaacctctgtactgctttctataggagtcataccattttgcagtgtcaccaacagtgcacatgttccccagtcttttaaacagccccttccagactgacagagtggctacatacagaacagggcagctttgaagattagggtggcctgttccaagcttcttcagactcctcgggactggctaattatttttgttaaggtcatactgctggaccagggcctataggttggcactgacttacgcatagaatgttggcctgggtgttgatagacttaggctgcaattgctatgagtgatcttaggcaagttacctccac

SEQ ID NO: 125573 - DNA, 1025 bp, Homo sapiens
tttctccatctgtgaaatggaaataataatacgtttgtgagacttaggtgagttaatgcctgtaaagtgctttgcatgtgtctagcccatagtaagcactcattaaactcttaattatcatataatatgctaattatgatggtggtaaatgagtgaggtcatcttccattttggtcatactccacatttgggtagctttagactttctgaagatactatttcctgtaatgtttctttgtaggtggggaggatatacctattacacagttagaaaaactgaacagtagagattatgctttatatggctgggattaaaacttcagtgtcgtgtttagagcctagtacttcctggcctggcatgttgtcctacacttaatgactgtggggcctgagtgggttctaatgttagaatctggtaagaactcttcctgacctctttgcccatttataaacagccttccagggtgacctgagtaagatcattttctagctgtgtaatcctggtggtatgaaaacactggatgtctatagttttttagaactgtgacttagtactaatactagcctcttcaatactcatactcttaaggcttaatatttgtctctttattgatttacatatttgaaacctagacagtcttttcaaaggtgagtagatattttatatgtctgccttctggtcggtagcagcagttgtgcagttactcagctgttggcagttctgttacttaatacagaggcagagagcgaaagacttattcagaaacaaaacctctgcttgaaaagttctcaaggccagccatggtggttcggcctgcagtcccaagctggtgtggcctgcagtcccagcactttgggaggctgaggtgggaggatcacttgatcccaagagtttgaggctgtagtgagccattgatatggctccgttgtctggagaaacacccagggtctctggtctcgtgctgagaaaatcagcaacatagatacacatggagtggtttaaggagcggaaagtttaataggca

SEQ ID NO: 125574 - DNA, 2023 bp, Homo sapiens
aaaataatcatttgtaaattgtgagtgaaccagacatttggccctgactgtagggaaatggcgcctctgagccgggtgtagcttgcagccagtacatcagagctccagtattcccagaccagtgatgaatttacatgaagttccttttcagcatgttaatgactgttacagctgagtaactagcgaaaaataatagcaaatgggaagagtaaatatttaatgcttttatatcttttagcttactgtggaatatgtattttgatttaggaaggacatgagagtcttagagacattagagacaatgttagtgtgtctgagcctcattccttgtttccttttctttctttgcacttaattaaattaaaaggataaagtgagttgttgtgagatggattttactaggggagtggtttttctgtaagttttaggtcacaagatgcgtctttcctggcagttaaaatctgtatgttcagactacctcattgattacgtgcctggtgtgtacagggactcatattgtttctaaaattcagctttcatcattttactctcctgcttaaaaactttagtgactccacaccgcttctgggctgaaagatatactcagtagcctggcttttaagggagggcctctgtgctgtgagtccagcctcttttcaggctctctccctaaggcagctccatgtggctacattgctcaagccacagtggttgactccctgttcctgtaacttgctggaggcttcctcacctttgcacctctgctcagatcattttggggcatgaaatgatcttgtctttttctctatctaaagcctgcttttcctccaaggctcagttctagacgtttctgtgactactctgactggataggagcctgttcattttggaatatagagaaaattgaaagtaggtcacagttctctattccttccagtttgccacctctctaccacagacaattaataatgaaccctacttttccccacttcctgtttggccaccatctagtcttagacaaactaagctatttgtccaggtaaacaagtagttgtggactacagaaatttctgaagattagaattgaagttagtagggaaacaggcctcaaggatagtgccatattttctgagagcagatgattttcagacaaaaggttttaccaacagcattcatataaagtactgctttagtctgagtttgcaatggtagaagtagagtatctaaagaaaggatccatgccctttttttttttttttttaaatagagacaatgtctcactatgttgctcaggctggtctggaattcctgagctcaagtgatcctcctaaagtgctagaattacaggcatgagccaccacacatggccaatccatgcctttttactctgttgtagagactgtcttggagtgttgagttcagacccagataaaacaataatctttagaggaaatgaccaagatgaccagaggtaggtctgaaaacatgaaggccgtgtgggtaagagagaacaagggagtccatgccttctgttttcaaatatttaggaggctactgtcaggaaggagggatattagacttcatgtatggaaccatggagtgagaacaaagattgctgggtgtaggttataccaaagataaattttatgccaatataagaaataattttctcatagtgctgtgataaaatgaatttccccaggagatagtttcccaagtaggaagggatatgaacaacaggagctgatatttgaatcgtgaatatacgtggccttatagtaaaaggaccacagatactcgaatgtcagacctttaggaacaagtcattttctactgtaggattttggagggttcataatagaaagtaacacatctccttgtgtctaaaaataggaataaatcctaatatgaaccaaaaaatatattaggtacagttttctgagttgatattgaaatgatgaaaaagaaagagatctgggactgggggttcttaacacactgggtttagggacctcaagaatat

SEQ ID NO: 125575 - DNA, 1050 bp, Homo sapiens
aagtatcccataagctttaaaaatgtaattttgtcatacttaccttggtatagtagattgtaagttatttagagactataaagtcacagatgaatgtttacaagtactctttttggagttgggcttattctatctatgtcttctttagcagtggggatttggattattcttaaccataacacatacaagtctcattattggaaaattacaggacagaaacaaatgctgtaaatatgcaccactgcgcatcatgagattaaacagacaattttcaaaaagtcaaatttctaatgataaaattaaagtaagtaatttatatttaaaaagcaggaatagcagcaatgcaaactgtgattgacttaagaccacagtgaggttacagtgataataaatcattcttctggagaattgtgagaattttctaactgttggtgtgtgtaagtgcaaggtaggcactttgcataattgtatagtagctgacattcttgatatgccagtttcaagtcctttatatactttgctaacttgctgatattaatttattaatacaggtttttaggactcccctctcttatctaaggtaactagcttattaaagctcatattaaagaaaacaagtatctgtggaaatgttcttgtgggtaccagtgattctagagccttacgttaagaaacactagtctaatggatcaatgtataggtaaatgatattagacattttgagtaggattaagatccaggagactatctgaataatgacctttctctctctttctttttaaaatatggtcatcctaacgcgtatgataacccagatactctttctttttaaatacccttttatttaccaaccctcttaaacctggccctgaagttaagatcaacagctatgtgtgaataatttttttccttctcctttgctttgcttttcctatcaaattgaaataccctgccactttcttccctctctgaaaacacaaaagaggattaagccatataatggactatttatgtgtcaaattaaacgttttactctgaggctgtttctga

SEQ ID NO: 125576 - DNA, 1680 bp, Homo sapiens
ctgctgcagcatgggccgctgctgccatcatcagtgggacccaaggcaggaagtgttttttcctgtagggaggatagatttttttttgtctcttacaggtagcatctggcaggcatgtagaagttagacatgaagcctccacccatggatctgagccaagtagactgacctgtgtaagcttcagatgcctcagtcttggtctccttagctccctgtttttgtcaactgtgccatccagctgagcaccttagagcttgaagctgagagcttcagcggggccagtgcctacaagggctgtgtgtatatgctttagaggtgggagaattgtgctgccagtgggcgtttggcccactaaggagaacacctgtgacctctgcaatcttccctacccctggcattccaagtgccattccaagtctgtagagataatagaacaaacgtaattttttgtgtggttggcaacgaagactggaggagaataaccacacctttggaagacttcggtggtcctttgaaatgaggagtttttatagaaacacttatcattttaaagacctaccatttttaaggtcactcttctgctagggctgtgaaatacagacatatgaaatgttttccagtgttgctctggtacttacgtgtgtgatgattttattggagaaatggatgaatatgaggttggagagtctttacatgtatgaactatcaaatatacagttcagtagcctgaaaacattaacaaatagcttttatttattgtatccttatgtctttcaatttggttcttatctgttgtctcttcagttgatgcaaatttgtgctcaacttttcctgaggggaaatggagagatactttcttggattagcttatgatcttgaacttgactattttaaagagtcatggtatataccaatctggattgtgtttaggatggggcttgggggatggtttctttgttctcttttggcccacgtcttctaacaacccatttgtttagggggttttatgctgcttagagtgagctgagaatgtgctcaagcacataattttagcctgtttttcaggtttacatgaaaaatgtaacaggcttctgaaacccctctaggttccagctttcaagaggctggtcaggaatgcactgaccgagagacttccctcaaaattaatttataaacacgctagaactttcctcaccttaattttgagaaaaagatctctctcatggcattttcaagtgttatggtagatggaaataatgaggaaactgtggcaccttgaacagagtgagaggtttagagttgtatagaccttagtacaaattttgactctgtcattaattacctgttctgtcatgagtgagttacttaacattccctgagcctcagtttcagcatctgtacagtgaggattctatttatttcatactgttgtggagacttgagcaacagagtgtgaaaacatctgtcagcgcctggtgtattttggacattctgtaaatcttagcagcccatttccccattctgggggtaaagccacaggacttttttggcaaatagttgagatacttggtgccaaaaggaaatttaactcatgccatgacaagtttttttgtataaggatgggattctggaaacatgataattttttctcttggccatatggattagcaaaggctttag

SEQ ID NO: 125577 - DNA, 1045 bp, Homo sapiens
ccgtattcctttttatagctgcttaatatttcattgtatagctgtaccataatttacttaacctgtctgacactttggttatttacaatcttttgctcttacaagtgatgctgcagtgataatgttttttttttttttttttttttcccgagacagaatctcactcttgcccaggctggggtgcagtggcacaatctcggctcactgcaacctctgcctctcaggttcaagcaattcttctgcctcagcctcctgaatagctggaattacaggtgcccgccgccacacctggctaatttttgtatatttagtaaagacggggtttcgccatgttgtccaggcttgtctcagactcctgacctcaagtgatctgcccgcctcggcctcccaaagtgctgggattacaggcatacagtgaataatcttgatcatatggcatttcatcctgggtgtgtgttcagttgtaggataaattcccagaagtgaaattgttacagtgaatgtgcatttgtaattttgatagtcactgctaaatccctctgtagaggtcgtactaatttatattcccatctgtttaagagtagagatttccccgcagtcttgtcaacagggtggtggtgttaaacttttgaatttttgccaatctgataggagaaaattggtatctcaaagtggtttcaatttgcatttcttattatgagtaatgttgagcattatttactatgtccaagatctgatagtatttccttttgtgtcatcaacagtctggttatatttctttcctgttttttctatttgattattgctatttttttttaatttttaaaataagctattttggaatacttatagacttaccaaaaagttgcaaagattacggggattttttttttcttttcttatgccctcattagctcgttaattgggttagatggtttgaggaaggacaggtctcctggaattctgtggcttgtcataggtttgtcagcccaaataaggatgcacatccaattcacgactcctggctgcctctggggattttcca

SEQ ID NO: 125578 - DNA, 1157 bp, Homo sapiens
ttctgtagcattttgcagtttgggaaacattttatgtattttattttatctcagtctcataaaagagcttgaggtattattatctccagtttacgactgaagagatggggagtcaaataggttatctgattctcccaatgccatacagctccttggtggtggagttggggtttgagtccaggtctcctgactctgaatctccacgtgcttccctctggtctcttgagtgaaataacccgtactagcaagaaagagaagagtatgtcggcaaaagagaaacctggaatagttgccaattgtccctaggttcagatcacatacttctagggcatcagagctagaaggaacatgagatcagtgcatcctctttatttgactaatgaaaacattgatgtgcttgtgagggacttcgagaggtcaatgtggtgctggaagcagctcaatggagagggtagacagttccccttggatgctcatgtgtggtcttctggggattgattagttgctggtaaggaaggagctcattttggggaaagtaggtacatagattcatagagggaaaacctttattcagaagcaggcagtttttctgcaatatcttcctgggaaacacaaataaaagggctgtagtttagtattcagatgtggttctggttgtgcaaggataaggagaaaaggcagaggcagggtgagaaggaaggaaaatgaatgactgatttgaaaggtcagtgagaagtctgtgaaaggtacatacttagggtctgtagggcagtcatttgaaatccaggatacttagtatatatataggaggacttcgtagtagttctctgactggaagaggactgggctgccttgtgtgtgtgagctttcatcatgggggcagtggttactacatgctatttctaagaattgcacttgtggggtgatttctactttgggtaggaggttattctaggtagagctagtgtggatcagcaacatcagcaccacctgggatcttgttagaaatgcagatttggggactcctaccctagacttactgaatcagaatctccagtgggtgcagttcaagaatgtgtattttaacaagatctccaagtcattggtctgcatgttcaatgtttggaagcattgctctagtgcagaggctctccaag

SEQ ID NO: 125579 - DNA, 1018 bp, Homo sapiens
ttttaaccccatttgggctttgcagagtaggtcttagagaaagcccttctccatacttgttcgttcagtcgtgtatcatgtacagccatccattttatggttttggctgttgtaaataaaatggctagagcctgtgcatctggagttgtggtgactcttagtcttgggatgcgtgcctcttcctctcggtcgttgctttataggctgtctctgaggttccagaaggggctcagagaatgagctccaactgacatgtttgagcctttgagtctcttcatgaaagctcagtttgttcaagtaaaatctgaatggctcagagaggacactgtggtgtttagcttaccaagcccagtgtgatatcactggtttgttaatatctacagaaacacacacaggaaaaatattctagagcatcatattgctcacctcctctaaattcttttttcatggatgatcgaaagaaaaacctttttgagtctctctcttcttttttgtgaatgactaatagaaagaagacgacactggtaactttcagaagcattgtgatagcattctgatggtgggattatgatgttcagacatgggagggtattagcaaccaaacatcatttcctttaggggactggaggtagtggtcatctgtgagtctagagctgtcttcgagggaagtgagcagtggctcttccaaggacacagagatgtcaggcacctctctcatgcatgcaagtgctacatattatgtccacagtatctggagtatttaaaccaggaataacacgtagtctttattattggaagaaataaattaggtcagagttagtatgccatcgtgtgatgccagtttgtattctttattttctgtacttgcttctagagagggagtaaatactatgagataatgaagaaagacatgtttttgtgacttttctgatttaggacactttatgttgtggaggttttttgaaggatttggaatttggttgcttattgagaacctcttgagaaaatcagattatct

SEQ ID NO: 125580 - DNA, 1042 bp, Homo sapiens
attgttgcagtgagcagacttagcggaactgcacaaggctggctagaggccaggtttagactaccttggaagaattggcttaagggcagaggagaggtttagaaaactcctttcttcctctttggtggcattaatctttgcgaaaccaggctcagactccttttgcacctttcccaggaatggggtagcatagatcttcttcctatgtgaatcacagaaagggactttgtgtgggtgctgtgtgttcattgtaaaccactggtgctgctatctaggtggagttaaagttgataccagcagagtaagttagcctgagcaggaggatggagttctgcagtacagccggaaattttcacttcatagtgtttctactgtaacttctcaccctgtgttgaaaaaggcacacctggccattcgcatagtttggatacgttttaacccataagagtgctgtccttaaagatgatgaaaagagacattttagctccttggaaataagcacatttctgaaaccacccgtctgagtgcacacttgtgcagataaacaggtacttttgtttatgctctgactcaagtggaaagggcaaaataagagattttccttctcctgagtcttttcactgtgaggattttgtcctttaaataaaataaaccggaactgtaacctttattatgggaggagtgtggaggagttaggaatgaggcaaaatgccctccctgtttctcagataactcttgctaccgtctgagcagtgtttatttaacagatttaatgcattgcctcaatagcatcacacgaaacatgtcaccccccctttttagtttcttcccttcaaaaattttcttaaaaatgccagaaccttaccaagtcacttaaataaatcagtccaagtatgaaatgatctctgaagtgacttaacacaaatgattctgactttactacttgggagactcttttttgatggccagccctctaaattgtaggaagatcattttctagctccctattgtcaaaaaacaaagcaaaatcaaattaaataag

SEQ ID NO: 125581 - DNA, 1887 bp, Homo sapiens
ccagccacttagttttgtacaatcccagtgttcaaggaagctagagatcctcttagccagcccgcccgcaggggttttgcacacacattgttacatctcttcaaaatggctgtcccacctttgcttacatgaaatggcctgccttggcaaataaacctctttgaacagttctgtttttgttagatagttcctgctttaatttaggggaaaatatttctctttgtgggtttgtagaacctattggttcttgttttactctctggggtcatattgaataaatctaatttcttctttcacacttgaagcccttgagattttttttaaagacagttctcatatcccccaagtatcagacttaaaaatctcaatttcttcaactgggtctcacataaaactgtcttgagacttctctccatcctgttccttctcctgagtatgatacaacatgaagaaggggaggctgaaggaagatttaataggaggctttaaatgctggggggaattgtcatacagaaaaagctggtaaggtctttacatttaccatggaaacaagaaatcacaggctcatattgtggctaaggagatttaattagcaggaaacctgtcttaaccttatggatttggtgtcaggaaacctgtcttaaccttgtggatcatgcaatggactgcctgctatgggaagttgagggatcttttgccttagtgtaagacaagtcttcaagctcagaattcgtatattttgtgtaagagacgttgcttttagttaaatgttttgcttaaagtattcttgtcattgcttgtcatctatgcctgatgcctgaatttccctcttgtgttggttcattggatgtaaggcatcatcatgactgctgttaatcatagggggaaggaatatggttcagggctttatgaaggaagggaaacagtggcatagcacaggataattaatagcaagtggagtgacagtttgattccctggtagggaccctggcattgttgaaggaaaaaaaaatcactttattctttcatagagagaggcagctgtaattctggttggatggaatccaattaaaaggaactgacatgcaaattgatgatgagacagtgtgagcatagaagtagtccaagaagagttttgtaagaaatggcagagaagagtgtaagtaatttggcatggtaatgtgtgtaagaaaatggaaagctgatgggttggctacctgaacaattatgtctggaatctcagccagcagagaacaggagactggttggtttggtagagttgttaacaaaactttctggtgttttgagttttggtctacattttaggaattatagcctttcataatagaatgaatataaatcaacccttgagggttataggctttcaaattggtggtggttaaatataatattctcaagattctatgatgggagtcccagcctggctcttggaaagaagatctcattgtacaggtgtacttcacctgacctaatgatgtgttctcaaagatttgtgtgagaattggctcctaaatttaggatgaaataggagagcttgccatttctagtaatgctattatgaatcattttctaatgtaaaaaatccttttataaccacagtcatgcccaatttatcttttaagtaaattcataagtccacatattagatttgtttaaaccaaaggtatttttctttgaaatgaaataattgtaggggcacataacagttaagctttagagtaacagaggaaaaattgggtaagattttataagtcagtatattgctttttagggaggaaattctgcctaagaagtcagacagcttctgctgttattacgggaaaaggagaaggctgcccaacgtatttcagggagatttactaggat

SEQ ID NO: 125582 - DNA, 1088 bp, Homo sapiens
ttattctgaagaaagccaaagaaggtggaatggagttcatcttgagaaagcggtagaagattgagaagctaagaaaagacttacacagcagcaaaaagaagaagagactggagtagtgggcagagttttcagttagcaagagagcaccatccaattgttatgctggtcagcagcaaggaacattaatgaaggagatgaagaatgaccagggtcagtttttgttcatccaggtttgagcagggtgttgcttatgatgctccatgcagttttgcctcccacaatctctctctgatctttgcctcctgatctgctcaagtactgcagcagcaatgcattctctactgaaggctgtcacgtttacttttcactgtgcctagaatgctcttaccctcaagcctccctccttcacttgattcaggttgctgctagaagctcccttatcagagagacctttagtgaccattctgtctgaaggaggcagacactcttcccttattccgcttttcttcatagcactcattatcacctcacacatggttgtttaatgtttccccaattttctctgctagaagtaagttctttgagagttcagcttcagtttcttttgcccatcagtgtattcccagtacctaatttatataaaaatttgtggaatggatttttagggtatctcttgcctatcacagtgagaagagctgagaatgaagaatacaggactcagtccttgtcctgtgttatgcaatgtattacatagttatagtaagtataacagcctgagcacagagtgctgtgagctttgagaaataagctagagatggtcatcacagaactggatcttgaatgataaagaggagttttgttctgtggtggagacaaggaatgatcttctaggctatcaaagcagggtgagtgaagttggagagatgtagaaatgagttttgtgtttggatgtcattgagtgattttgatttggctgctagagcacaggtacatgggaaagcatgacaaaggggcctgagaggtagggttggggaggacatgtgaaacatatgttgagatctgattggtaaagttattgataggcgttt

SEQ ID NO: 125583 - DNA, 1031 bp, Homo sapiens
aactgttcctttttttctcacaatagtagttaagctgtgtcattgggatacaaagggaaggagaaggctatttccattcttagaatagaaaaattggaaaatgccttggcaaatggaggtattcttattctacattttttttttttttttgagaccaagtctcgctttgtcacccaggctggagtgtagtggagccatgtgagctcactgcaacctccgccttctgggctcaaacgctaccacacccagctaatttttttatttttgttttttaagagctggaaatttgctatgttgcccaggctggtcttgaactcctgggctcgagtgatccgcctgccttgtccccgcaaagtgctgggattacaggtgtgcaccactgtgcctggccataccttacaggttaagcagctatgtggccttgtgcatttcatttaactgtgtttcatttgtcctttcatggagatagactttgttgatatcctttcatcgttgatgtgcagaacaaagtatgctgcttgggaaattataaacatactttcatttgaaatattgggtaatatcaggagtcctttgctttaatagaagtagatctggaattgcttttttttttttcttggaatatggtaacaccaaagcatctgagctactcacacccatttccagaggaaaacatgatcatttccaggagatggcctgcagttttaaagctttttgctgcttgttttctacatgtcaaaacacatcccatttcagcagttggtgagcgctaccatagaactgttcagaagcaagagggaggattgagtcatgttgtacgtgcagctgcatattaacctgcaggtcatagcagtccctgatccaaaggactgtctgacactttatccccgttcttactgccttcatcattcacagcagccagtgtaggactctcccactttagccttgatcatttggagtagcagaatcgtggtcttgtgtatatatagagtgttatataggccatgtgattctcggagacctttttagga

SEQ ID NO: 125584 - DNA, 1010 bp, Homo sapiens
agagtattggtattaatttatttgaaaaattagcaggagtatatcaaacacttactgtatgccaggacttaccatgataaataagaggtggacccctgtccttatggagcccacttgaatcaaaaagtaaacatatgagcatgcaaatagatggctgtaagaatgtgatgggcatgccattttttctagcaggttgcctaccacatagtctatatgtgttagagatacacattaggtacacagaagagggtccatttgtggcatagagagagattagaggaatcttcatgaaggaagtgacatgatgatgatgttttgaatgacaggaaggagtatgcaaaaaaaggcagggttgacattccagacagaaagactagtatggaccaagacatgtggacatggaaatggtttgctccttttggggtcctgaaggtaataagtgcaatgaggctggagaactgggtttgtcttaaggggctatgggaaatgagggtcagagtgtaggctcttatgaaggctgtctggtcagacttgaggggaaggtatgctggtaaattgcactgagaatagttcctagctgtcccatatttcagcatctcctgaaatagatgtgtactgtgatgtacaagttccaggatacaatcagttcatgagtatccagttaatgtacctgcaggatttgggcagcaatatatgtagggtgttgtgtgaaaatattggatatgaacaattacaatcttggcttgcacaagaaatcattgtgatgcaggagggaagggtagaaaagttagattattttttttcccctctaatgcagtgcctctcaactttgttacaaattagaattacctggggatcttttttttaggatattgtttacatgcagtgaaatgcacagatcttaagtgtacacatcaatgaattttggcaaatatacatacccatgtagcacacttacccatcaagttatagaccatagtcagaacctgaaaaagttttttagtttccgg

SEQ ID NO: 125585 - DNA, 1128 bp, Homo sapiens
ttttattttagtttttcattacaaagcagtttatgaagttttttatattttcttctgttgccttaagatgaacaaacttgtcatcccttctgagatctaacatcaattctgtccccacctgccccccaatatttcctgtggtttaattaaaagcaatttttaaaatccatctgagtttctgtcgatacatatgccctctccttacctgctgtgctatgaggaaaggtgggctaaatcaggagctcgtgttattcatatcttgggagaggaatagaaacagccagtactccaatctcagcttcctgtaatgtctacaagtcagtgtttgctcatctataaagctgggatgagaataacaaatgtacagagaatttttttaatgcacttaagccttctcttaagcactgttaagaacttcagttgaaagtgtttaaaataccaaatagctgtaacctttgattgttaatatgtgtgcaccatcatttcttggatttttctcaatagctagagaccacatgggatctttggtgttttccaaaatgaaccaccatgctattacctgcagacattaagggtctgattatacaaagaaactgagagttgaggatgtccatcagaaatacactgtttcaaagtcagatctgagtacttggtgaagactttggggactacttaatagtaatgattactagaaaaataaacactggcaatatagatagtggttaaaaaacatgggctttgggctgggcatagttgctcatgcctgtaatcctggcactttgggaggccaaggtgggaggatcacttgaacccgtttgagaccagcctgggcaacatgccgaaaccctgtctgtataaaaaatacaaaaattagccaggtgtggtggtatgcaccttaagttctagctatctggggaactgaggtagaaggatcgcttgagcctgggaggtcgaggctgcagtgagccatgatcatgacactgcactctagcctggaagacatagcccaaccctgtctcaaaaacaaaacaaaacaaataaacaaaaaacgtgggctttgacagagagacttgtttaacttaattaaacaagtgccacttaagtgatttggggtgagtaattttagct

SEQ ID NO: 125586 - DNA, 1164 bp, Homo sapiens
cagtggagtttggatcactgggattgagggggatgaggaagggctagatagatagtatgaaacctattggattcatactatggctgcagaagtctgggctttacacattaggttgctaccaagctggatattttgaaatatatatatgtatatgcctgtaatgttttagcatttgcttgttgggttttttttttccccataatggtaggttcttaactgactttttcaaatgcaaggtaaaactttcttttccttttcttgtctccagagtactgatgtgtaaccacttagtaccactaatgccaggattcatttctgtgctacagatggtcagtgagattataaaagctctgaaaaggtttttatataatttgaggtcttctcagttgagagtttgtgtctgacatattaattccttcccatccaccccctgccccattctcaatgtaaaccatatgggacatgtattaaaaaacaaatttcagacattttctggagattttaattcagtagttctggaataggttgcaggaatctgactcttaacgatcaagcacatttgatattcagacaactctattgcatcctccagaagctccaggattctgtatataatttgtaggatatacttgcctcttctatgtcaagtctcttacccagtctgattatgtgagatgtcttaaacagagcgttttttcataaacctttatgtaggataatactactcctaaaacactttattacatagtttttggattggtaatggcaaaagaatgagaaagcacctgaggaggcaccattgtgagtgatgaaactggggtatcagacctggttatgaaaggagatgataacccttgtactgttttcagacagttgcagagttatcctatgaaggaggaaccataattctggtggccctgcagagcagaccggggactgatgaatggatgctgtgggggctgaacataaagagaacaggtttaacagaagggaccaacatcctttgagagatactactttttaccttctaattatttaacccatgaaactattattttctcccaaagacacctgtttttagactatcagttaataaaaagaatggggctacttaggtggaagctggctgaggggcacaaacagattaagccccttttctcccca

SEQ ID NO: 125587 - DNA, 1048 bp, Homo sapiens
ttccagtacgtagactagcacctgacattagtgggcactcagtgaatatttgttgaatacatgcatttgttgaaaaaagtgaaaattgtttaaagtggtactttgtgaacctttttttctcttttttctgtcatcctggagacttctcatttaacccccagtctgtctcgtgatccatgccccatccttccttcatgcctcacaccacctccttctcaatctatacttggcaaagaggaataaagacgctaaggatattgtggtaaaccaaagtcatctcagaaacacagtgaaattccctaggcatctgaattgggaaacctattggctgatttgctttgacttgggtatttcctgtgattttcagccgggatgtgctcctgtgctcagaagtgaggatctgttgtaggtttatggcctagattaattgggatattttgtgaagtctctgaagtgttatcacttcatctttatccttgcctgctattcctcatgaaaagcatttgaattattttagagaagatataaatttgcttgtgttatccagtgtcagcttaaagctgattagcattttgcatcacctttgcaactcataaatcatccacttaccctctcagtaagcaggctgtaagtcagcatggaagcacctgctgcagcttcttgtcctgtgatttagaggacactccagattctctgcagacccttctgtggtgttattctctggtaaggcttcacctatatgggaaatgagtaaagacttttggtgacttttttttccctagggagttcttaagggttaccctggacgagagacttctcagaaatatagtctttaataaacctggtccaggcacaggtttggttcatttggcatatttgttgttttaaaaattttggaggtacttttcaacatttaaagtccaggacatttcacatttaaaaaaatccagatttagggttattccgggaaaatcagaacacctggcagtgtcaggccatgctgcatgcctggcttcatttgttattgagagcaggagtgctctaggaa

SEQ ID NO: 125588 - DNA, 3390 bp, Homo sapiens
gcatcagttgcaaaagtagatgacagtaacacactccctaagtccccagtctgctcctgggaggagcagcctgccttgttcatggcagtcatagccacagggggatgtttgaaagacagccccttatacagtgtctattgattttcttcaccctcttgttttgctcatccatcctgttgttctaggatgcttatttgtcatgcataaaagccttgttacagtgaacccaaacaagtcattgacatttaaaattaaattgcaacaggtattgtcaatagctaaactgctcattgacagtgcattgctaattgcattgagagaacatcctaactgggtatattctgccaaatcaaatcggaaacattggctgtctaccagcaaattcattttgacttgcacagagtttggggatccacagatccctcaccaatctcaaaatactgtgtttatggaaacgctaattattatttttttttttgctgaggttctttgcagagaaggggaattctgatcatcttcactgactgctaagccaggagtcagaaactgtgcctttggaagggagagaactacagatttggggtggagtaaagttcaatgcaagggggtcatttggggaggtgggccatcaggttctttatctgtaaatctaagccatatccttggatccattttttttttccttctctcctttttcatccccttctctctcttctataggtacatgggagggggacaagggtggagacacttaatttttattaagcactgttcgtggtattttatgtgaattaatttgtttacttcccacaatgaccctggggagcagatatgctatcaggtaaaaaaactaaggcacagagagggtaaaactcttcgaaagagtcttgtggttagtcagcttctgtgagagtgagagtgggctgccctgaggccatctgttccctctccccagctgatatttttgtgctctcagggtaaacatttaagcctgtgagttaaactcagccttggactagctgagttcctctggaggccttgcaagtagcagtttggttggcagggcaattaagtatgctaggtgcactgtgctgaaccccaggagggagggaaggaatggaatctagtctttgcttgcgttatacatgcttattggtttgtggcaggcgtgattgatgccagaatcaaaatgacttaaagcagcttcccttgagaagcactactctaacggttttttttcctctttgttgccctaggtcccttgtgaataggatttagctctgattcagctgctgctgttcttttggtaatcagtgtggaggaaggagatgagggctgctattaatggcttcttattttgcattctcctaatcagatatcctgcagttattagtgtgaatgcaagatgttcggtggtgtccctgggtggttttcttaggtgtactggactgttagctttctaagatggaatgttttattaggttctggcctagggggttggttagatgggtggaggttgttaaaaagcactaaagaaaaggaataggatataaaaccaatcttcagggggtgggaataacaacccaccaccttcacttccctcccctcctgccctgaaaaccttatcttgctaatacccttcagatattaaaagtgaaataacagagctatttactaggcagctaaatgcaaattctctcccccattagttttaattaggatgaaatcatacatttaaataaccacttctattactaataactgaacttctgattcactctgaacccaggcaaatgcctcttctggtatgaatggcccacctctgagtcattccgcacctgcatattgacacagccaggctcctgatgtgggtacacacatctgggatttaagggcatgactggcatgttgaatcttgggtataaagctttctgcactataccctggggacaaacaggatagctcaactggagaataaagagcttgcaagctcaaaagaaaacaacaaccaaaaatacctcaaccaaattctgctcttgcttctatcctactgtttctttaggtgtttaaagggctgtagttttaaaaatctcccacccacctcatctttttaagtaaatgtcacaacagtactatgtcaatacagttgaaaataagtatttgagttgaaagaattggctctttgaggctttaactatcagatttgtgctaattctttactgtttccttgacatagtatatgcagtctgtgctaagagagtatggatgttgtcgtcggtgtatagaatggtggctgttgtaaacttctgtatgttggggaaggattgaacctgctgtctggagaattagaaaccagcagcttgacttaaatccctcagtgtcacaaccagctaatgaaggagaggactgctaaactcccagtggtctttgtggctacgaggacttactcaagtttgagactatctttagtgggccaatgacgtaggaacacaatcagcagaggacatgtagtttacagcagcctgtaatgtgccagagacatgactagctgcctctttggccctggggaagtgtgtctggccctgcttgcatcctctgtgagtgggaattgtgccagacaccagctagacatgaccagctgcttcttcgatgttctgtggacatgattggctgtagcttttgatcaggacagtgttcctaatgaagtgtgaccagcgtcatttagacaggaaagaatgacagctgatgtgcaagaatttttcttgattggcagcatttggaactagtaaccagagaaggtaggtggggggaggagaagccagctctgattgacaagagcttatctttatttaatctacttctgaggcactgaagttgaaatcttaggcaagtgaaagaaaggaagacacaattgtgaaacataattaaagattcttgacaaaaacatacttaaatcagaaatgtcttttttttttcttttttgagatggaggtttgctcttgttgcccaggctggagtgcaatggtgtgatcttggctcactgcaacctccacctcccgggttcaaggaattctcctgcctcagcctcccaaggagctgggattacaggcgcctgccaccatgcctggctaatttttttgtatttttaatagagacggactttcaccatgttaggctggtctcaaacccctgaccttaggtaatctgcccgcctcggcctcccaaggtgctgggattataggcatgagccactgcgcccggccagaaatgtctttcaataggagagcaatgcagagtttaggtgtgaggttatcactgctccttcggctatgagaaagagcttttgcccagggattgttaatttttaggcaaaatttaaagtggcgatgg

SEQ ID NO: 125589 - DNA, 1034 bp, Homo sapiens
ggcctccctctgtcactcaggttgaagttcagtggtgcgatattggctcactgcagcctcaacttcacaggcttaagtgatcctccccacttagcctcctaagtattaggcatgaagcaccacgcttggctaatttaaaaaatttctatttttgtagagacagggtctccctatgttgcccaggctggtgttgaattcctgggctaaagtgatcctttccacctcagcctctgaaagtgctgggattataggcataagccactggtgcccagcctattttacctttttttttttttttttttgaggggggagggcagatggtcttttagatttacctatgtatttgacaatttgtttgttcatatttctttcttgtgtctcagaccttccttcaggtttgacttttctttagaatttccttgagcgagtgcctattggtagtaaatgctcttttttgtttatcatagatgtctttcttttgcccttcatctcaaaaggtagttagctggatacacagttctagggggaaagattttcttctctttgagtcttgtaggtttgttgtgaagattacctgggttcatatctaaagcccttagcactatgcttggcatgtttgctctgtaaataacagtggctgttacattctcagaaaaatactggaacagttggaggcaatgcaggcttggttgggatgtccatactttgactaactttttacattattttcttaaaactttgatttcattgagattggggtgggagtacatttaagcatcaaaactaactttgaagatagatttgattgaactgtgagttctatcactcgctagttgtatatacctttggtagattatcttacctgtcctaagaatcagtttcttcatctatacagtgatcattgtaatacttcctatttctctgagttgctgggaaggttgcatgagaacacatttaaagctcttctccaagcctcacatagtaggtggctagttgtggtaattatttgttgcctgtaaaccacttttatgact

SEQ ID NO: 125590 - DNA, 1063 bp, Homo sapiens
tggacacagatacttgattagaagcagaatcaccttagatatctctgcgccccagcttctctgtctataaattgggaataatacctgaagaggtcattgtcaggattgaatgagatgatgtaagcagtgcaccttgcccagggcttaataaatagtgatgagactggtagatttctctgtgagggggcttcaggatatacctcccttatacagacttctattcctttgagtccaccgccccccacaacatctttatgaactgtaatgtatctcatactgtacaagtcacccatttaaagtgtacacttcagtggcttttagatttacagagttgtgcaaccactaccacagtcagttttagaaaatgttcatctcctcgaaaagaaatctgtaccctttagttatcattactttattccctcatcctcttcctcatcagatgttgtaggcaccacctttcttcccttccttcccttatcttcttttcagctgtggactgtgctgatttgcctgttgctggatcatgtgattgaaattctttgaatttttctgtaaatagccaatttagctttttcccttccagagtatttgtttctttgggtgtggaagcagctgctgcagccagtgcaagggctcaccattttgcgctttgcggctgttcatatggcaactttattcaaaaccgctcctgcactgcttaagttatttgttttatacaaaaacagttctcgctggcttgcggcttctctgctgccatgttgacaaatgttgcttctagtgaaatacacaaaaataaataacagcaagggagaggggagcacagagctaagtgaattcattttgcctcttgagtgccattctcatttgttttaaaaaccaccctggcacagacagaaaaggagaaggcagagaaccgcaggaaaagaaaaggccacatttgattctttgaattgggctgtaggggctggctgaacagacaacttgagaagtatctggaatgtaggccctggggatgaggaaaagtttacaaggaatctgaataacctgcagatattcatattgc

SEQ ID NO: 125591 - DNA, 1943 bp, Homo sapiens
acagtgcccctgtactgactaaggagcctttcttttgagttcactggtctggcactggctcctagaagtgctgttttccagtgacagcaggatatttggaccactgggagagtcagtgggctggggtgggcccttgctctctgcagaggtgttctttctcccagtgggaggaaacaccacttgtcagaacacagctttggcttgcccaggttcctgttgtgcagatggggcctagagtctctctgggccccttgtcatggatccaagccaaggctgtcgcttgctgagccaggaataatataggaattagtctttttcttctttatactaagcactaatcaatctacagttaactctgtatctaatttctgaaccagatgccgtgaataactgcccctgaatgtgtttttgccaataaaaggataagtttaaggcttttaatcaatgccgcttgcactcagtatttaaggtcagaatcttgtgtgcgacttattttgatcaggataattgttgggttaaaaaatgaacggtttttgaaattgtgacactcgcggttgactcgtgggtgaattaatctttgagaggatggaaaattgtcgagttcataagagttctcttgctctctagttgtctttcaggtcacttatggaaaaatatgacttttaggaggaaggcattctttttcaatgggaaaggagataagagactaatagaaatttctaaggagtcagtgatggaggctcaggggaaattggaaatgaagctgggtgttttggatctgcggtgagctgagggactggaacagcagctgtgtatgttctaggtaatattaacttgttgtaattttatgtctccagcatacctttttcaaaggaactcatgtttcctgaccaacgactgtgtactgtctagaatgaagcatagtgtttagaaacatctggggtttagatattggcttcactgaatggcctagggcaagtcactgagcctctgtgccctcagtttttataattataaaatgggatggtaatagctacctcgcagttggaaaacttaaatgtgatcatgtatgtgagaatgtgaagtgcagtgcctggcacacaagaggtgctgaaaggagcatctccttttacttctttgtggagtttgtttggctggtctgctggtctgtcatacatttgtctggtgtgcctctagatacacgtaatgtggaaatttccctaccttgtaacagtgagttggaaattgttcctgttgatctgtttttttttttcttttgtgcttagggaaaggcatgagaaaaatgagtcaggatgccctccatttctggagaagcttggtggtaattctgttccccagtggctcacaagcctgggcagttcagagaatatgagaattggtagatcatggagaactaggctctgcccctttggctatgcgggagttacttagtcttcctgaagtttcctgtccatgaaaaggggatgtgtgagggtgcaatatgggtaatgtttgtgaacaacctttgttagtgtcaggaaagtccaaaactatgtggtgtggtattttcatcatcttgagttgacaacagtgcttatccaaaagtcaattttggtattttgtcaaatgttaaaggctcaggaaataacttccaactcaaggaagatttgtatccactctggagctggaggagcttatattaagaatgtaagatacttgggctcccaggatttctggaagagctggcagtctccctgaggttcaggttctcagaccagcaggccatgcatgggggcttgtgattaagctggtgccgaacattgctgaattatataggtctttctgtgctacaggttggttttctgctgttcacatgtagtctaacagtggcctgttttcctttgcctcaactgtgacatcccctcgaagtgacctttatgaag

SEQ ID NO: 125592 - DNA, 1134 bp, Homo sapiens
ggcaatacacaatgtgtttctgctgaatattttgctatgatgttgacacagtaatgtacactttattttgattttagtgtgttttatttaaacattccattattcagaaattgttaccccctccttgttattactgtttgcctgcagttatttagaaagcagtttaattaatgttcttttaccgccccctgcttcagtatgagtttcaacacttttaatacaaagtgttcatatcactgtatgaacttactaaaacccaggacagtgatattcattcattcattgctttatccagcaaatgtgcaatacaaaaaaagatacatgcttcctctctacacatttcagtctaatatgaactgtttggttgaaatacagaaacataacatgcaattctctgggataaacgtttcactaaataaacagcagtgagaattctgaagatacacttaactaggtcagcctaggcttatcagagaaggcttcacagcataggcgatctttgatctggttcttgaagggtaaggatgtgttttccccccagggaccagttgagaaatagctagaattaattagttctgctgtaatcattgaggtgctgatcctagagtgtggcttccactgcagtactggatgtggggatgatgatctcattgcaaacacagcctgggtgggtgtttttggttttgttttaaggattctgaagcagcatatacacaaggttgacctcaggacctctttagttggttgctgctgctgttcacaatagatttagattggatagggcttcagttttcttactgttgcattccagcattttggatcagtcactttattacatcatttactttctggcttaggcttagttgttattaagtgaatcagggataaaccttaggctactctcctgcttcctttttcaaatgatccggagtaaataaaacaactacatctctttcgtcactgtgtttcgttcccatctcagaacgggtaaaatggccaatattttcagtgaaaatgtattgaaatgcatttcactgaaagaaatgttcacattcagtgaaatgtatctaaactctaaaaagagtctagaaaagctcattgacacatttgttacttgctgaaagccccagtgaa

SEQ ID NO: 125593 - DNA, 1018 bp, Homo sapiens
tgttttgagattcacaaaactcaatttacgaatctctggttgtagttatttgacttaatatataagacacttaccagaggagatggttgcaaacagatttgatgacaggtaaatttttctaaaggtctgctaacttcttattcagtcatggccaaccactgatacaatgctgagagttgctttctcctttcccctctactagcttggggtccacagaccaaaaaaatctataacttgcaaggctaataaatgcatgcttcagctgcctggaaatgctgttggactggcaatttgctgccccgctctaatagagactgcctcagatctggtctttaacctggattagctggataaagagaatcctctgggatcctgtgtgccatcacctgttagtgtgtttgctgtataaatgtaacatccactaactttgtcagatgatgtctggcctggctgctgtggctgtgattggaattgaaacatacagcttgttattaaggtagtgactggctgtgggggacaccgacgtctgttgtttttcattgttgatctagtgagttagaatgcctttcctgggctgttaatgttaaatagttcagtcctgttagtcgttttgtgagatcatctttctgtgtgatttgtgtgtatttccttgatctagtggggtgcagggtcagggactgaggggaaggtataattgtttacagaaaatgtgacaggacatggatttgaaatcagataggaagttaaggaatgccgggctcctctgaatattaaggaaaatctttaagcccctaattaacttcagaaaatccccttgctctcacagatgggaatttggctgggtaagctaataactggaatgaaggctaggagttgtgggttaagtttctccctggcaaataccaatatttcaggattacttcgactcttgtcctgctgcctcccactggatctttacaaactctgtgcagtagagattatcttgataaagattttggatgcatgttgggcctttatt

SEQ ID NO: 125594 - DNA, 1076 bp, Homo sapiens
tgcagctctggacctatataagctgtcaggtgtagaagagtgagcaggaaaaccttgtgggggtaactgattccttgtacaaaagaaccagatttcagttagtgatgaaaatggaggaagtgaagaatccaagtcgaatgatagaaaaggttatgtgtcgttgggcaagggttcaaaagacctagttgtcttgattagagaggaggggagctgagggaaaatgagtcacagaggaggaaataatgaagatgaagtggccagagaagacgggctcctgcaaggaggggcctgggttttagatagcctccaagaaggacaggaagtgtggcctgatgggattagctagtctcaagacaccaggtagaatgcaggccatctttgtagactgggccttggggtgtccaaaccatgaaatgcatggcagagtgtggacacacttgtttgtttatactctttctcccatcctgtacaatgaggcagaacatgaaggaaaaattaacaaacaccccaagtctcctgacacagggatcaaaacatattgatgatgtcttgcaaatctgataatttcattgaaccatgtgaagcttaaaattgatacataggcatacccttaacattaagtgctgctgtcagtctgacatagctggataaaccaatgttgaataatctattaaatatgtcagacttgaacaaagaacgtaaatcatattatattatttcagctgtaattaggtgggagataaaatcacaaatagatgagtttagtgaatatttcttagtgtgtacacagtgtcactggaatttctttccttgctctatgggaagaaagaaattgactgccttccaagtattgactgctgtccaggaagtgggaggttgaagggtgacttatgtaatgttcacagagtgggtttcatttataaattcaatgagattagctacaatcttcctgaagttaatggtgatggaaatgcaccattctgcatttagctggaaatagctagctatccaacttggagacttaattgttcctcagattatgatatgtttgcatttatatctccctcccctccttt

SEQ ID NO: 125595 - DNA, 1140 bp, Homo sapiens
tatttatttattttaaacaacaaaaataggaaatctcagcaagaatttatgggcctaccatgagggaaatttttgaggtgatagaaatatatatcttggcattgtggcttatgcatttgtcagactcaacaaatagtgtacttagagcaggtacttttaattttctgagtaaagtatacttcagtaaagttgatttacaaatcagggattttcatccctgaagattctggttcagtaggtctaggatagagtccaataattttttttttaattaatgccccaggtggttcttgggaactcctgatatctccagaggaacctaggctagttgagaattcttcagaatattaatctgttagcaatctgtgtaaatagaaactaggtctggtaaattatgaattaaccagataactacttgcagaataaacagaatacataattagaaatcattaagtgtgttatcaccacatggaaataattttttgtattttttttattgggtagtgttgtgaagaatattacatggtatccttagaagctgtaaattgtgatgctgggttataaaaaaactgtattgtggtatgtttttgcctctctcacttaaccccacccttcactccattccttctcaggacacttatcttcttggtggctaatggcagggtggattccacatttgggaactgctgttgcctgggcagtcatggttttcatcagtgtgtcccagggcgtggtgctttctgtcaacatcctgctctccatagaggctgagaatgatccctgatgcagtcatcacggcttttaggcctctcccattggcctcactttaacctgatgactatcatatttccatctaggctgcatttttaaatcttgtcaaggaagcccagggactctcctcactgataagccatttccaatccaggcctggggttgagtcaggtcaccttatgttcttactctttcccttgacttagattggtctggctggtccacccagataaagtgtagcagtgtctgaagctggatgtgaggggtcgggaagttgttgatggggatgccttcattccgcagcacacatttcaaggcaagcagatcattttcctatagcagtactggtcagagctggattcaggggaa

SEQ ID NO: 125596 - DNA, 1039 bp, Homo sapiens
tgcacatgatatctatctctacatcctatatggactgtgctttctaggagggattagttaggtttttcctttcctagtatagaaccaggactagtaggggaaggcatagaggaaaatactatggttctgtttcagagagagcattcttgcaggggtttcccaaatgtaaatttttttgttttttagagatagtgtctcagtctgatactcaggttagagtacagtggtttgattacagctcactgcaaccttgaactcctgggctccggtgagcccctcgcctcagcttcccaagttagtgagactacaggtgcacgccaccacacccagctaattaaataaaaatattttgtagaaatggggtcttgctatgtttcccaggctggtcttgaactcctggcctcaagtagtccttctgcctcagcctcccaaagtgctgggattacaggcatgacccaccatgcctagtcaaaaatgtaaatattaggtcttatgttactgaaggtattccaggaatgtttggatgtggtacagaagatgtgggtattgggaaacctctaagaatatttccaaattttatcttctgttgttctttaaaaaaaatataagctgtgaatacaaccgtggaaccacaagtaatataagaggagctgatttcttggtgcctgcactgctgactaaagatccagtctggttgcttattcagtaaacctttgagttagtgcagggagtcactctctgttttctcagggagcccttatttgagtaactgtcattacctctttccctaacccactacctttaattgtccttctgtggttagaaaaacttagtgtttgaaaggcatagtatctcaagggaactttagaagtatatcttacctttgctcttgggcatttccagatgaccctggcagtgtggccacaagcaaactggagaaggctgccagtatgtgcacgttttaataaatggaggatatctagcacctcctaacccttaccttctcctccatctcatcccattttctgattgaacagtc

SEQ ID NO: 125597 - DNA, 2196 bp, Homo sapiens
ctgccctcagcagcctgttggcagaggactagaataattgtttgtttaaaagttttactagctaattatactgcaccgaattgacaggcatctctattagagtctttccagtctcttgaaggctcttctccacattacttgtaatcttgcctcagtgtagactgcagtggctgatttttgtttgtttgttcttctctcctttcccttcccacttgttgcaaaggccacacaccaagtctggagagagagctgcctgtgggctgggaattggctgccttcatctggtcagccatatgtggctactggaaaaagtgcctttgggtcattcattctcaggtcaccaggccctagagtaaagccctaaacatgggctctctagcagaaagacttattaattccccttctcttaagtggaggcaaggaggtgtttctgaaccttcagaataacccgagggaacttgaaagtacagattcccggatgctatctcctggatgtgggttcaggttcagtaggtctgaaatgggaccaggttttagaatcttcttcgcggcccggctcacacctgtaattgcagcagtttgggaggctgaggtgggcagatagcttgagttcaggagtttgataccagcctgggcagcatagtgagaccttgtctctactaaaaagagagatcagctgggcgtggtggtgtgtgcctgttgtcccagctacttgggaggctgaggtggcaggatcacttgagcctgggagatcgaggctggagtgagctgtgatggtattactgcaggtggggtgacagagtgagaccccatctctctctcttgttttttttttttttgtttctttttaaaagaaccttcattacattaattgacttccaaggtctcatccagtcatgatggtttttgcatggtccctaccagtagaagatggatttcagaccacagggaatttatttgtagctacagtcaattttcaaattatttgccttacaaatgttttcaatcccagagacctttttcccagctggttcctgggttatattgccaaagtccctggttggtatgcactcgagaactgaaagataattttcttcttgattttaagaaaagataattaaggagggaaatctaccattaaaaaaaaaatcagacattacaaccaagtataacttttagagcagatcctctattgggaaggagcaatatgttatgttaccttgtatttgagcagttaattagggtcagatgtagttagttctcatgctttggccttgcaaaagtaatcccctttttggaaaggctttgttgagtccctaggaattattttaatggtctctaagtatgtttaactcagtcataatattctagttgtttggatttgttgtgtattgacattgacttagatattctcccctgctctgggctttacctcttactcgtacccaaatccatggtccacatgctgtggtgtcccctgggcatgcccagccttgccatgtgtgcaaggtaatccctttgaccctctcaagagggtgctgctcatcttttttttttttttttttttttttggcttcacttatcccacttgacattgccaaacgtgctttgacttgaagcaccgctgctcctgtggctgtctcctttgcttctcctcttcggctcattgagaatctgtttgagatacttgtcatcctttggagattagaactcactttagagggaggaatgattttacactgggactgttaggatcagtttaggaggaaacaggcccacgatgattttaggaggggtttctactgtggtccttgtaaccacatagtttgtactgagctggacactggccatttgagtagatgcttgttctccagttatagaatggttcccagctggcagatttcccactgggattcagtttccttggccgctgctgtttgttgtgctcacactgatttttgcggcatctttccaggcccttgagtcttttccaagcagaagaaatagcagaatgccttgccctccccttctcttctccttttgggtattccatggctattagggaaggacttcctgtgaaataaaatgagggcaaaggaaagtagcatgcctgtggcataaaaatgctgttagcaagcttgaggcatatcagagagattggtcctaagagtaacatttactgcctttctgcttttg

SEQ ID NO: 125598 - DNA, 1028 bp, Homo sapiens
gatacctgcctgttaggattgttttgaagattgagattgttcgtaaaatacttagaaaagtgccttggcacatagcaagtactatttaagtgtttatcagagcatagtctcaacttgtcccattaagaatattataaaactgtaaggtccagatgatgctttattctgtaaaggccattaatggagatgcttgaacatctctaaattacctttccctttgcttgctcaggaagtttgctaatctaaattcttcatgctgtgctgctgagtgtcatgtgtgattgcttgtgcaaggagacccaactgggttctatccgcacttaactgaaactcaagttattccctctctagccttaattcctgtcttctaactctccaatcgatttcttggctccactaattgaaacctaccccagttttctcatgctgttgagcagggatcttcttgagactgattatgatgggagaatgacctcatagtttctgatgccatcttccaatttatgtaactcagccccaagcatgctttttaaaaataatggccctaaattgctgacatcttgtcatctgctcagactcctaaatctttttgtgttccctcgactgaatgggattcactggagcaagatgcctttgtgcagtctgcatttagtgcacttggcgagtgacctccaatagagctgtgtgttcccttcgagcaacatgggtaatgattacagcgacaatgctgctattgtgtccagaggtttggggctgtaatttcataatgaaattgaaaaacatgagattaaaaacctgaatatagcacagtaattatatttaagtatcacaaatcatctccctgtatttagttaggtgtttgagatttggcctctttgtggagtgcagtcacgtcgtttcatacatctgcaaaatggaaggcttctaatttatggctaaaatgtgggaattgctttctcttaatgggaaggtgaggagaatggtattgaatttgaaggagctggtttgcttcattgactagagtcaag

SEQ ID NO: 125599 - DNA, 1023 bp, Homo sapiens
aacatttatggtcatacctctccaaattgaacaattgtgggaatatgtacagacagatttgcagggtagctgaaaagaaatgcagttctgttatttttttgttatagagtggtaacttgagtgaggattatgaaacattgcctagcagaactgtttttttaattgaccttcatgtataattaagaatatcaattattaatgttaaatatattggaattttaaaaattgtgattatttctttgtaatctgatttgtgctatttgccctgattatcagagtgttgtttgagattaaagtggtctagcttgggttcagtttgcaccaggagttttgaattaactaggctccatctgaatgtggaagattttcgtcgtgaggatgcaatggaatcgtaagtgtaaagggcctagtatagtgggtagtaatttattttactcctttttttccactttaaatgaagagtggctaaacttcaacttttgggacattggtctctacctgcacctccagaatgtaacctcttggggaagatatttggagacctggggacttttgcaggtgggtagtattacgcagagcccagatacccctgccttcttgtctggaaatcagtgattctcaaactgctttgtgcttgagtattacctggggggacatgttccgttttcagctccccaagccatagagttaagattcaatagacttgaggagctgctctcagtccaggattatgtgcagatcccgaatctgatcttgggctgctgtgcttttccagtgcccactcagtatttctggggctgcaaggaaggcagtggttccccttcacaggtacgtgaagctcttaactccatttttgtccttttaaattcacattaaagagagttttagatatgcaggaaaatgagaagggaaattgaccttgcctgtctctgggtcttgtgaatagaaaggaagagcctgcgcttggaggccactgggaatttgtggtgttccagaagacctctgctctcatgtgggctcttg

SEQ ID NO: 125600 - DNA, 1043 bp, Homo sapiens
acgcctggctaatttttttgatgagctagactctgttaccctcatttgctagttcatgaaattgaggcagagagagaaagtaagcaatctggccaaggccacacagctagcaaatgggatttaatccctagcattttcattccagagccttgcctttagccatcacactctactgtttctcttccatagtcgtcttctttcttgtgattccaagttaaagaattgtcatggatgagctttttccaggagtaaaggtacttgttggactcttcatcagatttggtcgcgggaaaagaggttgttgctcttccttagagacctgttctttctgcatttaaaatctgagtgtaaatttttttttagctggaaattttaaacgtgtagcaagtgtggccagcttgctcttgtaatgtttagtttcctggacctcatgttgcctccctaaaacttaaatggggttgtggttgcacaacagtatcatggaaatgaaatgaatcttaagcctaatgagtttgaataagatgagcacaatctaattttgtttccagtcgtttttcctcctttaaacaaagaatatcatgccaaattggaaacattggattgtgtcactgtgggtatttattttttactacatgtcaccaagatccagatttgttgagtgtattagttacatatggggtaaaattctgattttttaggtgtattagttatgtatggggtacaaaattaccacaaaacttaccatcttaaaacagcaaacttttactatcttagtttatgtgggtcaggaatttctgagtgacttatctgggtagttcttgcttgacttctcttttgagattccaggagtaaaggtacttgtcagactcttcatcagatttggtcccgggaaaagaggtcattgctcttccttagagacctgttcttgttgcatttaaattcttagtgtaaatttttttttagctggaaattttcaacctgtgtagcaagtgtggccagcttgctcttttaatgtttagtttcctggacctgcagccgaaatg

SEQ ID NO: 125601 - DNA, 1232 bp, Homo sapiens
atagtacattggaggaaatgctctgttgttttgcatcttctccaggcctctttatgactactttttttttgagatggagtctcactctgtcgccagactggagtgcagtggcatgatctcagctcactgcaacctccgcctcccaggttcaagtgattctcctgcctcagcctcccaagtagctgagactacaggcacatgccaccatgcccagctaatttttgtatttttagtagagacagggtttcaccatgttggccaggctggtctcgaacccttgacctcgtgatccacctgccttggcctcccaaagtgctgggattacaggtgtgactacttttttaaatgcttcaatgaaacttaacatgatgacctacacatttcagctgcgcatatgttctacctgttaatggtgagatacaacagagccatctttgactacttcacgctgtttactctaagaggcctgtatcattagatgacttcctgttggaagcagtaatttgtgtttggacttgggtgactgtcagtatgaatctagccaagaaaggtcatgtcacctgctacacagtttgctagagggaatacaggccaagccttttgcctctgaaatcaaagtactgtagaaggtgtaatagaaatgatgcctaggtttgtgtattcagggcctgagtttctgattaaagctgttaacaatgggggcaagctttccccgtgggagacaggcttcttggatctaaacctttctgacatctcaaagctttatttcctgatgatttctaaaagggaaggagccagccccttgaaattaaaatatcgacttacattccgttctccccagacggaagaatattagcagattgaatcagttggggttagtactttcttttatgtgttaaactcagttattctggctaagatcagatttttgtctaggacggagctgaaacacatgcggaatcttgttggttgagggctggaaacgaaggttggcttcacacaggttgcttctccaaaccgtaggtaagctcttcggccccgtgcacagcattcacagctgctgtctgctgcgctttcttgctccatcctgtctagtctcagaagtttcatggtactaatatcttggatccttacaaaggactgacttttgacccagttgactgataactatagagtactttacagtttaccaagagctttccttcatgtttgctctttacatcaaaattaca

SEQ ID NO: 125602 - DNA, 1022 bp, Homo sapiens
aaaagagaagaaaagaaaaccctggctaatgaggagctgggttccttttctccattgatgacagcttcctttctgatctgatggtccgtcagaaactaaggtggtgtgtgactgtggggttatgtccccgctgaagccgtcttttcctcagagttgtaattgatggggagacctgtcacttgttatgctgatgctgtgcagatttttgtgcagctgccagccaagagagttgtaggacagcatctgattgggtgcaggttgtggcaaaaatgataataaatagagagctggtgagggtagattttgattgacccgagattgtatattattaaactggagtctgcatgtacatgtcagtttatgaagaaccagacccataatccaactttaggactgtggcagttcgggtttattaaatgtgctttatatcactattaatattgaggagcaaagaggaatatctgtaatcttttaatctatgcaataatggtttggagggagattaccagatacattggactattgtttgtctataattgtattcagaactctccgaagcattgatttgtttctggcatgctgatttggctcagcagtctcataaagctcttttatagtcctctttgctttgtgttttccaaaaataattggagaataataataatgtggctggcgataaagaagagagagtaaggttgaaagcaaatttctagccgagtggatagccataaacatcttctatgctcataaacacctgggtctgtgacctttgtgtttataagatatttatcgcctcatgggctctctgtttgggggttaccacttcagtgccttgtaaaatttgattgtgtttagtaagtagattctgaatttttgctgagtagggaaaaagtgcccctcacctttgttttctttggaacaaccaatctgccaagaggggcagatctcaccaaggacaggagcagagagcttgggtgtgcctgagttttgtggaaatggtacagtgggacccagtaagggta

SEQ ID NO: 125603 - DNA, 1009 bp, Homo sapiens
gcagtgatgaaaagatgcctaaacatgtgtcccacagcagctacagtccatcagcattggacacattggtagatcacccctgctgttaacacaggtcttttcagcttactcgtttgtgtacttaactgttgagtgctcttttaattaggggcgactaacatcaaagtactatagttgtgccgggcctgctaatcaacaggtttcacttatactggggatcacttcagctttacaccaccattatcatgacattgatttttctgtgcacataaaaggaagcacttactgaatacaggaaaaaatcatgattgctaggtggaaaaaaaaacaaaaaaccagcaagaggaactcagttacccagggaaaatgtaaacgtttcatatgaacattgacagtgaaatggatttgatgagttttgaggtgattttgttagatactttgagagaaattgagaattctgtattccgaagagacagccggacttgaaactctagaggtatgattttgaccaagacctgaacttctctttgcctcagttttttcatctataaaatagggttagtaataataccaacctcactgagatattgtgaggattttgtgagatattgtgagattgaatgattagcttagtcactggatgtaagtactcaaattatagctattaataagtgtgatacggctgggcacggtggctcacgtctgtaatcccagcactgtgggaggccgaggtgggcgtatcacaaagtcaggagttcgagaccatcctggctaacacggtgaaaccccatctctactaaaaatacaaaaaattagtcgggcatggtggcacctgttgtcccagctactcaggaggctgaggcaggagaatggcgtgaacctgggaggcggagcttgcagtgagccgagatcgcgccaccgcactccagcctgggtgacagcgcgagattctgtctcaaaaaaaaaaaaataagtgtgatacttaatgtcataaatcattgttattatt

SEQ ID NO: 125604 - DNA, 1023 bp, Homo sapiens
tgtacccaggctatctggatccatcaaaacctttgctatctgtgtatcactacactgtagcttgtccagagttacaaagctgggcaggaatagtccaggacccaaatcccagtcttttgttggctgaactatatttgttatttaaagattcttttagcagtggaactcttctttaaatggagatattactagatagcacaaccaaataaaaaaagtggaaacttagctgctgtggtttaagtgggataggccaggcattgaccatgcattccctttattcagcccttgctgtggcttctgagaaagccacatggagcatagttttattttatttattttaatttttagtccctacaacaagactcacagtagggatatgattttaaaccctggctctagttagggatatgagctccagattgctctcttttgggtcacaattaaaatcctaaccggcaacagatatttttggtcagatctggtcattctctctgcctccgtacccattgggggcaaactatgaagcttttgtagctgcattattgtagatttgcaggatttctgttcgtaatcagaatcgggtatgtgttagaaaaaggccttcctgagtgtatgaacccctttgcctgctgacagtctctgggctggagttaacattaacatctgcatgcccagaggacagtgaattgctaacttttcactggctttctttttgcttggacattttacagtgctccagggtcatcattctgggcagtacttaccttgtaagtacctgattttggctcttttctcactcactagtctgtgatctagtcttctctctgtgtctgcagagttcagtcccatttctggagcaaagcagtagctcagtaaatgtcagtggagttttttgaatcactttttattattccagattataggcatatatgtatagatcaagtaggctgaatatgacttaatccccaagtttcttctataataggaccttattttatctctccaagtaatggaataaaggga

SEQ ID NO: 125605 - DNA, 1061 bp, Homo sapiens
gttcaaaaggccggtgcccctggaatgaggacctacaagcttacttttatactagaaaataaaagactagaagaatcaagcctttgctcagatcatactttgtgaggtgggcaagagtagaaagccgaacacttgaacgtgagagcgaggagggagccacagatgaaggttgaggacagagaaagggaagctggagggctctaaacttgcagaggcctgacctggcacttcatctgtcgcctctgaaaacagctctgctcttgctcttgctctattctcatccaagtactaggcgatcctccttttatcacttcccagtttcttcctttagtttcctctaaggtcattcctcctttgcactggatttactttggagtaacagttgttggtgggaggttctgattctgcagagagagaaactgaggcatgggatagagaacagccatctgtactttgtcctgtaagtcattagagactggcagagccttgtcatagatcccgtggtttgctgtaagccacaggtggccctcataccctcataggaatagggaccttcttccttccttaacatgattggattttgtttttacctgaaaatacgagctacttctaacagaaggaaagacgattgcagcctgtactgcattgcccctatctgtaaccccattaagaggttgtaaatagtactataatgatatctcagtcatttgttttgatgtatccaggcttttaataaatcagccgcagcttgcttaataggaatatgagagcagagcacgttgctgccagcagctgctagtaaattataaagcattcatctgttttacaagggaattaaatgtttgttctctttaaagggttttgactaaacaagggtgtgtgcgtgtgtgtttgtgtgtgtgtgcacacacacagtggcttcctgcccatgccctcccaggtacagtagcaacctcaggttcctggggaacacctgtaaccaaagccatatgaattagagtgcccccaggtaaaccctgtcattattggtctctgctctgcgtgcatctctaaagcaatat

SEQ ID NO: 125606 - DNA, 1035 bp, Homo sapiens
acatgtacagacttttgtccttctcattattccctaaacaatatagtataacaaccatttacataccatttaaattatattaggtattatgtaagtaatgtacagatgatttaaaacatatgggaggatgtgagtaggttatatgcaaattttacaaagggacttgagcattcgtggattttaggatcttgggggatgctggaaccaatcccccacagatacagcgggacaactgtattcatataaatatataggccagagattggctttaggggagtctgcaaagttccataattatatgcatttttcttaggcagtattgtgtctgtcagattctcatagtctccaaaagttttatgattcttcaaaagtttaagaactgcttacagaaaccatgcccccagtaattattctgaatctatgtgttaccacgtgtatgacttagaagaagtctagatgaaggttccacctaattacagaatccactgctgtagccacagctggattgagttatgtggcagccctgccccagagctggggaggctgcgtgtgtgcccctccacacctgagtacatcctgggtgtgctgaaatgaagcccagggagatacaaagcaccataatgccattaaggccagcacccgttgggtaggggagaggctgaccatacagacttctgacttctgcgtttcattccctgctctgaaacctgtccgtctctcaggcttgcaatctgccttcctgtctctctgacagacctgtgacttgggctatggttctgataccaggaaataatgcaggggtgggagtcttagtcccaagcaaaataaatcactgctcccattagacattacaatgtttaaacccaagtacatctgtctgccttcaaaaccaagatttagagcatgtcaagcaggtgccatgcctccaataacacatactttgttccaacatttagtagattactgtgagattttaaattcaaattctcagacattcactttgtttaggaaataactgcaataaagcaaattgtc

SEQ ID NO: 125607 - DNA, 1020 bp, Homo sapiens
tcatgtacacaactcttgtgactgttgataagatgattagtttatgatcagtctttgtctttgattcttaatgcttataatggatagtttttgtcatttttctccaagacagtctgaaaaaattaaatagttattttactttataaatggtaagcagtcagtacctgtttatagagggaatgaacaaagagtggtctggtttattcaggatttgtaccaaaaaatctatatagtaatttataaataaaggtagatctttgaaaaaaataaagataatctctagtctctgaaaatataaacctgttacataataaaaagttgttatagactcttcatttcttcttacctcttaagccaccacctctagacacactttgatcctctctctctcttcttccccccccccgagtggaaaatctcaatattaattggagctaagatgattgtactactgctgctaagacttcagcaggtctcttacaagctaatgtcacggcatggggtccatttgctctgtgtagctattctgcagtgcagtgagaattccttgattaatatgctacatgaaaataaaatggatttggaaaaaattatagcatactctcataaatattaattcacatttgtatggaattacacataattttcaatatactttggaagcaccttcagtatgaaagatttggtctccaaagagaatggcataatttttttaaaagcacagtggatacattattaagcatcatttgtttattaatctgatcctctacatgcatatgatgcagggcagtaggtgggttgtgtgacaaagaaaggagctttataccctgtggggagtttttatattacacttagaagtggtacaatttaatcacattatatagaagcagcccatgatggaactcacctggctccctctgctagtgttgccattattcctgagtgtctctttatggcagctattttggttaaatgtgagactaaacacagaacatttttgagctgagcagatgcctggca

SEQ ID NO: 125608 - DNA, 1088 bp, Homo sapiens
ctagatacctttgtaaccaccacttccctttccttctcttcttttctacagaaagatgtagcacttaagcctcaggaacgtgtggagaaacgccagacgcccctgaccaagaagaaacgagaagcacttaccaatggcttgtcctttcattcaaagaagagcagactcagccacccacaccactacagctcagatcgagaaaatgaccgcaatctctgccagcaccttgggaagagaaagaaaatgccgaaggcactcagacaggtgaggaagcttgggttcgctctttcctgtggcggcaaaatcccttccttaggtgcttcctccactgtggtttttcgtaacaggtggagaagatatccttggtgggatgctgaagtggttgtccaacaaagctgtgtgcgtgcctttaaaagaatctaaaacccaatctcagctctttctatgaggatttgaaacttcagcatggtgccctttcagtcagatgtgctttatgcaacaaagcttgatgctaagtggtactggtatttagggcagacctgtcttaacagttgtcaagatggactggcttgcaggggagagatctttgcaattaggataaatggaacaggtggatttcatcacatacattgtgcatctcatggttctaaggtgctaaaatgattgcctgtgtgtgagaaatgccttgctaagatttatattttccggggaagctcagatattgtggcatctgggagggcaatggcaaaaaatgaatttgccttttggtgtcttagttgttctccataggctataattcaagactatctttgtgatctgttgattgtatgaacgtctgataatgaggcttactggcctgttaataattaggtttcaatgatccacaagaaagtatggctcttggcatttgggaagcctttctgcctgtggaaatccccacatgagatggattaataatgagatatgaagctgtttatagcagtttttctgcacaaatccagaggcttcagtgcctgtcaagttagttacctgtgtcctgggtgtgttttatttatttttggcaggaccattgggtaggattgactatc

SEQ ID NO: 125609 - DNA, 1044 bp, Homo sapiens
agggaggggagtggtccattgtgtgtcagtccagacaactgccatctgttatgtgatcattggtaaaaggtgacacatgagtgtttaatgaccatagtagatgttcaaaaagcttgtctgaagaatactcgtgattgctttcctatcatcctagatgcctgtaaatatcacaattactttatcgcctgcgtttgcctcttatcaggtaaagaaactgaatctgaccatcttagctgggaggggaccttgagatgagagtgagctttgaggagcatttctacattaatggattgtcatttagtgcctgttattgagaactacagatgaaatagggaagaggcgagaacttagtctttatttctgacttggttagaatgaattaggtttgcatcttattaggaaatggtacttcctgagcagacaacttaatgcacagctttcctgtaattatgggaagatgttactccttagtagagaggaaagaataggatttttttttctgagactccgttgaaggcaactgatctttttactcggagggtgcaattataatacttttataggaaagatgtatagttctaaaaccaaactgcttattctttcacttgcctggttgtaaaacccaagttcttgtgatgtttttccatactaccaaaagaaagcttttaaactgacacttatttgttggattatgtttttaagtataaatacatactgccttagaagatgctgaggtggcacctgtcttggcaaatggttgcactttttgatatgagaaatttgaatacttttcttacttcccaaaggggttaaaattatgaagaaatcaataaattacctcttatacaactcttatacaaaatagcgcatgtctttctgacctctgtaaatgaactatttgttcatgatgtaagcacttagacatgatataaaaaaagttttatcatttacttacaaggacatggtactttttttttctcaatggagatttgggggtgggaaaagcaaaagaggttgcacatggcctctccttaaggagcttta

SEQ ID NO: 125610 - DNA, 1040 bp, Homo sapiens
gaactctgcatggttgcatctgcttcatgtattgacattgtaccttggtcttccttggagtaagtgatagtggtgctatagacttaagagcccaggtgactgagccaccctctcttcccacctgtcctgatggaacagtctatcccagcccatgctctttcctgttgagagtgtttgctaccagaggctggtcccttatttcagcacgacttagacttactgcttttgtctgaagagctttctctaaatttgttactagtagaaattaacttgcaaaggaggatttataatggaaaactttgattaaacggatccagttcaagtctcgtttctgaagatctgctaattagttttggatggaaatctaggccaaaaatcacacaggtatttatccagcttgactctagagcctacaggtttctggaaatcagagcatttgagacacgaatgtaatttgggattttactgtcataatgaaaagacatgaactttgctatgtgctctttcatacatacttttgttataatatttagatgtctgctggtaccttgaactagtattaagaatgtcagttaaaccgtttctacctcatacttcaaaatttcaagtttaccatgttaattgggatttcatttgctttcgaaaaattttgtagtcatgtgaaggttacaagctaaggtatcaaataaaattctttatatttttttcctttttatgaatttaagttgcatactactttttccccttgcctaaagtatagaaataagaaaaactgtaaggaaagatggagggaataaaagattggcttatgatctctctttggaatattgattgacttgaataagagtgagatgctagttttaacatcaggtaattgaagaaccccaatctaggcttgtctgtgttcaggaattactcacgtattgtattggaagtattggtttgtaactgggattggtaaacctgacactaatataataatgagttatatgaaaggtgttttgcttttgttttatcttgagcatttggaaacaggttta

SEQ ID NO: 125611 - DNA, 1150 bp, Homo sapiens
agatccattctgacccacctattgtgaagagttcatggagagctcttaacaacaagtgaggctgaggctggcagattaaatgcagttcaaagggagacaaggttgaacatctcctagagagggaataccttcagagatacatattaaagttctttaaaattgtttctttcttattgtgccatttttgttgacctcccttctgtccttttaagaaacttttgagaaaaatgcattattctaccgaaagcatcggcaaatgttggaaatagtattttgtgtatcagttttcttggctgcttatttttaaaaataaaggcttaaataaggttcgcacatttttcactcaggtgcaatttactgggaattacctggcgcattggttttatgcttaatatttacagattattaaaatctcagtggctttcaaactgcatggaccaagaaaataggtgtattttctagaaatggttttgcttatggacactgacccactttgaaacgacttactcttggaactcttagtacaggaaagtcttatgtttctgtctagaggtggaactgtttatgataaatagaaatagctttccttttctatcatttctgttttcttggaagtagattatttttgatgcaagtagaccttcagaatttgaatagaaatttttatttatttatttatttattgagacggagtctcactctatcaccaaggctggtgtgcagtggtgtgatcttggctcactgtaccctctgccccccgggcttaagtgatccttccacctcagcctcctgagtagctgggactacaggcgcacaccaccacacctagctaattttttgaagagatggggttttgccgtggtgcccaggctggtctcgagctcttgagctcaagcaattctcttgccttggcctcccaaagtgctgggattacaggcgtgagccaccgtgcctggccttttgaataaaaatttagacttcagatttatatagtgagtatactgatgggagattgaacaattacgtgatctcaggagtagattatagagctgtttctaatttactatcaagttatttttttcccaaaagataatttataaactgcttttttgtttgtggaaatcctgtttgttaggaagtgttacaaatg

SEQ ID NO: 125612 - DNA, 1173 bp, Homo sapiens
taagcagctggtactacaggtatgcaccaccatgcccggctgtttttgtattttcgggggaggcagggtttttccatgtttcccaggcttgtctcaaactcctgagctcagagaatctacctgccatggcctcccaaagtgcttggattacaggtgtaagccactgtacctggcctgcttttcagtttttcagtaagtaaattgtgaggcatatatgttgattcttctggctttggaaaatccttccctataccctatttatgtagactgaatgaaattgataagatacagtattttcttcctagactgttcaacactggcgtgaaatggttcttgtgtaggactccttgccctcttccaggtagctctctttattcagtacatgttttacatgcattctctgtgtttcaaacctgagagatgtcagaggaatataagagatggtccctattttccagggcttcacctctgggttaattactttgggacagtttaaagtaaataaactgtaaaaaaatactcttggaaaagttggtgaatgatacgtgcttaatttttcactaatctccctcgtggtttttataatgccatgtgtttttcttgggagggtttccttacagctgtatttgtgatcttgggctagaatttatgagctgccaccatgaaggtctgcctctggctttggcatcagagatggcgagttgtgtggtttgttttcttattgttaatgtgagaatttttcctaatcaaaataaatgcctatgtgtttttcctgactttcttgttggattgactaaggaagttgtgtgaattataaaaatttcttcctgaaatgaaggacaaaatttccaaagcaggatgcattgagattgtctgaagaaatgtatgtcttctggttttagtatttagacttgaagtttttttttttttttttttttttttaaccgtaataactaggaaaagtagaaaagttaaaagaaacaaaaaacatcacggtgggaaatagaaggagaaaaccagacatttatgaaaaccattctggatctcacagatgctattaagattagtaaacgttggccgagcatggtggctcacgcctgtaattccagcactttgagaggcagaggcaggcagatcacctgaggtcagaagtttgagaccagcctggccaac

SEQ ID NO: 125613 - DNA, 1051 bp, Homo sapiens
ctttgttgtcttttgttgctgaaaaatccagctctcggccttctttctttgagtagagcatcccagctggtatacaagtatagattggatttcagatttagcaatgcattgtgttttgacaaagcttattgaagatggaagtcatttttcaggagcgctctaagaggtgagaaaatggcaagggagggtggggaggaaagggagaaaatgcagaagaggcagacacaattgcaacattgatttggtaaatagaaagttaatgtagctacaggtattgacagtaaactttggctaagatattggagaattgcagattggaaggctagagctatttcagaatttccagggccattttattggattatacaccttagaaccttaacacacagcttctgttgattagtacagtttggcctccagtgtgagtttggctttgaacactcagtgtgactttggctagggcttggcacctgtggacttcagcttctactttagtaaaatgaatgagttagaacaaataattgttacattcaaatccagatttatgagtgtacgatagtggcttcacattatttgttttaagttaccgttgagaatttggttctcagtaatctagagctactattttagcagaattatacatgggatgcagaatagaagcttttaagcaacagtcaaccagattggtctataataactccaggataaatacaagaagaatttctggacacattttgccccagtgaagtaaaattatttacattcaaggatggatttggaaatgcaggtatttttctgttgatctgcacgttggttacactggtgtgttcagtgtgtaattacacttccatgcagttatttttgtttttgtgttagatttcaataaactattattttttctaacagatcttaaactttaatgcttctttagagtactaatcaaagtactgttacataagtaatggctcatgtgtgcgcacaggtgtctgctctgtgaagtagtccatttcaaattataccacattaaattgtgtctgctttaaagggttaa

SEQ ID NO: 125614 - DNA, 1042 bp, Homo sapiens
catcttggcgagaaaagccactgatcgtctcagtgtaaggatttggaatttcaaaatcctaaatgattactaaatgacaagtaaaatcttgattgagatagatcgttgctaacgtccaaagagattatctaaaagcattgatttttattttgttggctgtggaaataccgtggaattcatttattaaaagtagtatgtctaagtttctacttattttagatactgtaatataaaattataaacaaggcccaattgttgttacccactaggcagatttttttattatccaagtttctgtttcgggccatgaaacaagttaaaatcaaaactttcgctggttgccattttaaagataaatttgttatataggctttctaagcttggttgccttgctccacaaagacaaaacattaataatagcttacatgtattgagcagtgaatctgtgctaggctttgtgttaaccactgtatatttggattatctcattgatctaaggtaggtacggttgttattcccttcttataggttaggaaactgaggctcagagagattaagtaacttgcccaatgttacacagcttgtaagtggcatttctgtttaaagcttcccattttataaagttttgtgtttttaaatatgctttagaattttaagtttttactctgttattatttcgcgaagtcctatgtctacatacacatcaaagcaattctgtggttcttagggaattatttaataaatgaaatagccatagactgtaattacattatgagtggcatcttttagctgtgcccagcggtagcccagttgctaatctttatcccttgagtagtcaagtagataagaagtggataagcaagtggagtggtggccactcaagcaggcctccaccagaataattccaaataacttcacacagtgaattgcaacccactcaatccacttcactggatagcattgctcaaaagatattcttttactcttttatctaccttgttggcaagcatccccaagaggtcttatgcctgtggcctacaga

SEQ ID NO: 125615 - DNA, 1196 bp, Homo sapiens
tttgtaatttttagtagagattgggtttcaccatgttggccaggctggtctcgagctcctgaccttaagtaatccgcctgccttggcctcccaaaatgctagaattacagacatgagccaccacgcccagcctatttcttgatttttattagtcacctagccttattgtaatttgcacttatctaccattagaacatcataaacccaagtgatgaacagaatggatgtaacttagtgcgtgtatgtaatgcatatgatgtaacatacataaagacaaatggaaaatgcctgcaagatagtttccctgttgtctcatgcctcagcagtaatgaaacatatactgagtgcttattgtgggtcagttactgtgttaaatgtttgtcacgaatcatcccatccagttctcacaatcaacctgtcatgtaggtgctatttttgtccacatttttatagataaggtggctgagacttagaaaaagctaacaccacttgcctgtggtcatagagctagcaattagcaaagccattgcttctaaccagtgtgcattttgccttgcacaataaactacattaaaagatttactttagtttttctacctcccaattgaagccactatcagatatatagtctaaacttagatttgattctgtttagaaacacttaatgttcctaatgttatcaggaaatttgctgttcattttttcaagatctgagtagaatgtcacattctccatgaactttccatgatgctcttcttccaaatgtttctgtagcacctggttgtagcctggctcttaggattcccctgtctgtgctctggacttctttagaagcaccttgtctggttcagttactgcctttgtttgtattgctggcacattcctttgtgcttggtgcatagtagataattaatagatatttgttaaattgaactggatgcttaataaatgtttggatctaattatgatcttaactctggtgtgtacttcaggtacttcaggaaggtcattgcagcattagatgactatggagaccctcagtgttttagactgagatgacttgccattcctacaagagatcaattgaatgaataattggggctgatttttccctaagtattgcttagaacatatactgttttttttctcctcaaaaattgccagttatattgccatactggacaaaataaaactgt

SEQ ID NO: 125616 - DNA, 2592 bp, Homo sapiens
aaccaagcttcctaggtctttgacctcctctccagtatccctcaccttcacctgctaagtatccattctcattttggatctcggactttgttatcacctaggattcgcccaggatttcactttctcggatcatgaccttccacatcatactgtcactgcatctcaggagtctgtttcttggaaaagctttacgtctcttatcctttttcttttccaacagaaatacctttctgaactatttctctctcttaaacctcttttaaaatctgcacacttcatactaaattgtattgattatgcttctagttccctagtacataataacctttggaaaaattgttttgtcttactaattgtttctatagaactctgtactgcacctggtgtatagaaggcactccataaataatggtttaactgagctagagaatatatggccagggtctgagtccgagtctgtcttgcttcacagtatggctgctatagtcaggtctgccacagctctaggcctatttttttttaatctgtctggatgaagaaggaattgtttagtaggtgatgtcatttgtgggatgctttgtctatttctgcgtatccagcatgcttttagtgatttttcattttgtcagactgcattttctcttttcaactagagttcaaacaaaataattttagataacatcctaagaacatttggaaacatgacatttcaggtctattttccctctttgccttaaaaaagtatatacagctataattactaattgctgcgctctaagtagagacagatgatacatatgtttgtgacaattttccagagggagagctaagtaaccaggctcatttttccataatgtgaatgttattcacaaactattaccataattgatgcaccaaaccactgtagagtaaataatgtgttgtgtgtgggaagcaagctagtagtcaatgaatattaaagaacaaaacctcattttaaaagagaaactgtaattaaaatcattctgaattcatgctgcacaaccagttaaaataacttggctgccatttatctgtgtaattctgtgtataaagggagtaggtatatgatttgttatatagaagtaagtatttacatgcacatttttatgaaaagacacaatatcgaacttcagaatcagtcgttttccaaaaacatttgttggagagatgaacatgcagagttaatcagtgaaatatatattgacaggaaagatcaccatttccgttatcttatcttttgcttttctaggtgttttatgtctacctggaatgtcgtgtccctttccgtggacctaatcagcttctgtattttctccaaagcttccttttcatcagaagttgttcttgtccacttttaatccctcttactgctttctaggtgctcatcaacttctgtgtgtggtatattgatttgcacttttgggatttgttgttttataagaggaggtcataagtcatttcttgtgtgtatcattagtcttctcaacgagactgcctaggatttcagtctcagattattctatgtgtgtgttgggcgtgtatgtatgtgtatcattccttccggtgtaccttgtggagaatggtttgctgtccatgtgttcgctaactcctcagtatgtattgttggttacctgttttcatgcaccagatactgcattatttttgtaaaatctttacattttgtgtttggctaccagtgtctccacagagtcttgaatgtaactggtaaggatcagatctgttggtgtagagtttttgatggaacactcaatcagcaatctgtagtatggcttatgtaaaatgtataactccctctatctctgataagttctgaagtctaaggggaaagtgcttccctgtctcttgaatttgagtgttttgggtgagtccattttatagatagacaaggtgattgtatcagagcttacttttatattttaaaatggatcatagtgtacctattcttaggaaccttttaggaaaatctctttaacattgatcctgttgttagttgtaatctcagtatattctgataatttcctttgaatatgtaactgttcctttcatactgtgggcatctgttgtcttctctttttatagcaatgaaagtatgaacagattccaatgtgggttcttagctcaaaattctctggctctaatgtcaggccaatttatttagctagtttatacaactggacatatttctataatagaaaaatgactaaatgtttcttaacatattgtttacagagatagagcccatgttgtaaggctatgtaactcttcctctcaaaagaagattattggttttagcatgttttcctccctttaatttaatcttaagcaggtgaacctttttgagggctttttggaaagctctgaggaaaaaaaataagaaaactcatacaacctcaaggaattctaagtatcaaggagcacctctgtgaaggtgattggttcaagcattgaacactattttctatccttccacacatggcagggcattattcatgtatccagctctgtgatagcttgtttttgcttgccctgatgatacgtatggcaagggag

SEQ ID NO: 125617 - DNA, 2020 bp, Homo sapiens
attcttagcagaagaaaagcacgtacaaagggtggaagacgtacggtttttgacagatgaatgaatccttctaaaggttttgtaagagctgtgaccagctctgtttgctgagaaaagggaaagtccttgagcacccatcatacctcttcagactctcttaaaaagcattcagatgttctgccagaggaaatgatgtgttccaactacagctgcagtggagggttctttttgtgcagctgaagcaattcctccacatagattgtcccattttaacagtaaactgtctgtttaaaacaaaacaaaaaaggtgggtgggaaatggaaggagaaggagtttatgccaggaaatgaaaataagttgctgcagaagcctgttttggttgtggtttcagagttaaggataagttattaataataataataagagcccacttgatagtttgttatatctctgtgtgtgtttttatgaacttttaattttccagaaaacattaaagataaattagagaacacactcctgttggaggaggtgaccatcttgcagctaccaaaccatagaatctttcaccacttaacaccttccaaggaaccgggtagacttctggtgtcctctctggtcctcttcccttccttataggatgtcaggctttggacttaatcagaggataattaaggctctatcatagcaggtgaagtttctgagtggaagtctaagaagtgatgtttctataagtgtctttagctgactgagctactaagcagaggttaggaggttgtgatgtaatttaaagtgacattgtggttaccttttatcaagctcaattgtgagcctggagctatgttaactgcttcacagctatgagcctatttaattcttacaggaatcctcattttaagataggtttgattaccctccgtttacagatggggaacttgaggtagagagataagtggttagtttgcaattacacccagcatttggcatggctgggattggaaccaggggccttcagtcttcaaagctcttacatgtaaccactgagtgatgcattgtactctctcctgtaaagtagccttttctccctgctgccactggttcatttccttttccttttttaagatgctttaaaaagaacaaaaaccaataacgtacctcctaaattgaggttgatctccctccttcctatccaataagtaatgttctagactcatgcaaatattagatatttgggagaaaaaatgaatagaacatgtccctcctctctttagctctaagaaaatttgtgtgttcttattaattcctactgttccactatcctaccatattacctgatacatataatacagttacagtcttctcagggagactcttctatgcagtggcatgctggagccaggaaagcttgtaaacccagctcagacatggaccagctgtgagaccttggtgaagtcactttaccctccgggctttacttcttttatcactgtagtgtttgatccaggtcagttcgcagcctggaaggcacagccttttccaggacactaaatagggcacatgtgctacccatttgcgtgcacactatccttaggcatttgttgaagagatggttaataaaatataaactcattaaaaagcattactaaattcttacattttgtgtttctttgatcagtgaatgactgctaaaatttagtacgttatcaatggggaatttgttatctctttttgcataaaaggggtcctcggttttcgtgaagtttaaagtccctccccaggtagaatatccataaagcctatgaatgagtcttaactacttgattacccagattctagctttttggaatctttcattaccttacttttttcccttctcggtgagcttttggacttaggacaaacggggaacgatcacaaggaaatggattgacatctctactctttcacaatctttcctgaagacatgatttttttttgctatcatgtctctaagtacagttggtcagttgtcactctgtcacc

SEQ ID NO: 125618 - DNA, 2025 bp, Homo sapiens
cccctttctctctgtttctttcatctcgtaaactgagtgctgatgccatttcacactttttcttggaagtttaatgagttagtagtagtataacaaaaataaaaatattttctttacgtttctgaaaagaaatatgtctataaagcgtcaatcatttttccaagctgttagttcctgctgctgagtactaggagctgttctgtcagcaagaccacgtaagggggaatagtaagagaaagctgtcccaattttctttctctggtacaaaaggttagaagatgttgtttcagctggagaacttaagatggattcttattcactatttgctaaagagactggactgtttttagtgtgataattttctgtaggcgtggagaaaggtcacctcctgatcttgttttggagatcatggggttaaatctgtggcagtgtccttttcctagacacagcctcttgtcaaaataatgtttggccaggtgttaatctgtgtcctgaggggagtgctggaattcattattcatcccgtgggagtaggggtcagaggagaaggttgtccttctgggaggtaccaggggacatagcctgcctcctgcctttactgacatgtgccatttgtgaggagggcagttgaagtccatttgaggaattctcttgtcagccggccaacacagaaacacagagggagtgggagggagggagaggcaggcagcttggcaaggcagtcctggagtgcagtttccggagcaagatcacacacagtgttttaggagctcagggaaggtgtgcaggaacataaaggggaagggggccaggtttgaaagagtggatttttcctattttttccaccttttattcctcctgtctttgaatacttgtcatcctttggaaaactcagcatcggaaagaagcctttgctgacacactgctttttctccagcgctatattgtgggttttttgtttttgctcttttcatttttcttttcctctgagggcaggaggtgagacaatgatcaagtcaagctggttctatgttaagttcaagtatgcagagaaggtaagtcaatatggtttcttttcccaggggaaacctgccacctccctccagtcttgtcatgttgatgggctcctctggccacttggggaagtgaatgaagctgagaagttgtatttgtgaatgtatttcctttggcttaatgatccttggatgaagcacaagctctttgcttgcaatctgacgttgccgctgaccaagtggaagcaatcttcagactctgttccggaggcatgatttagagtttaaagaggggaaataatgaaactacaataacaggaaaggcaggatattctgctttagattgaatagagaattttcaaggtattatttgttacaaaggtagatatatttttggttctgaaacaaattgacagtcacttcctattacctgttggcttagaatttttttcctctttcagttaactaactgcttactcatttgtagtcttacttggttgtagaaagaatccccataaggttgtctgaccatatatgagatgatctctttactgtctgtcaggggattatattttatgaatgaattttggttgtacctaaaattttgatgttaaacagttccactgtattttaacataccatttctggacttttaggggaaaagtgtactttctaatacatcttcacttaccggggctgtttgacatctttttggttccacatccatatgtgtcacttactctgttgggaatttacaggattagaaatgaggtttccaggagaggatatagctcagaggtagagcattggactgcagatcaagaaatgagatttccaggaggatcctaacgtgtgcctcccttttgaaatcttccctccttgatttgattgttgaaaacgttggcatattgattgtagagttaagctgaggctctatagaatggaactgtgatgtggcaagatggaaaattgtgcgactgtctttatactccttatgattatatgcataagc

SEQ ID NO: 125619 - DNA, 1029 bp, Homo sapiens
atcagaattgccgctgctggccttctggaccattagagttctttctggttgttatccacttttcattccttctcaacccatagaattccaggtggtgagtcagtttttctgtatgatcatgcttgacaccccaaaatctacctgaaagtttgacagatgcatggaagccaggagcattttaggaagctgtactgctcttctgagattttctgcctacttactgtctgagcattcaacctgtctctctcaaattttctctttctctaaggtgggtccagtaatgcgagtcggcagcccactttgctgttcttggaagcgaagtactttccaatagaagtcagttttaatcttctttcaccgtgaggaatgaatgaccattttaataaataattcattcctacagttcactccgtaaggagcttctaagctccctccatgatggtttctgatcctgccagggtactgctattttatctgtcaaatgtgggttgttagaggtactgtgtcataagaggcagtgcagttcggaaccctggaacccccttcataaatttgcaaaacacagtgcatggggcctgctatggcaaggtatgctacatggagcctcagctgtctgctccctctcttctgtcagcacagctagcagtcagagacaaatggctaaccctctttgagtctcttggagtaaagcctggttgtgttctgcgtggattgcatcctgtgcagattgtggatagcaagggcttccttgcaggcctgttgggagcattgattgagatcatgggtgtagaaagcctggactatagccagagtcaataattattagttctttatcttgagacaaagggaagtgttaaaatatttttatatcaaggaatctcctacaaacactgtcctccccactgcccactgccagtatttacatgaattaattttctccttatcttcttactctcgcccacccgcttccctttccttccgttccaaagttatactacacttattcaggatagaaatttcctttataaa

SEQ ID NO: 125620 - DNA, 1073 bp, Homo sapiens
gttttttgaaaattggttttatatgtttagcatatggggcaattctaaattagtatatttgattaacgttgtatgctagtcctttgaaattctgcagttggattgtgtatatattgtgtataatgttacctcttttccgacttcatgaacctaacatttaaagtggaaacaaatgcacgcatgtgttagtgtttagtgcagcaagaaagcacggcccaccacttccaagaagtgagtcgttgcatagggtgccccgtcctcagaacattgctcattgttcattttttattcctcagctccttagttctactcaaagtctaatattagtttaactaccaaatggcagaaaccagagtacgttgtacatttttcttgaaggatacaactggaaaaaattttgcagaggctcatgtgatgctattttccttccgtggtgacacttagaattcgtttcacattgcctttgagagaaacgaggaggggggagaagcctgtatttgatagttttgtatgttcctctaaagaaagagagtgcttgaaaaaagaaaggcaggctttcagatgttgtctgaacaaagctacggaaatgtgagacgagagcagcatctggagattttcaaacactggaacatgggctgcacgtttcttttgctgttggaggagtgaaaagctgtttcctgtcatttcccatcttgtcacttccagaaccaacatcttgctacttcttgcaccagctgctgctgctgttgttttttttaccccctccacagacagatggtaaaagagctttgataatcctcgcccaacttccccagttctaaagaagtttgcggtgtggtacctttatacaatgatcacatgccctgatacctactgtagcctgttaatagagttgggaacagagcagaaggatgtgctgcagacttttaatgtctatggcattctttgtcatgtctcatgggaaatgctgtgcacaagccccatctctgtggatgcttcgatttagcttctgaggttatatttagaaaagaggaagttgtggggagtacctttgcttccataagaatttgaga

SEQ ID NO: 125621 - DNA, 1033 bp, Homo sapiens
ctcacatcagttctataaagtaaggattatttatttttattttagacatgagaaaagtgaggctgagaaacatcaagtaattttcccaaggtcacacagtgcgcaataggtgaagctgggatttgaacccagatagtctgtcttcaaagctcatgctgtttgtcatttgctcatctatgtttaaaaggtctgaatattttttaaattattgatacatatagcctaagattttctatttattcagacttttcagtcatgagagtacttactgcgctctcaccatcttcacatatcatcaaatatgttttacctttataggtgtttggggtgaatgattgctcagtttttacattggcctttcttgattactagattgattgggcattttccatgtgttattgatcatttttatttaatctataaattgtttatgttctgtgtggctgcttttgttcaacagttaatttttttgtatacaaaatcatcatgtgttaagtatattaactctatgttgtgtttgtttaaaacatgtctccttctgttaacttgcttccttatatttgaagaaaattgtatgaatgttttaaatatgtacatattcatattttttctttataattctctcccacaaatcagttatttagcctatgttttcctttattttatggtttttactatttataacaatttttaaaatcaaatctgaaatttattttaatatatagcatgctatgagactttgaatttattttattgatgggtaatactttttgtttttgttttgctacttcctttaaaaaatattatgcattatatattccactcttctgtggtggcattctttattatatatttgtttattttgtctaccagcgtctcttcaagcaatctttctgtgtcagtggcctgtgtatgggtatgcctacagacattttatggatagtaaatttgtaaaatgtgcaagaagttttttgtcttaaaagcacccagactcagcatcagaaggcccatatccaaacctcagtataacctc

SEQ ID NO: 125622 - DNA, 1028 bp, Homo sapiens
aaacagataagtactattcaaatacaaggctttatctttcttactgcctggggtaagatacctgtcttccctgtcccaagttatatgatgcttatttaaaaagttacctgtgagccttgcttattaaagtatgcctcagctatgtcatgaggatatttttttttaattaattttttttgagacagggtctcattctgttgcccaaactggagtgcagtagtgtggtcacagctcactgcagccctgacctcctgggctcaagtgatcctcccacctcagcctcccaagtggctagtactacagtcgtgtgccaccacatccagataactttctatttttggtagagactggggtctcactcttttgtccaagttgatctcaaactcctggtcttaagcaatcctcctgcttcggcctcccaaagtgctgggattgtcagcataaggcactacgcctggctgaggacatttttaaaggtgtatacttcaccatattctcttttcctctacatgaagtttagcaatgttcaagatggtggccactccatcccccttgatgactgagtgactgtgatgagccgagcacctgctgactcacaacagccatagagacataagagtgtgaacaagaaataagcctttgttatttttagccatggagattttgcagttgatactacagcattatgtagcctatcctgaatgaggtaggatcataataatatgtttgttatgcatcacacaagtttttgggttgtttcaatctaaagatctgaaattatacccaaactagatattctccagtatcaccaaacaggatctatccattctacagtgctcaccagattgcttctgtcatacttcacctggacatctgtggattctggatattagaaattggaaggaaaagcttgtaaggggatctcagtgcccagggtcaaagcttcattgttgggcagccaaggaagagatttgcttgacttacttgagtaatttttgacacatacttgatttggtcatcaggcataa

SEQ ID NO: 125623 - DNA, 1122 bp, Homo sapiens
caaagtcaggaattttttagtttcttttgtcttcacttcttgttattctctcacttgctttacttcttccagccttttccttttccacctcatctcctgcttcttatttcctcatctctttttccttaccattttttcctcttccatttctcccttgatcttttcattatattcaattcatttcattcattgaatggtgttagaagaggctttgtctttgcagtcagaaggctcaggtgaagcttcatatttcaaagcacactatgctgacactaagaaaacatcttgcccgggcacttcagttgaagaaaactatatgatgtgatcagtatgtgatgatggcttttcagatcagatagctgggttgtatttataatttatttctcttatcagtgaaaaagataaatgataatgtagtaacaggattttctagagtttgggttgtagagaaataagtgctcatgaataggaccgcatatgtgtgcatgtatgtgtgttttgggggtatggagaaagaggaggaaaagaatattttatagagaaaatttccatatggttaccttttataggatctagcacatttcaatgaaaacacactttgctggaagaattcaattctctgtaaagtttggtgcagcaaggggtgaaaatgtggggacacagctggaaacttatttgtgctgcaggcttgcagctgtacctacctgtgatgcgatgaatactatttgattgttaatgtctttctgttactgaaagcttgcttcctttcctaaagctgatggtaacaatttactgactgtctaaaccttgaggactaacttgggctgggaaaaataaatcctgtctcctgaaatttacatcttattaaaactcaaagcagccagcagagatgagaaggatctccagcctgggagctggaggtgggaattctgctcaagtcaagatcgcttttagctttcctacattctcctgtgaagaaccattggattgaatgatggtggcaaaactggtgtgacttcattcagtttatctctatcccatttcccctctccacatttgactgtcagtctactaatgagacccagttatggtccttggaaggggaaatggaaggtggacata

SEQ ID NO: 125624 - DNA, 1074 bp, Homo sapiens
agagcaggacagactgctttgaatgggggaaggggggatccctggcagtttaaatgacttttctcaaagcaggctgccaaaaggtagcggcgccggccagaggtggtttgagaggcaaagcagcaccacagacaggggtccaaggcaagaaaacgctgagctgctctcaggtgctggaaagccagtgtggcttgaagcgtgctaagagtgagactggaaatgcatgccaagtttgaggccgagttcaggattttgtattccatgataagtgtaatgggaaatctatgagaacttttaagtaacaacaatatgggaatcatacttgacttggctagaacaattaaaagctgatctcttttagaaagtacagttttgttttacattaatcttaacacagaatagtgtattacacctaaagtgaatactcttttaggctgggtaggggctgtcccgtggtttaatattgtttctatcataggagaagccttggtttcctagtttcccaccttgtttctcctctctctgccccactgggattctagctgcttcttcactgcatttgctcacctcttcttctccacagtcctttggtccttgaaatgctgtaagagcagaaataacagctatccagagaccttcagatagcagatgtgccttgggcctgtgggtctgtggctctggagggctaggaattacagaagagttaaaagagaaggcctctgccagcaggaattccgaagacaccaaaactgatgtcactggctgtgcaggcactgagctaattcttttgccaatcagttaaatcacctaccaagagtgttcattgtaagtaacactttcttgccatttggtggggatgtagagggacaaaggatgcaaaaggcaacaggttctttccttgtaaaactgtaatctaattctgtaaacaagccatgtacctttggaaggtcattttgaactcagtcctggtaaatatttgacaggtgttttaaaaaaataattatatttatacaatctataatggaatattatgcagcttttcacaaggaggaactcctgccatctgccacaacg

SEQ ID NO: 125625 - DNA, 1014 bp, Homo sapiens
atacaggcgcccagctcttgccatcttagagtctttgcaatttttacttttatagcctaaagtggcgctttgcatgcctagatgtatcttcagcctttatactttaatcattctgaggggggttttctgtgtccctccttcatcaccttcaccctgtttactccctccatatcattcattcctcaatacttatttccatgtttccctgtctccaccactgggatgtaaggatttcttatcacttgttctgtgcagttaatctcagtgctcgggctcacagctgggagctgataagtgctcaatgaattcaagtgtttagaagaatgttagtgcagagtagagattgggcaggcagtgttagtaggttagtaattattactagaaccaggtagagtttctacaacctgcattgaggccctgagcatgaagaatggagtgttaaaatgagcctttcaaaggcaggattggcaactgtgtgaggtgacaccactagagacatggtttggacagcgcttccgaagatggaataccagataaagatcagtgtggatggtggagtccttaactgattcagtttaagatatttgattttgatgcatttgggaatagggtgctcttgctgagaataggggttagggctcaatttacaaacctttctgttcctacattctaggttcctatgattataatgattcttgctgataatattttctcccagcattatttcttatatataatacgtgactataaaggctcgttcctgtttcaaatgcctttgcacatgcatgatttggatttttttccagccaggtctcaggggccatgtttttaaagtctgctgctctttgggctgatattgtggcttcttgaatcgcatacaaagcaggtttcttgaaatctgctcatctaccatagtttaccagttatctgtatccttgcggctctgcttgaactgaagcttaatcttgttctttgtagggcccagctatttttgcttgtcattctatcacatgc

SEQ ID NO: 125626 - DNA, 1028 bp, Homo sapiens
atttggccatgggaagcaggctggtgactgctttgaaatgaaaaccagatcaaacgaaaattgtaggatggtgtccttatgatgcctgcacctcccctcctccccaaatctctaggatgcttttacagagtctttgctgctacgttgtataaagattttaataaaaatttcttgtccctggagaaacaggcatgtctttgttgtcagagagctagagggaaatgagcaatgcagcccagctggagtaccagcattaatcccatgattcgtagcccgtattttcagacagatcaattacttatggctgtaaccaatctctcatcgttttcttgctgtgcagggctccatttccagactcggcagctgacataaccttccaacttgataggacttcagctgcaaatctcttcaggtctgctgcctccattcatcgtggttatacaaatgagttgttaaataaaaatcaaaagtaaaaaattatgggtggtaatctctgcctggctcagtaatacccatgggcctaggcaacattttcagttggatttttaaaaaacaagatggatgattcacttgtctgacttccttcacttttatggacaggctttgcatgagagaaaagccatctctagagggaagaaattatccacagtggatacatttcttatcaatttataagttgaaagattaacttagaagtggagagaaaggagattatgaggagacacgaaggacatgtacaggtgagctgtgtctaatgcatttcacactgagtgagtcaccccttttcagctgctaggctgcctgggcttaaggccaggagattctgtatcaaaaagaaatgacccttgctaacacagaggtgtcatggaacatgtaagctgtttatagagtatgtcactgtgtgaatgtagaacttgtgtgaaggatctaaacccaataacctttgaagaatttacccagaatttatttagtgttttcaagttataactactccttgtgtgtattgaacccttcacagctatgtcagg

SEQ ID NO: 125627 - DNA, 1005 bp, Homo sapiens
ataacatgaaggtgggtagccaggaatgttgaacacaattagcgatttggaagaatttaaaaatattcaatttaaattagccctagggtcagaacacacattctcacctaggggtggagtacacatgtgtcctgtctgtactcagggagctgtaacagtagccatggcctctctgtgtggatttataatgaatggagcacatctattttagatggataatcaattttgaaatcccttattgtaagtatgctgttaaaacagaaatgttaacttcatgagtttaatgagtagcttcgatgatagcttagtgaagagatggaaggaaaggcaagtggggggaaatgagaaaaggagaacaagtgtttaatgaatatctacttgcagacttgaatgtcagcagcaacattctccctcctggaaaatgtctttcaactgtgcatcccattatgttcctgcagcccgtggtagcatgaagattgagacaaagagagtgtttctaagaaagctctcctttacaatataatgagatggaggtgggtagtttgcagagattgctggagcagtggtcaaatatgaaaaaaaaaaatccagcagaatgaaaagaccatgttaaccaggagatggcttataatgagcccagaaattgcatatcagatagccagctggctagcatttcctcatatccctgtgttctcatgcaaactgctaaaatgttctcctactctattttctcagcctcttaatagttctcatttctacctactgcattgaaaatatgaatgaaatggcaactctaccacttgaagaaataagaatgaagcccttttcagcaaaagtatttgcctaaacatggatggatattatttcaaatgcttttgaaaccaaggaaacttctgtttctttccttaaaaaaacatcttaactttcaagtctcagtttgactcacagccttttcagtattctgtggcctcttttgctatatagtttggacagactttgcttgaa

SEQ ID NO: 125628 - DNA, 1162 bp, Homo sapiens
ccttggttttgtgttccaaagatgtctgcttaggtctgtcacttttccaatccgtttagaagcagaagatttgagaaatgagaacagcagctcaaatcagtatttacataagcatattgcaaagaattcttaaagtagacaaaatagagaaggattggaacaaactttctacatttttgggagcttttgaataatgtgggtgttatacacacagagagacacacatatatattcattacatactcatgcccagctcatattctaaatataaatgaaagtatagactagttggaatcgatttgctttttttttttcttttttggcaagaggactaaaacttgttagagtgtgtgtaggattttcttttttttttttgttttgaacgtcaatgcaatgaacacattttcttttcaatttaaacgttttaggctgtattttctccttaaacatgtatttgaggtttcaatttgcatagtgtataattaagaacttagaggcagaatgatcttttaagactacctgtatgaccttggtccggttattttatgtctctgagtctatttccttatcaatacctacctattagtgttgcaaatattaaatgagataagatattttaatgaacacagaatatcactctatactaccaaataataagtactgccttctgttattcacacaatcgtgtgtgatggagcaaagttggtctcatcaggtggctgtgcaatgttgtgcaaagtaggttttataatttgtacctgtaggatagtagtattttattcttattatattcttcttgtagctttctcaggagcacagcttttgtatttgatcagttatttacattttttctgtatgtgaacataaaacagggtattcatcctctgtgattctatatgaacatgacgatgttggaatgaactgttctattagctgtccacatattatggttgttctctgtaatttgtcagttaaagttacttgtgtattttcttcctcagaagcatttgaagtacttggagcttttaaagactgcttagcagcttttaggattgggctgagagggaaggtacacctgttcaatatattccacttttatgaacttgtatcacatttgctcctttctgacaagaaaaagaaaaattgatgccctagcatatat

SEQ ID NO: 125629 - DNA, 1035 bp, Homo sapiens
ggagtcctgatttcaacggagtggccgagtctgcttttgtttgaaagtaatgtattttaaaattcattatgaacaataatgcaattattcataatgaataatgttttatatttgcatcattcatttagggctagtacatagagatactgaagctgttggcttagcctgttccatagctagtagattgatcatagagatgaagcggtaaaggctttagcacagtgcattgacagtcccagagggaatggacaggtcattgccatggaattctgaaaataattttatcttcattttcatctttttttctgacattggctttaaggaaggttgtcttatccttgttggagatttccacattacagaaatttgttgcatttgttgatacaagctatgtaaaatgacccacaggcaatgtcaattccggaggtttactctgattacccacacaacccttattttgatagatttaactagcctggagttttattgactatcactcagaatctttcagatcagagaactcactcctttgcttaactacttaaaaaatatttttgctgaaattgtaaattagatgcctcccaatccattgcataagaaacttatagcttggtgaaacaccaagagtatcatttgaaaaagaggttaaaaaacacaactggggcttgttaaagaggaaaagtggtattttaactccaagtgtcacattttcctatagtcagctctagcagtaaacaagagttattggaggcttagatagtttgagacacttcacttatctcccagtacttgacttcagaagccaaacatttaaaatgtgttttgctcaggtaaaaatgtttatccatttaaaatacaatgtcattttaacaaaagcaccctggtgacaagctgtttagatatagcacagttgataaactgtcagatcctgtacacatacacttgaaaggaccagcgcagtaacacaaggattggcattataaatcactgttaacaaaccttaatttgcttagtaggctaatgaatgatctccaa

SEQ ID NO: 125630 - DNA, 1048 bp, Homo sapiens
agaatagacaaatctactaataaagtttgagatttcattgctcatccctcacattgatagaacaagttaacacagattaggaaggacaccaaaaacttgagcaacactaccggtcaccttgactcaatcaacatttatagaatgtgcccttcaacagcaaaatacagttttttgtccaaatgcacatgccatactcattgtagacatattttgagctattaagtaaatttcaataagtgtaaaagcattgaaatgatgcaaattatgttcactgaccacaacagacttaaactagaactcagtaacagaaggatacccggaatgtcctcaaatttttggaaattcgataacatacttttaaataacccatatcaaagagtaagtctcaaatctaatttgatttttacagtttacatgcctcttttttctaggcatttaaaaaatatacagaagtacagtctagactgcacatgtgtatataattgatgacagtgacattctctcggaatttatattaatgtagtgcacaatatatttgaagtacatttggcataaggacgtactaagtcacaagacttgtttggggaatgtgatttctttggataaaattaaattccttgaacttgacaactaatcaggctgaaaaaatacacttgaagctttctgatacattattaaggaagttacagaatatccatgaatttagttagctttacactccagtggtactcctgagtattttgtaattgaactcgttgatcttcagatgtgaattggttcttcagatctgtgaccatcagtctgtctacaaacatttatgcaggctctctgagcaagatgcctttcctcacggtggtttctaaactctcccaatattttcagctgcctgggtaggaagcattagggcagacgcccaggctggaatgcagtggcgtgatcttggctcactgcaatctctgcctcccaggttcaagagattctcctgcctcagcctcccgagtagctgggactacaggcgctgccaccacacctggctaatttttgtatt

SEQ ID NO: 125631 - DNA, 1377 bp, Homo sapiens
aaattagagtctttaaaagtcttggtgtttagaaattaatattagttttaatatgactctttaataatgaagaatataaagttctctgtgtgctggtgagaggactttttatttttactcctggaaatacatgatttgtaccagtcacttgtgtggccataatatttttgccctaaatattaggtcatcatttcctctttattgttaggtaacccagaatgctaggtattctctaacagaagaaaaaaaaattggtttgcagtcctggtaagctgttggagattttaataatcccaataaaatatttccatttttcaaatgtgtttagatgtccttggcagatttagattagttacatgagatggatagaaaacaggctcagggcttagggtttattttgatgatttttaaaatttgttgaaataagagttgttttatttaaggaaaaaataatatttctggattaagtatttcaaatgcgttatttttggagagatgctacagagcttatgtcaaatgattattaatatatatatattttttttgagacggcatctcactgtgtcacccaggctgaagtgcagtgtcgcgatcttggctcactgcaagctctgcttcctgagttcacgccattctcttgcctcagcctcccgagtagctgcggctacagacacgtgtcaccacacctagctaatttttttgtatttttagtagagacggggtttcactgtgttagccaggacgcttttgatctcccgacctcatgatctgcctgcgtctacctcccaaagtgctgggattacaggcatgagccaccgcatacggcctattaattcttaaaaacaattgtgaccatgatattagcacctaaagcactattccttttcttagccttgggaagacttcatggtcatgaatactattaatttgattttttaaaattatgagtgccatatggctgtagaatgcagaggtttcatgaaatatattcagtgagaaccagaagtgatttactaatgcctcaaactcatttaaatatctaccaattcaacatataaaattgtcttcacgagaaacattacggggtatgattttgtatttgatcataatgcttgctaattatttcctgttagtattactggtaaaatgggggttggcaaattctagatagtgatgccacatatgtgtggtgtgggttccttacaaaactttatttgctgcttaattttgtaacattgcatcattccctaaatagcctcaagatccaaatacaattgcagtaatacttgctgaaaattggaaactattaaaaacattcatttgctgggaatcaggagaggggagggaatttcaaataatagaggtttttttttatta

SEQ ID NO: 125632 - DNA, 1166 bp, Homo sapiens
ttcattttttgaaggtgctgattctcacccccatttccagctacattgactatcgttagccacttgttacccatctagtgaagccatcttctatagtgcagtgtgtgttagtaggaaaggcttatttggccttgaagggctcgtttggccttgatccggtactgattgtggtttgaggttgagcatgttaaggatgaatagtagctggaatggtccatgatgtgtgcttagtatccttcagaatgtttacatagtcatatttagattgcttctgagaacaagagaatacagaacaaaatgttatgttccaaataaagatcacaataagaagaaatattgcccttctagcttggcatcctttttctgccatgatttccctttgcattttcttcccataccttagctttagccaaggatacagcagtaagtgttgcttggtatttaatcaaattaaaacctgtgctaggtaatgcctcatagattttattttgccaagatagatgtttgaacggaaaaagaaatagtgtatattaaggactaaagggggtactcttgttttctttcaaatatgataattagtataaaactgtctttttcctgccagttggctcatctcatctcctagcagctgttttaaattccttaattgtctattgcttactcagctatcatttcacaaatttcctcactgccgcattttcgttgaagcaaattctgacagtgggggatgctcacctcacaggctgggttgagctgagttctagttatcctctttgagtaacaggattaactatcattagacagtgcattcgggtaaggtgatggttccctaggtctctttggagttgattactatagaaatgggcatctggtggagcctcaggttgccaattgcattactcttcattttactgatgtttcaattctgtttaacccaacgtagacttttttttatgcttataaagtaataggagtttcctagaggatttgcagcgtacactattgtataatctcattgcttataattttttttcagaatgaaggaagtgggtattttaaccatagcattttcattccagtatcattaaccatttaaatacactttgttaaatctatcacattttctgttaaaataatgtaaaattctagtagaaattttaacagta

SEQ ID NO: 125633 - DNA, 1070 bp, Homo sapiens
tgtatttagacacacaaatacttgccattatgttacagtactgtactacataggcaactatgctattcagtacagtaacatgctgtagaggtttgtagcctaggagcaataggctataccatagagcctaggtgtatagcagactgtacaatctaggtttttgtaagtatactctatgaagtttgcacagcaacgagatcacttaacaatacatttctcagaacgtatgcccattgttaagcaaagcgagactgtaattgacctaaggtcacacagttaacaagtagtgaggttttaaactaaggcctttgaccagtgctcttgatcattacagagtggtaccaacatggtagcataagctttaagaggagggaaaacttggttcccgtggctttatcagggaagacttcttagaggaggtagcagttaagctagcccttaaagaataagtcttatcttgaactgaatgtatgctagagtcagaattatagaggattagattcagaataaaaggccatctgtttcaagttcctaatttgcagaggagaaaactgggatctgtgaggttaaataacttgttgtaggacatatggctaattaagtggcattagaactgttctcttccctcctctatcctgtgttattccctgtccccctccgttaatgcacactagctcatgttaagtctgttttttcatcaacactttctaataagagttcctaaaaacattttacagcttgaaagtggaggctttcttgtgtatctatgtatggtgatgaggttaaaccaggaaagggtcagggcaggcatggaaggagatactagagatacgtggagacatggagagacagaccttttctatctgttttttgtttttttttcctagcattttactttattgttacatctgtttccttccataagtatagataattgagtgttgagagaaaggggacaaatgaaattctaatgagaaaaaaatgatttaaaattccacaaaatctatggaatttcagcctcttaagtaacctgggatgtttttaactttcactaatgtttattagccagt

SEQ ID NO: 125634 - DNA, 1034 bp, Homo sapiens
catcttttagtcctagctactcaggaggctgagaggagaatcactggagtccaggagtttgaggctgcagtgaggtatgatcatgccactgcagtccagcctgggtaacagagtaagaccctttctctaaagaaaataaaaataaaacatagatacctgtgttgttgttatagctgttcatatccttagaattaatttaccttgtctgctcctgcatattatttgtctcctcataattagcaaagttccacagggccagatatcaccaaatatgaatagtagattttattctaaggtcagtgagaactgaagaatgttaggggctgactcaatcagatttgtttgtatttatatttggaaaaatattactctccggagaatgttttggaatgtttggcagggtggttggagagacatactacaggaaagaaatgatggtaacttagttggcagtgggaaaagtgagtagtgaattactcagagctctttgggggtgaaatggactggacttatatcagttgaacttgagaaaaggagaagcatcaaggatgatgtaacttttaggtttctggcttgagcagttgtgtaggtggtagtaatttttcatggtgaagatgatgaaatactttttgtacctgtctcatgattgctttctgtacatcaaggtcagaggtcataagctcataaaatgcttggtattagaattcttacataaaggatgtcttctgttttagtttagtaatacaatttggcttaaatcacagactttctctaatctttgttttgattgtcatctgccgagagcttaagacagcaactcacaggttggcccattgagaatctgacaaatgaaaaattataaaaaaaattcagaatccctatattgtagcccaactttctttagcacttctatccttgaatgctagggcagtgttgtatactgtgaagatctttgtagatttttctactctgtaacattttaatagttccattttggggtattacagctgttcagtcctccccatacctcaaat

SEQ ID NO: 125635 - DNA, 1002 bp, Homo sapiens
tgcctgctccctcccttcttatttactttcctcttttagcttagcaagtcctctctctaactttaagagttctctagatctcaccagtctccctttcctgtccaaggagtcagatgctttcagcaggctactttgagcaccactgtatcatgctttacattttatgtctcctccttgcctatagacagtaccccctctgagtttattattagtgttttttttttaactgtaggaggactaagatttattgcatgttattagtaaatacaaattgtcattttcctcctcttcttagcttttctcttacaatcccccaccttatttatattacttctgagctccagagaaacaagatatgcgtgcactcatcatcagagagatgtgtttctgtgtatgtgtgtttgtgtgtgtgtgtgtacatgcacttgtttgtgtgtggttataggcctgatcagacagatgtcagtttatcaattagtagaactccctaattaagtatttgctttgagcaatagagctcttattggttgtgaggtaacttggcaggagggaggcagttaccgatgtaatagagatgcctgagcagatagtttcgttgagcagatactatttgatgtcctttaatcatcagactcctccacttttccttcttctgggctcctgatttatccctaaacaatcagagcctctcctccataattttatgaactacaaaatttacaaaaatgttttacaaaccctctgcctccccagtatcttctccagcccccatgtcttggggcaggccacatcaggtctctctggctgcttcctttcccaggccctactacctactctggcccatcatatgtcttttgagaagatgatttttcagttcttttctttagtttagaaaatcagaattaattgattaatttttaaccccttctacctttctcctcccctaccatatgaattcatgcagagccagccctgcaacctaattttttttgttttgttttt

SEQ ID NO: 125636 - DNA, 1036 bp, Homo sapiens
atttcatgttcacgggcagggagggatgtgtgctgcatacaaaatgagacaaggcccaacgccctaatctttcatcaccttgaacctggagactaggacgcgtctcagcaccaactaatgagattgagcctgcgtctctcctgaggatgccggctcaaagaggcttttctgctcagaaatagcaggctctgtcttattttaataattcctcagatatgacaagtctgatgttatgtatgaaagagccaggcttgaaaaagagataaaatgaattttatatcattacttcaaaaccaaaccaagggaagtgtgttgtagttaaattaaaaaaaaaaaaagataggacacattttagtcatgaaatatactgactgtaaaccaggagtcatcctttcatttattttaatgcacaatcaccttagatttctcttctgtaatttttaaacctattcatgcgttaatcaaaataatgtggatgaaagcaggagcttgttcaataaacatttagatgaaaatatcagaggggacatgtaattcctgatggggtatgtcatactgaacctctgaagtcccatcgcttcttttggtggcatcttttgaaaatgcatcttttttctgtgtaccactaacctattactgtttagtctcttagactttaaaaatgcctaagccaaattactcaggggtattgggttctctcgtttttttttctgtctttttcacaaaccaggtaactattttgcatccatggaaaagaaggttttacagaacagatttcggctctcatacatctatagtacttctggcaaatggttgctgtttttttgtttgtttgtttgtttgttttaattcttagggaggactgagccccagagacaatgggacccttttcctaggtaaagaaaacgtctctagaaagacactaagttaagagccaggcaaggtggtgcacacttgtagtcccagctacttggaaggctgtgacagagaattgcttgagcctaggagttcaagaccaatctagacaaacatagca

SEQ ID NO: 125637 - DNA, 1048 bp, Homo sapiens
acatgtagattttgagtggacataaacattcagaccacagtccctgtgaagaaggtatttgttattctggcagtgcaggagcaagctagcacacttgccatatttagctgatagaagtaatgtgaaatgaaccgttaggaggagggattttgtggaagaaggaatggcggactgagcaagataaaatatggagaattgctccctcttcaagaaacgcctccatcctgatgtatatcagctttcatatccccatggatattttacaggcattgctacctctttaaacatttatgctattaaaaaaatcagaccaattgttgacataaagctaacatagcagcttctatatagacagaatatgaattttttatgctgttgatgagaagtttatgtcatttatatactatagtagggtagaagatggatttggaatcctgaaaaagctactgtttgtaccattcagaatattagcttgtgctttgaatcgaaatattaagatacctgtattgtcaatgtgagtgtttctgtgcaaagtggcttacatatgggtggaatgggagaaattgctctacctggagaaaatagcaatagttttctttcgtttatgttttgttttgtgaaaggaagggttaatagcatttaatacctgatttatctgtgcttctctgcaccattaaaagaatgaactgttgtggtaataaaaccatatttcattgaattaaaagtgccatcacttgcaagatgcaacattattttatgtacctctaaaaaactacactaacaaactgacatgtcaaactgacatgccattgatgttaagatgcattccaatttcagagatgtaaatatactttaaaatgtatatcttggaatcaatgaaatactgcatatagttcttttgtggtatgtgtatatatgtatgtatacacacacatatatacatatgccacaagagaataaagtatacttctatttggttatagtctataatattttgaatcattttactgagttaggttttacttattttttaaagttgctgttgaca

SEQ ID NO: 125638 - DNA, 1192 bp, Homo sapiens
tcactgatggggaaaaatcaaattattcaaagtcttgcaccatataacaaaaaagctaaactaagacgagatttcagggagtatagaaaccagcaatttgtgaaaaatcttgtgtatgaagagtcatgatgtagaacattcaaacaaatggatcacaagagatttctcaaagcatgtcttagaggtgagcaggcaggcatcaattttaaaattctctgttataaatgatcataagcttatgtttttctgtgtaaaggagaaataatttcccaattttataaaacaaattaccaatgatgtaaaaaaaacatttagcacagtattatatcagagggcatttaacattcttttgaatcatttgagattttcatgtttccatttcagagatcagggaagatgtgccttggagaggaagcatgtcttaaatctggaaatgatatgaagagggatgtcagcaacacttcatcctgggccagtaatagggagagtttcttttctctcgtcaaattgcttaaaggattctagttccgtttggtgtggtcactcacatttgaattctaatactctatgtgatatagattctgttgactactgttagcgtgaccccaatgagaaattaaacacttccctccttttcatttgcagtgtgttttagtttaaccttcatttgtttctcttttctccattcctcatcccaattcaggtatcagatcctttgacaattgttaacctgcccagctgggatttttggcattaagctatgactgtaacgtttctactaataaattagattttttaaaagagtgctgcttgccaagaagcaaagtcattacatagtgtgtatatgttcaatgtatggctataaaagtctccttagccaaacataatcgacagttaaaataaatttaaaataaccgtgctacctctagattttaaaattgttaaggtgaagataggtggtctaattttactctatttccatttttcttattcacagggtatatttgttctgtaaaaccacatatgtatcttatagtctgcagctgatgtatttatctgcctaaatacacatttctccaatggaatattctgtaatatcaagcatttcttttttagatggaaattaattttataacagttgaacatcatctttgtcaatcagcagctttatctaccataaagaacaaaaacg

SEQ ID NO: 125639 - DNA, 1051 bp, Homo sapiens
ttcttttaaagttacacatttcataaagaagaagggtatcagtgtaaacttctaaatgcaggacaaaatgcatgattggggatggagattggagtggacttgttcaaagagcagcagcaaatgagacattaaaggaatacataggaagccacttccaagtacttccatttttctttagttgtgattgtgagatggttccctactagttagagaaggaaaattttaaaatgctttgctaaacagatgatccttaaattggtcactgtataccgtgatgcagcctaatcaaaatggtattcctttgagtgagtgagccacagagactctcgccaaccccttgtgcagctttctattaacagtataaatactccattgttgtaaagcagtttatggttaacaaagcgctgtcacagacacgttatcttagttttgcagattgcctttgtacatgttattctcatttcctagcatgccctctatccctgctttgcctgcttagcaagctcattcttatccttcaggacataacaccaactctgcaaagtcctcttgagacccttctgagcaggtagatggtcccttccccgtacttacacaagccctgatctcatctctgttgtcatttgttcacatcactgtttctccctggagactgagtctctcaagggtaaggacactgtgtgctcttcatttttcttcccagtgcctttgtaaccagtcttcctgggggatactttgtaagtaaaggtgaatactgtatggtgtgcagcttaggagagcttaagccacttcctaagttaagatactaagtagtagataagagtaaaacttaagtgtcttaactcctgtttttatcggtttttctggtttatcagtttattgctcatctgaaaacaagctgtccacatcatactcatgctgttctacctgtcagagatatattacatggtaaatgtgagtgataaaggaggataagttctttgtcagaatgaggacatttcggttctgtcatcatgcctgaaatgcatgatttcacatgatttccatgtga

SEQ ID NO: 125640 - DNA, 2007 bp, Homo sapiens
aaaaaatggcaagcgtttcttagtttggctctcttggcttttgtttaaaactgaagatcactaagcctagatttttgtgtctccagtttaaaaaaaagtaaatttcaaaagcagttcctagaactctccctctccataggcctgttgtgagatgcctatgtccctataagtgtgcttcaatctaccagctttcctaaaacaggttgatggcttagtggataaagatgggacttacaaagcctattgattctcttattgtactcatctgtagaatgggaatagcaatggtacatgctgatcttacatgatgtgaggatgtgatgaaataatacatggaaggtattgagactactgtctgggtcatagcaagcagttttgccattattatatttgtcatgacagttttgccattattattaacccaataataatgtcgtgtcccctttctccattcttgtctcccaaagatgtcacacattcattattgccaaaaaacatttttaaagctttctgtttttctggtacttgcagtgtggctgacgccagtagggtataactcctctgagaatgggtgctgaattctgttcccaaggcctatggggaaatctctttttgttgttgttttttgttttgttttgttttgttttgttttttgttacagtctcgttctgtcacccggggtggagtgcagtgatgcaatcttggctcactgcaacctctgcctcccgcattcaagcgattcttgtgcctcagcctccctaatagctgggattacaggtgcccgccaccacacttagcgaatttttttttttgagacggagtctcgctctgttgcccaggctggagtgcagtggcgccatctctgctcactgcaagctccgcctcccgggttcacactgttctcgtgcctcagcttcccaagtagctgggactacagcacccaccaccacgcctggctaatttttgtatttttagtagagacggggtttcaccgtgttagccaggatggtcttgatctcttgacctcgtgatccgcccgccttggcctcccaaagtgctgagattataggcatgagccaccgcgcccggccacacttggccgatttttgtatttttaatagagatgaagtttcaccacattggctaggctggtcttgaactcctgacttcaggtgatccacctgcctcagcctcccacagtgctgggattacaagcgtgagccaccacaccccgctgggaaatatcttaaaagaatcaaaataagaaagttactctacttaaatcgtgtgctttttctgtgtgtgatttatggtaatcttaccatggggtatctgattactttagaaagatccatttagcttatttttttcttctttgggttatttttttcttccttccatttgcacagcctccccccaaataaaaaataaagatataaagtctatcttctccctcttgtcagtttaagtaaaaagaacttttgcttccattttaataatagaatttgtgtgtatataatataggcagtgatttggcctcaagctgagtttagatttgaaaagatgagaatattaaagcttgtcagccagcccacaaaccacttaagtatttctgatctgacaggatgtggggtggagttctttttcttttctccaccaacacccctcacaattaaaataaatcagataaaatagacactgtgaaggtgggactgaaagtaggtgataggaaagggtggccccacaccaggaccagtacatatgcagaaattccgtccaaagtacttcaagggtctaggacagtgctgtccagtacaactttctgtcacattgaaaatgttctgcatggcccaacagagtagccacaagtcacacggggctgaaggcagatagtgtaactaggatttgaatttttaattttatgtcattttaatttaaatagccacaggtagctaatgtcttgaacagtgtaggactagaaaaaatagattttgacacacattctca

SEQ ID NO: 125641 - DNA, 1050 bp, Homo sapiens
ggttattattgatagaccctgccttctttttaagcaggaggacatttcctcgttctttctcttgttaaaatgataagtgcagagcactctcattaggatgtagccccttggctcccaaggacacagtgagatttcctttccttccgtgcatgttgtctctctctctttccctgccatctcattctgacatttcaagtaaacaggcatacatttacctgttggtaggtgattacatactaataaaaactacaagtaaggaacactaggcagcccccattttacaaattggcatttagtccctctataatctcttctctggagaggagtaatatccacctggatgtaaggctgggtggaattataatgcagccctgttacacagatggctgtcttcgtctgtgacatgtgtgcacacgtagacattcttgcatgtgcttttctgtcagcccagattgatgtgtgcataggttaaattgctagagaaatcagctttctacaccagttgcatctgatacaaatttctacctctggctgggccctggtgccaagtgtttgctcattttgacagtcctcaaatttgttgctttagatttttttcctctcatcttaaaccctctagtccagactttcgtatcacactttattatgtgtagatagctctaccaagaatatcaagggtatctagtaaaatcaccctcaacttccatctccgccatttaacatgaaaacattgttattcatgtttatgtcactccctctggagaaaaacatgttcttcattcccaaggtcaaagccatgttcttcaaccaacgcttacagtctcctccatggttttgtcacatcagtcattcctttccctttgccttgtacctgctgtctttttcaccacttccctctcagctcatgaactctagcgagtttcctccaatctttaaaaatctaaaggagaaaccacctccatcttgtgtgtctccatccctcaaggtcaaagaacttttatgcttgctgtcacccttcataacccgtggatgaatagttactgtatccta

SEQ ID NO: 125642 - DNA, 1034 bp, Homo sapiens
taaatgattatttcagaatttatattgataaatgcctatgttttctattatttcaatttgcccacatggagggtgattgttttttagtgtgttcccttagcttctggaatacaaaagctgatgcctgtataccttgactttgctgacggcagtggtagtgagtttagtgctttctacttttagctttatgttttgcactatttttgaattatatcaattagctatgatgtatacacattcaggattctttaattttgggtaaaaataattcttcactctgtgcctacttagctaagaatatctttaacagaggcagagctgtgaaaccaccgagcaccaacactgcctctctggcttttgcagggacgcttgggtttcaggctgtaactcttagttgcattagcctctgataacttttttgttaattgataagtatgtgtatgactcatcaagatgctggttgctcagtaagataaaattatattctctaacactacttctcctttagaagcttacttacctgccttggtgtcttctgtctcggtcttactttgttttttagtttgtagtttgttcttcagcttactaaacctctttcattgactgtggtattggctaccgatttaaaaatccttgaagacttaaaactcagcagacacgtacagggtggacccctgctttttctcaagtctcccttcatctccaggaactgaatttttcatgcagtaattaaaatttgtaggtcaagcctcccatggcaccgtttgctgctaatatgggaaagcagtgatcagattcgcttatgctgctcttcactgagctgagacttaaaggatgaagggtgacattttcccccattttgtaaattaatgccattgatctgcctaacaagaacaaagttaggcttcaaaataccaaatgataaagagattaagactttaaatggctttccaaaaggcaacctctattgtaaggctccgagctgactattgaactttcaattagaatttctaataggctattgacttaaatgg

SEQ ID NO: 125643 - DNA, 1046 bp, Homo sapiens
gtaaagcaacagtgtgtgttagaggaattgctgttaggaaaggaatgaggatatttggtgtgtaactgtgagtgctgggaaatgaaacaaaaggcagccctacctcaggtcctggaaaggcacatagtggtgtgagtgttgcagcccattgaagctacatcctcaattctggaaactaacaagaacagcattagggtgaggccagagatccacctaaggtgcaaaatgtaagggggcactcactttgagggtcgtgcaggttcaggatcagtactgacacaaccctgagaatgagtgtctcctaaaattgtgtgccctagacaccttacttacgccctgaaacatcccagccctgggtttttgtgcagtgaatgggcttgaaaagcaagtagataagaatctgaaccatggaaatatggcagacatggcagaatagaaatcaatgagacctatttgcaaggtaaagtcaagagaacctagggcagaaaaaaatacgaggcatgagagaggggaccctaattgtcctgtcactgaattctggggatcttttctattgcctgatactgacttttctccaatttctcatattcctcagctcctgccctgtcctgaaggtcatgcccagttcaaattcagcccttacctctttgctaagtcccatgccctcaaccttgttttcagagaaggccatgagaactggagtttttaaaatgtccaactctagatagatctgctttactgagtggtcttaacacattcagagaactgcattcttcttggctctctaaattcagtgaccttattttaaaagatgatcaacatgggttagaaccttttgaggattaggagacattttagcaagtttatcaagaataagcaaagatgacatttggctagcagtatgtctcccccaccccatcctgcaaaaccattttttttggagtgaagcttttccatttgacaagtttagaattaccaatactgcttgcaactccttccttactccaaactctgggatgttttcaggagggactcttttcttcaaa

SEQ ID NO: 125644 - DNA, 1465 bp, Homo sapiens
gcatgattctgtgttcccacagaaaagttcctgctgcttccccttgggtgaatgagccatcgccttgggtgtcatggcttacctgaagggaaagttgtaaagccaaggaggaggctgggggaggtgatggctatcagccccatgaaattgaccatgagccctgagccacctgaataccaggagggtcatgagcagaggcatttgtacaggtgatgtcttgaacaacatgcttcatgttagtggcctctgatagagtgtaacctgggaggctctttggttgtcagagaatttgtcttatactgtattagggttgcagagtgttctgtcttcaatgaagatagaactttttggtcatgtacgtgtgtgtgtgtgtgtgtgtgtgtgtgtgtgagagagagagagagagagaaagagttaatcccccttgacaactcctggatggcaagatagttacagataaatgctcctcagaactgtgccattctagtgtgacaaatataatcaaatatctatattaggatgtgttaataattatctaaactttatactttaagaagtccccagattcaacaaatgaatggacttctgttttcttttttaattaaagttacagctgggaaggtcaaattggttctcttttatacaggttagagattttccctatcagtttccatgaggagcatgttgagaagttctagctgtagacctgcatgacctcttcaggtacccgaagaataacccaaagaaagctggaagcagctttctcccttgttgttctaaaccaggcttgactcatatacttacggagacagccgaatggggtctttgaaataaggaaagaccagtaagccctgtggtgggtggttgtagtactcaaggagcccagtttgggcttcatcttttctttctagtgctcttagtggtttttgaagttcctaatttcctggtctaaaaatatagatgctactaatgtcttcggtcagtgaaaaactaagattagggtcaataatagcaactaaatagtaataataagcaccacttcacatgaaagagaacattgcattattcaaaacacttttaaaaacatcattttataagatctgtttaagtatttattgtagggatctatatattctcacatacaccatcgttgaccatgtgccaaactctctgttagggcttttcaaggctttatcttctcaagcaggtgtcattgttttacaaataagaaaaatgaggcataagtgatggagctgagatataagttgtgtcttaggattccagaatctgggccctcttcccatgccgtgctgcttccccgtacgtcagtgtgagttgggataagcctagcagtgccattcaggagctcatgctgtcatcccctctgtgtctcacctacttgtgctgcaagagacctggatcctgtttatctatccaccctcacccccacccaaacaattgcact

SEQ ID NO: 125645 - DNA, 1141 bp, Homo sapiens
cgggagcagcagcatctgaactggttctccccttgctcccctttcttttgccctccagccaaaccagtaacaaagggcattgtctagtagtctgtgtcagcaataaaagccatggggatctgacccgcggcagtgtgtttcagcctgcgaacttcctggatatctttacggggaatcattcccggggaaggaagggcaggctggaaataatataaggagatcaagaaggaagtcgagcaagtgacacctttaaacaggccaagcgagccgggctcttccccctgggacagttagagttatgcagagctgtaattaacccagcagcccactggatatgtctatttcaccgcacaaaggctgttgaaagaaggattcttgaagaaagaggttccaattcaaatggtatttgagtaagtcccttgtcggatatactgtttctagagtttatggctataatcaacaaaacatggccattctttcatgcaggtttctcatgactttctgaataccaatctttagaaagaaaaggggaaaaaaaaggcatccagaattgtctaggggtagaatgggggaaagggaaggagggggaaatatggctcgaatcaaattaaggacttggttttcttttcagaggatgttgaaaacatttaaaaagcaggtgtgtccttctttcataaatgaagactctgagatatgtaagaaaattttcagttgtgtattcaagtccctcaaaatcattttatcaacctccctaatttcaattaattttttaacaaatattttttgtatgcctaccctatattaggcactattataggcgctggggatattaatatctctctcctgccttcctggagctaatagtggggagagatagacaaaaacgtttaagtatgtagactaattggtgtgtgagatgatgtgctatagagagaaaaatagcagggagggaaatacagtggggagggatgcaaggaaggccttgctgagaaggtggcatttaagcgaagatctgaaggaggtgagatgtggatccggtgggtgtatgcgtggtggggtcagcgggtggggagagacagcagtgcaggcagtgtgcacagggattcgtaaggtagcagtgtccatggtagtgtgtgtgagg

SEQ ID NO: 125646 - DNA, 1013 bp, Homo sapiens
actaaaaaccacctgtaccccaaaaaactattgcatttgtaaaaataaatttctgaacccttcaaaaaaaaagtatctctggtttcacgagactcatatgtgtgtttcctcaaaaccactgtgggctcatcctttccctggattggctcccattaggggaccccgtgtgttcctgtcacatttccttctttataattgtgatctttatgattgctgttcatttccatccagcgagggtgctggcacctggatcgccatgcagggtgcagctgtggccagctcttcctccaggaaggagacctgaagagacgtattctgagaagcctgaattcgactctacattgaaaaattaaggactggcaaccaaaggctgtcacttgttgaagaaaaaaaccttaattaaaaaataaataaataataaataaataaataaataaataaataaacctaatgaagctgagggtcaaggggcatcgggataaactgttttgcaagggttgatgacattaggaaaaataactctattaaatcagaagtctgcctctgccaggtaatccttaccaaaagtatgcaagaagcttgagagatcagccctagaaggaaaggtgccaccccagtcctccaagggcacagggcacaggggttagcatgtaagcttgctagtcaggctgctgaggctcacatcttgtctctcgctgtacccttggggaagttatcaaaccttgctgatctttggtttcttcatcagcaatagccctgtcacctagggacattgtgaagattaaatgaagtaatagtagtatatgtcaagtgcttattagtgcagtgtcaggccaaagttagtgcttaataaatgttagttgttgtttggccaggcacggtggctcacgcctgtaatcccaacactttgggggctgaggcgggaggatcacttgaggtcaggagttcgagaccagcctgaccaatatggcaaaagcccgtctctactaaaaaacaaaaaacaaaaacaaaac

SEQ ID NO: 125647 - DNA, 1101 bp, Homo sapiens
tgtttctttttggtgtatcttctcagttctgtcccctaacctccaagccctggtgttctttctcctcagtcagaccttcttagccctgaaagctgcaggccaagccttaatgggcctctttttcccagcaacctgccgtcctcaaccctttctctggatctcacttttcctcatgggccagcctgaattgagcctcaggatcgtcctagctctcaggattcctcctgctcccaaacattctcatctcttttcctgggaggacctttcagccttcctaaatagcctaagggaagacgcgtatcccttcagggaagaaggaagcactggaaccaattaactgaaccccagcccagggctcttagaaccctttcccaaggtgagacagccacgtagctgactctgcctgcagtcccacctctgtcccacgggctcacttttcccatcacattccctagtacacaggaaaagttcccattttcttcaccaagcactagaagaggtttctaattagctccctaatgggatgatgacagtcctgttcagcaaaattttattgtcagcctatttgattgattatgtgagtgattgatcccacctactttgaaaatgaatttgaggaaaccaacaaaaaacacagatacattgagaccccaaagcaactcattctgggagaaggcaatcaataaatacaaaaggcagaaaaacattctcaaaacatagtacaaattaaagaaagttattgaaaaaacacaaatgcggttctgctgtgacaagcagtcatagaaaaggaacaactggatgaatgtcatggattaacaatggaagcatattatttaatcaggggcaactgactttttcccatccagtgtccgctgttaagtatagcattggttatgtcatcaatatccctaaaccaagagcctcatcatacagtcccatcaatgttgtataaaagacctagattttctgtgtaaaggtattgcttagatatccttcagtaaacccccccagaatgtgtcaacctaggacaaagccgtagagagacgacaaaaatcaggttcctgctgtgcccaagttcccactttagtgacgtagagattt

SEQ ID NO: 125648 - DNA, 1328 bp, Homo sapiens
tcttctctttttcgtgtcttttgacatttttgagcatagataaaccaggctgaccaatgcagccattttactctcatcaaggactcagaatggtgtgggtactgtgcacttgtttgagacaatgcccttccttgctgatagcttcccgaattgagcaaagcagatacaaaaaaagtgagcaagactctcagcctacaatctctagtgtggaagaaacaccctatttctttgctttcttacatcaacttcattttctacttgaaactgtaccccctaaagggaccttgcacttaagtcgttcccagtgcatcctacatccctagagttgtgtctgtgttctgtgtctttttgccaagggatgttgaaggctggaagtcctctaggtcttaggtcccccagatcactgtgggaagaccccacatccccatccctgtgagccaccaggagcctggtgtggccatttctcctggggccttgcttcctcctgtgagccattccagaatagggtgtggggccctggtgctctgacagccacagcttcctctgcttctccattctgggtgaatcttttccttagcgaagcccttccccatatcttaggcactacaattctttacttaagctctcttaaactttatctttctcattccattagattttcatggccattgaacttagcaactgaagaaaactagtttccctttcctatagggcagagagagctttagtaaccaaatgttcctaggaggagtggggaaacatttttattttcattccagtaacacagtggttctcaaagagtggcccaggtacccaagggggatccccaagaccctgtcaggagttctccaaggccaaaactattttcccaataataagacattatttgcctttctcacttactatcattctctcacaaatacatggtggggtttgccagaggctacatgacatgtgatttaaaatattgaatgcaaaagcaaatatgagaatccagacatcttctataccagacattaaagaaaattgaaaaaaatgtaaaactcactaatttttttgttttgaaaaagttatttttataaaaatgtatttaacaggtaataggtttattgttatttttaaatgaataaacattttacagttttctcagttttaatttatttatttttatttatttatttatttatttttgttgagacggaatcttgctctgtcacccaggctggagtgcgatggcgcgatcttggctcactgcaacctccacctcccgggttcaagtgattgtcctgcctcagcctcctgagtagttgggattacaggcacccacc

SEQ ID NO: 125649 - DNA, 1052 bp, Homo sapiens
tttattaaagaaacaaaagtcgccaggcctgcagacagctagatcctgtgcgtgagggttgtcttagtccattttatgttgctctaaaggaatacctgaggctgggtaatttttataaagaaaagaggtttatttgactcatggttctgcaggctttgcaagcatggtgccagcatctgctctgcttctggtgaggcctcaggaagcttttattcatggcagaaggtgaagagggagcaggcatgtcatatggtgagagacggagcaaaagaaagggcttgggggtggggttccaggctttaaataatcggctctcatgtgaactgatagaaggagagctgactcatcaccaagaggatggcaccaagccattcatgagggatccacccccatgaccccaacacctcccaccaggccccacctccaacactgaggaccacattttaccatgagatttggaggggacaaatatccaaaccatatcaaggatgaaaggagagggtgtcagttagcttttgttatataacaaacccccccaaaacttagcgactttaaacaactattttaagtagctcataattctgtgggtcaggcaggtgattgtacctctctgggccagctcagctgatctctgctggcttctgtcagtcatctgtggccagctggggttggctggtctagattgtttgacttacgtctggtgaataacaggctgattggtctggggatggtgctgggacttggctgggacagttcatctctgctccatgtggctcttacccttcagtaggctaacccaggcttcactgcatggcaatctcaggattccaaggagcagcaagagagcaggccccagtgaatatgcactttgcaagcttcagcttgtatcgcgttgctgatgagccactggccaatgcaagtcacaaaactggcccagagttaacgtgggaagtgaccccaaggatgtggatacagggaggcatgaccaaatcagaagccattacttcaacaatctctgcaaagaagagaggtttccttctcttcataatctc

SEQ ID NO: 125650 - DNA, 1048 bp, Homo sapiens
agctggaattctcacagcaaccagcagggagctggcaagtaatggctgctgtgtcctcctagaccagggccagcctttagtagcagctgagcgtgggagtggcaggcaagcttggcaccatgcagcagtgggcttccttgggtgctggaagtacagtcagggaacccttgttctgtccactctgcctacacaatggttgccttcagtctggagagtagtgaatggcaatgagtaatgagtaaagggggaccctcttcataatggcaggggctgggagccttctgggttgaatattttgtagcactcaaagagatggccaactaagaggtcgctctggtattgccttttctctgcctccacatcggcaggcttccagcaccccactattctggatctcaacattggacaagtgtactaatgttcaagcaggggcctgggtgagatggcctcatggtgccctgctggttgctgccttttgctgctcttttacaatccctgtactcaagggttgatttctgacgcctgggagggttggcactttgggaaagaccaatgagatttttacatttgagattttcagcatgtcaaacataggcaagacagaatatcggggagttattgggaatatgaatttgtttgtttgtttgtttgtttgtttgtttgtttgtttgtttgttttgagacagagtctcactctgtcgcccgggctggagtgcagtggcacaatctcagctcactgcaacctccgcctcccaggttcaagcgattctcctgcctcagcctcctgagaagctgagattacaggcatgtgccactatgcccagctaattctgtatttttagtagagaaggggtttcgccatgttggtcagcatgttcttgaactcctgacctcaggtgatccgcccacctcggcctcccaaagtgctgggattacaggcgtgagccactgtgcccagcctttttttgttttttaaataggcactaggagagcaatatctttacattttgttacctgtgaacactcagcacaggaccatataggtaat

SEQ ID NO: 125651 - DNA, 1069 bp, Homo sapiens
gaggtagagtcgcaacctggtacagcactaagaatccatttccttcttctcagtgactcacttcccaccatctccaattgctctctggtcatagttactatgttgttgtttgccagcagaaacagccatgttgttgtttgccagtttggggctttctgtcaacctgaaagacttccttctctccagccagtttggtcttgcagattttgttgtgaggccaacaaccaggctgtgaactgcctaagcccagccagcccttctttgaaaagccctgtggaactaggtcatcaggttgttggatggttcttacacagactgtgctgtgctgcaacttttaatgtgcactgtctatggaataccaaacttgtttccaaactaaatagtttccaatgaggatttaatgggagtttttcatttgaaatggattgaaaacaagccatttcctactcccatttcaagcaaattttggtccaattattttcctttttttaacataaagttaaatggactattctgcccatccctgactgagctgaaccgtgatttctcttgattatgcttttacactgcgaatcgcgaggctccagagacataatgggcgtctgtgggagagtggcagcaatttttaaaatcctgccagtgcttgtcagcttccactctggtgtctgctgtgcgggaagaaagcaccccaccaaaagaaaaaaagtctgccaacaaaaccagcgctgcccgcctgttctgtgggggttggcacagggatgggctcctctctgcaaacctatgtagggcatattctcagccactgaggaagcccggtttccactcatccagccctactcctcccactgttttccagccattagctttttgtggtgttgaaggtttctttctcccttttttttccttgcctcaatttttcttggtttcacttagaccatagcctcagggaaaaggagctcttggcaccctgccttccacttggtcctttaccttcagcagcccagcaaaatggaaaataagtgtctcatagtccttcttgggtggtaggttatttgttgttgtgatattg

SEQ ID NO: 125652 - DNA, 1029 bp, Homo sapiens
ggttaaaaatgccaagctagcagagagagggactcagacacacacacctaagttgttgctccagcctaagctggcccaccactacctgactgcagtttgttgcctgtcccgtcatgcttgccttcaaaatgcctttggattgttcacaagctcaggagccatgggcctcctcctgttgaggggtgtttattgtctaaatcccttacatgtgaattaaaaataggcaaaggtaaaaaggcaggagttttctaacaggtatgggagtgctgtagtaggccagtggcaaagactatcgccattttctttgcctgggacttgttgagtctttgaagtctacctgaattccagagtctagggcttcttgattccttagcaagagcaaagggatgtgtaccctctctttcaggctttggtgaattagaccttgagacttcataattaaaatggatttaatagaggcagggaagctgggatgtctgccccagtaagcaggcatcttctgtcagaaggagaatgtgtcctttgtatttaaacggtttctccaaaaggctctaaatgagatttgggacttaaacaagatttggtgtgatttgctaattacccaagttactattacctgattaacacaggaatcctcatagtctgttgcagtgcctttcttccgggtgccaggaggcttgacatctgtcacctgttcacttggaggcattttaagtaacccaaattatgtatgtcttttctgctttaggatttggtgcctgatttttacatttaaaagttaataactacctaaaggaggtttgctgccaaaatacaagagtgaaaactgacaaatctgtttgttgctgacagtgaggtggagatcttggtttattcattccaactagttaggccgagaaatgatacacaggacagtacagagctcttcctggtgaccatcacaggcatcaggaataaatcccctcaaatctcactttgccccaccaaccttaattgaggcctccgcttgagcagtgacagaactggaag

SEQ ID NO: 125653 - DNA, 1042 bp, Homo sapiens
gaaggttggacttagagcttttagagtcttgatttgtccatacatacagcttgactttctgctaagacacacgcttccactcctaaccagcaaccgagaatcaacatcttctgtgtaatttccaggaaatgcctttcaaactcactgccattaggtagctctccaaacttcacttagaggaacaatgttttagaaggattccaaaaataggaataagtgcagtcctttttctctagattggcattttctgaaatgtttcctggaatagtcttttcgtaatatattaatagacgccactaggataaaggattttgtttgaaaagtgttggattagatcaaattaagcaaagcagtggagagggcaatattatgctgtgtttaccaaacagctttgaccacagaacacctaggaacatttcatagatcccttggaacacagtttgggaaatgctactccagaggatctggagtaagacaaaccagcagagaaccagagttagcctttctggtattccagtttagaacagcaccatatgctctgcagatagaggctctaataaccctatgacaccaatgccaggacttttgaatgaatgagtagaaaaaaatattatttagtgtgctatgtgttgttttgcttatgtagatccttgggagaaataacactctgattgcagagttacgaataattgagccttttttgaagagttggttttccttttatcttgcaacccccatgaactgtgcaactgcttagcttcccatcatcaccgtggctgctggaagcctagagccagcttcctggcccatctgttataaataagtggttaagtgatgggcagacttcatttccatctccactgtgcatacccacatggtttatttttccttcttttctaccaataattttaaaaatcctcccccctccctgttatcttttaaaggtaccctaaatccttttggtcctttaaggtactttaaatcctttatccttttggtcctttaaggtaacttaaatccttcggtgtagggaatatgtaag

SEQ ID NO: 125654 - DNA, 1045 bp, Homo sapiens
aaagcatttttgttcatatgtgttttattgggtttttttttaatttttttctttattttttttttattttttgagatggagtcttgctctgtcgcccaggctggagtgcagtggcgtgatctcagctcactgcaagctccgcctcccaggttcacgccattctcctgcctcagcctcctgagtagctgggactacaggcgcccgccaccacgcccggctaattttttgtatttttagtagagacggggtttcaccatgctagctaggatggtctcagtctcctgaacttgtgatctgcccgcctcggcctctcaaagtgctgggattacaggcgtgagccaccgcacctggccttttgtccatatgtgttttgtcctcagtagattcctagtagaatatgaaaataatttgcagaagatatcctagaaagttagagctaaaagggaccttaaagatcatctagtctagagatggcaaataagtttcgattgtcctgctatctatggtttgttagttggctgcctggaggcttgtattgaagattctgggccatgaaggcatcaaaggctaaatcgattagtgatgtctgccatgagcatggcatgaaggcaaggaagtgtgcatgctgcacattttctgtccctagtttctcccttttgaccaatgaaatcacctgagacagaggtggcactagaaatcacgtctttattctaagtccaggactctttgtaaccccatcttgctgaagtaattatttttcttccaactataaacgttagtaaactagagcaccaaaacaatatgcttcttctagatttgccattgagttcactgtaaagtgaaatacaaaaccaagaatcagtccccctcttcattatttttcccaacttctgatatagttgaggaacgaggcctattctatactgggacctacccaaatttttcttgtttatacttagccatattatcatgatttggttttttttaattaagactgttttggtaagacatattctccagcaaattcattttccctgggtccttc

SEQ ID NO: 125655 - DNA, 1652 bp, Homo sapiens
tcaaaagggtggatgaagtaggtcagaaagagggcagtctctagtaggaggggacacagacttatttactggtaggaattctctcctgtggaaaaacagttccgaattcagcctcaggatacaagccccacctctggaggtgctcaggccatgagggctgcagctgcaggtcttctgttcgtcaacctttttctcttgagctgaacacaccagactccctgcagaattgcttgggtgtgcagggagagtcaggttattttttaattgaaaaagacattttttcttgagaacatgggaacactacaaaccttcaaggcaaatggaagaacaaatagatgttccagtgtctaggcccagaacaggaagttttacgttgtgtttaacagatacgacaggatttgcagaggaactttaaaggagcccaggagtccgctgaaaatgtatttaaagttttgtttgtgtgcttgtgcatttgcctcagaagatggttcttggctttcatcagattttcaaatagaatctgtaaccaaaaaaatagttgaggctgggtgtggtggcccatacctgtaatcccagcactttgggaggccaagacaggaggatcacttgaggccaggagtttgaagctagcctggacaacccagtgagactcctttgcttcaaaaaaaattttaaaataaggccgggcgtagtggctcacgcttgtaataccagtactttgggaggccgaggcgggcagatcacctgaggtcgggagttcgagaccagcctgaccaacgtggtgaaacccccatctctactaaaaatacaaaaaaatttgccgggcatggtggctcatgcctgtaatcccagctactcgggaggctgaggcaggaaaattgcttgaaactgggaggcggaggttgtggtgagccgagattgcgccattgcattccagcctgggcaagaagagcgaaactccgtctcaataaataaataaataaataaattagccgggtgcgatggcatgtgcctatagtcccggctactcaggaggctgaggtgggaggatcgcttaagccagtgagttctaggctatgattgcaccactgcattccaacctgagcaacctccaacctgtttcaaagaaaaaaaaatgttgagattcattgggctcttaaccagagactaactatgcacacgccactttggaaatgtatgctgtttgttacccaccacagtactctcacccacctgaccccttctccctatccaaccttagccttaaccaagaacagacctggttcctagtaagccatgtttccattcaccaaggtttggggagccttccctgactataaaagagactctgctatcacttttatttcatcttaattcaggcatttttttaatgtggtgtagttgacttgtttctaaattcctttacattttgtattgttcacacagtaaaaatgtctattttaccattccccattctaatttttcatcatttagtcaaaggtggggccaaaattgagctttagtctatgtatagtaaggttttgtttcattttgttttgttttctttcaaccagaagaataaaatcagaattttagagcttgtcttacccaacccacttttttttttttttttttaaccagagatgttaagt

SEQ ID NO: 125656 - DNA, 1072 bp, Homo sapiens
tcgtaatgctctgtttaaaaggaatgatatgtagtgagcacatcagaaatctggaagatggaaaatctctctttaggatctctgctcctctctcgagcaaagaaagaaatcggtgtggtgccagcagaggtgttctcagcaggacctggcccattaaatgaaagacttccatgctgagccaatcaagagagacctggacaaaaatcagactctttcctgccctggaaacccatgccttgaatctgtaattcatctgttaaatcaagtgtgcagccggtggtttagcacagagggggacgacggggaagagagaggggcaggagctgcagcacttgaatttccagcatcagagtccagttagggaaaagaaacagagctgtgatagcttcttggaccttatgtttccagcaaagagaaagcagcaggaaagatttttgaaaacagatgagctggtggaaggtattagaacaatggcggaagaggcagggaccccaggggctgaacaaaacacagttccgctgttgcctttcaacaagactgaataaagtttaggattttttttttatgggacttgtagccgtttttaaactttcatttttcataatgtcacagataatctttttatctattatccactggctcttttctgagaggcatttgcatcaaatagtgctgtacagatcatgactgtctctagtggggaaagcagcttgaaatgaaaggttattcactccctctgctttcgctggctttgttcttgattctcacacatttttttacatctgaattcgggtatttctggagtttttctttagaaacccttccattctgagatctaagcatattcagactccgatctatatatcaggggttacaaagcttatgcctactgaaagtgaagcatgtactttgaaacatttgttggataccccatggtttccaaaatcccttcagagcatttcctacagaggcagcaaccgtaaaaagcggccagtcacacagtgggggccctttccctagcactggcctcctggtggcagtggagcagtggccttccaagcatgcactgcga

SEQ ID NO: 125657 - DNA, 1038 bp, Homo sapiens
ctcagctcctgacatcctctctaacctcctgtgatctggtcaccctgtgggaaagccaaggcagccctggcccctctccagcagtctctccctggagggctcggcctgttgggttttacttagctcgcagtttatgccttcattctcctctgaccctcattaaccaagaggaaaaactaattctagaaaggactccatttccccccatattgtatatttcatatccacagagcatgctgtgccctattgagaattaaactgcgatcactaacctcatctcatttgtgccaggggtcttgttcaaaagctgtttccccagcaaagcagtgccgtgggttaggaccccctcaccccacacacacatgcttggtggagtggttcccatctctttttaatgcctttggcaggggacagacagagagagagaaagagagagagagaaggaaacacagggagagagagagcaagagaaaaaaaagagaaacacaaaagaagaacaagagggaaagaaaagctctcgaacagcagccctgtgttttgttagaacattggcactgcatttatcaggattactggagggagagcagggtttgatcctcttctccactgggagagggaaaagctttattgtaccttttttaacatctcacagttagatcagaacaatacactgtgtatgtacatacacaccatacgtatgtgcctaaggatgatattctacttgggacacaccctgttttcaaagcatggctgaattttttataaaggccagatacagaaagccaccaggctctccctgggtctccctttccagcagaccttccccccctccccatccccttgccggacttggatcagcaggattcactcctgtcaaacaaattagagcatctatgaaatggggctatcgacatgtgtgacttgatctgttttaataggggcccggtgggagtttcctccctgccccactgagctttgtatccttcacggaaaggcagacggggcgcgggaggatgctgtggactttaaccctttgct

SEQ ID NO: 125658 - DNA, 1090 bp, Homo sapiens
cgcaaaagggcaagatttacacatggggtttgcagaggaaaggggtagggggctcggaaaggcggcctcctctgcgtgtgccaggagagctctatattgcagtgtgctttctgggttcacctaggcagcgttacacagctgtcctcagaggagcggaaagctgggctctggctggagggcccggtcatcaatatgctgacaggccttcatcatcattttcatctcggttgtaaagcacagcctattttccctctttgccaaatctctgctccaaatgtacataactatagatttctgactgagccctgctgccaggaatcaaccagaaagcttcaccagacctctaagacagaggacaagtaaattgtgttctcggctcccgtgaacggggcctgtcactttaactggtttcttctcaggcagtgggtacagcccaggacacccttagtgaacttgccactgcccctggttttctttctctctctttcctgctcttcctctcctgcctgctgtttgctgaccagaaaaatctggctggagaggcccatgcagtgagtgaacatcacatacataattctatcagaatatatccaagggtggggaatcattgttctcggaactagctgagctgaagcccgagcagaaatactaaagtcagtcgtgcctttgagctgcctctaacagcgccctttagagacccatttcatacaaaatttgaagcctgtgtttattgcccattaaagcaacctttattttatggcaaatgttgcagtaattgccttttacgaagagcactttgtaacacacatgcacagttgaaagaaaaccactctggtattgtctatcgggacttaatggcgcaattaattttactccatctgttcctgagactttaaaggaaaatggattttttttttgagcgtactttaatgaagaagataaagcggcccggctggtgtcccacaggctcggcgcagtaagttcagattattgctcagtctgtcagaatgggctgcttccctcagcagcagccacagccagcaacccgctctggcccctcgccgcgccattcctgatgacaaactgccag

SEQ ID NO: 125659 - DNA, 1048 bp, Homo sapiens
ttacaagtgataagcaggacaaatgtgaagtcatctctcctgctggcaggtcagagggggctggatttagagcccctaggagactaggaaattagatggtcagtacccaccgtggaggttgtagcaactccaggctccagagatcctggacaggggtgattccagatgtagactcatacttgaaaggcatcaagagcatccattgttaggacggaggtacagcagtaattagtgcagagtgctaatagaggaacagaaggtaggaaggaggccccagcgaaaggcagccgggggattcggtttcctctaggtccagaaccgtgggctgagatttcacaaaggagaagtgagggaagccctgctggtttctcattaagccccttggcctttgctcattcttcgtgggctccaatggagggtggaccctgtggcttcttcactttgctctctgacctcttcagccccttctctgctctcttctctgcttgtcctaggactgctgtctgcaggcacagatgccccccgttgagccacgcaggtttctgtgaatctgaggttctaactccctgctgccactctctggctcccacgtcttccctgcctgacactcccctcccttccatccatcaccctcctctctcctaagagtgctctctgaatcttattgcctttttatgtctctcttgggttcttcctcctgccctctccctgagcatggttttccttttttggagcatcccacagctcatgccattaatggagtcataatagccacggttggcttttcccgagcaaacagacttctgtgggctgcagaggacacagacccccactggtggctcgaaacacccctcctgcaggcagttcacaggctggacctttaaggttcccaccagccaggccacacattggttcctccatatttgtacaaaaagatgtgagccaggagcagtaggcaaagccctctaccttggggggaaaaaaaaaagttggtctggaggataatggaaattcgcatggggcgagggctctgagagcagcatccatg

SEQ ID NO: 125660 - DNA, 1042 bp, Homo sapiens
gccccgggcggccgccggggagaagccgccgcgcgccctcctcctcctcctccctctccctcctccctccctccgcacatggtctcctttgtcctgtcgccgccgccgccgcctcgctcttagctccgcgcgccgcggcggcggctcaggccgctcttctccgcctcgccctcccgccggccggcccgggacgcgccttgttagcccccgccgcgccagcgcggccccgcgcgccgcaggagcggcggggagacagtggcgagcgcgggccgggcgatctcggcgggcgcgctcctcccgccgcccggggcctcggccgcgctggatgtgtgcgcgcggcgccggctctcggtcgccccgaagctgttgcccggttcggatctggttcggcgcctccgctctcggactttggcgaggaaggagcccagagactcttgtggacagagccgggtcgagagttgggcgttttctcttcgtgtgttttggtggtttcccccctggtctttgacgatcgcccttcgggagccctgctaaagaaccaaaccatgaacttggggctgaccggaccgtttaaccctttgcaaccaggtaatgaagcccccggggcgcggctcgcttgcctacctctcgcggtcggaagggaggcggccggatcgggggtcttttgttgcggcggccgggccggcgggcaggggtggcaggggcgggcttctcccgtctggcgcgcccaagcgccccttcgctacccctcctcccttctttcctcccccctctgcggccctgtcgcccgcctttgtactttcctccctcggccggccgggctcggccggagctgcgcggtcgtgcccgggagggcctggcgttcgccgccaagctccgatgtgaggagggggccggggcctgcgtccgcttgagctgggggccctagcgtggcgctgcccgctcctggggtcgcgcttccccagcgcggaggtcgggatcccggcccgcacccggtgccaagggaggcgaaaggagatctgggctcgggttcggcagcggg

SEQ ID NO: 125661 - DNA, 1711 bp, Homo sapiens
caacataggctttttctaagctttgcttgggaaaccatacacaaataagcattttagttgatggcagattattcctttgccccttatttccatcaaaatggcctttcttttctcctccagagtttccccttaatgccttatgctaattcctgttggtaacatgaatgacaagagacggaatcagtgcgaatccaggtggtgcaaagtagactgactggtatcccgcaccccctttcctccctggggagaaagagattaaggggggtgtggagggggaaagcatcggggacagttttgttaaggggattagtattcaaactgctaaatatcaggaaaacaacttcaaaaagggattcattgtgtagcgataatgtcaataattgcttcaggacaggtgcagagtctccttataggcttgtggttttgggtctgtttttactccgggtagtggcagtgtttacaggatgaatggctgacaaggccttcaaggaactgtcagcttcatgcacatcaagttcaagttttcctgcaaggcggcctgcctgcctgaaagtcaggtctcctatctttgtccagtatctttagccaagagcaataaaaagcatcataagaaagggcaaatttacaccaggtaacaaacacaactggggaaatcttcaaagccccagcttatgggacaatctaaccagagtgcaggggagctgacacgtgtatccctccacctccagatgtttaagttacacatcacttctccctctcaagagactggtagtattctggccttagaggagtgtggctttaagctgctggtgagattatgctgctgagcctggtggcaggcagatttggtccataaaatttcaccgtgggagggcagtgctaatctcacaagctgattgtggtgggggttgggggggcgcagccctgatgttgggctgcacagtgcggagatgaagctcaggcagaggcagcaggggccgtggctcgaggcccatcagtcagcttgtgagcttgaataagtcatttaccctctttaggtcaagattttcaatcataacaaaacctattccagggccaacatctctggtggggataaaacaattaattgggaaggggcaggggttgaaacagagtggatacagtgagtatattttatatcacgtttgttcatcgattttattttgactttccctgtgttatagatgccatccagtttcatagagatttttgtgtttaggtgttccgaatggtcgttttcttctcctgccttttatttcctgctttaaaacaagttaatcaaacagcacatgcttgcatgtacacacaacatgcctaatgaggactgagcatttcgaaaggggtgtggcattgagcagggcttagcgttgtagacacaaaaaaacagtttaactttaatcaaggtcatagttgccatatttaatctttatgtgtttaaatgtttacaggatgttcatgtgaattttatgaatccttctgtctttgtgattcaaccatctgccaaagaaaaaattaattttcccactgagacagaggcacagagagagacttagtaaccctatttagttgattgaaatgctataggagcaacaggacctgtaccccaaattctggggtatttattctataaaggaactttcagtctattcaacatggctagtatttattatcctctcttgcctactgtagatcc

SEQ ID NO: 125662 - DNA, 1061 bp, Homo sapiens
gaatggtttcctccagcagggaatgaggcccctcattctgcttctttctactgtgggcacccagtgtctcctgaaatgtgaacagcaacagagcagctgctcaccctcgtaggcaggaccccacctcacctccatcagcctgggaggttctagtggatagtcactcaccaagaagagcaccagacgcaacgctctggccacctggagccctctctgaccaggactgcttttcctctcccgggccctaccaggcctattagtggaacacacccggcctcttcttggggttggttttgcactgagaatttccggtggaacacagatgaggttggagcctttaggttagtgaagcctttggatatttttggcagtatggttctatcagcattgtagaaagaagacctagcttaaaaattgcctgaaatctgaggagatgaggtaagaaacaagttacccagcgatactgctggcttagtaaccaggtacctaataaattcttccatggcgaccatatgaccttattctttaggtttagacacaagggatttccttggtttggtgacagaaaggtaagagttatattaccatcaaggtcaccatttgacttttaagaaaaacccattcccgccgagcatggtcactcatgcctgtaatcccagaacttttgggaggctgaggcaggaggattgcttgagctcaggagctcaaaaccagcctgggcaatatagcaagacctcatctctactaaaattccaaaaacctagctggggttggtagcgtgtatttgtagtctcagctacttgggagggtgaggtgagaggatcacttgggcccacaaggtcgaggctgcagtgagccctgattgtgccactatagcctgggcgacagagtgagacaccatttcaaaaaaaaaaaaaaaaaaaaaaggcctttccataaaataattctatgcatgaaaataatgcagttgactgtggaatagctctcttaagaaaaaaatttggtttacagtttaaaatccctttataatgaacatatggagaccattttacaattcctcc

SEQ ID NO: 125663 - DNA, 1725 bp, Homo sapiens
aaacagatgccttgtactgttagtgtgaaaccaccagtaacagtcaaaaaatattccatgttgcatgaaagtgtctcccgaaaattttccaatagttgctttggccgaactgatcttttgccgaacttgtgaatgcgtgtggtggtgaatcctgggatactggatcccatcactggaattgtgaaccgggtggaagattccaggcattcgaagtgatcttgatgatgccttttgggtagaacttttgacagctgccacttttccatcctgagtgcccctgtgatggaggaggcgtagattacagtgtaacccattccattcttttagtcagatgttcaaacatcactctggttacttttgagctcagtggaaagcccttgacttatactgggcgattactgctgtcctttgaaagagttttctctatccttggcaatattgaccaaaaagcttgaatgttcatcagcctctcttcaatccattcatatttagcgttttgtgtagttaatgatgtagttagtatttggttgtctcagaaagtaatatgcattcatgatagacaattggaattgaaaaatatcagatcagttctctagagtctaatgagaacagttgagtgacaaagggctcaatcacgcgggccaaccccagacaggagggttcctaaatggaggaagcccgtggctagcccgtggcctctggattatttctagtttctgacaactgcagaaaaatgttgttttctctgaatatgtatgtttatttaactaggtttctttttgcttcacaatctggattccattcagtcagttaccactccaattaactaacaattatttaacattaacagtaattacagacgccagttaagcgcctacagatgtcaactgttagctttgtacctaatcactcaatgaaatggagaaagttcaacaaacatcaattagctaagcaattagtatgagttaggaaagagcatgttatcatgtgtgagctgattcaatttattttattttggcagtaaaatacacacaggcaagcagcaataagttcctcagataagataaaactctattgttttgcggcttatataagaattccttcctttcctgtgcataagtcaaatacactctcgtctggaatttatttaacagaatttgtctcaattactcagaaagcgcagtctcaggaagcacctttggtgaattatgaatccagtgactgtactgtataaggaaatgccagaaaacttcagtggagaaaatgattgattcccactcgagtaatccgctccgtgcatttcggatttttaccagtttattcctgaacctctggtggaacgagtgcaacagtgattttattaatttcatagtgcctgaacttttactcagctgtcttttatttagcccggagctaacatcaaagtattttacctacttgcccagtctgtgcttttaaaaagtagaaacagctgtctattgaagagccatttcatgaattcaccaaggagattccagactctcctgaactcagaggtgctgttccactctcttttttcccccttcgcctcctccaccccacagacttgactcttgtcattagctgagcttgcctggacttactgggagagtgcactctgaggcctgattgtatgaagtggcccagaaagtggagattcattttacctccaagaggaaagctgggcataggagctgggcctctggg

SEQ ID NO: 125664 - DNA, 1051 bp, Homo sapiens
gccacatggccctgtataatgacctcttcccaagatgttagacatcaaatcagtttgatttctacccccatgggaagaggaactccggttgtaaagaggcagcttgagaataactggtaaagggtgacttgccatttccccgctggtcttgcctcccaggagtaactgttatttgaccacatgacccagttacaacctgttacccctgtgtggccagggcctcacccccccagagcacaccttcgggtcaggctcatgcctgatttgtgccttctttccttctcagggccctccaggttgagggaagacagctttacacctccaccttctgtattagctccaggataaacttgaaaactgcctactctgagggtttttttggcattttaaaagttaagtctgactttccgagccctctcagcatcctgccaggtatcttatcttattcaaatatcctaattgcttctggggctgcacatcatcctagcacctaactgacaaaatagaccttcacctgagggcctcattatgctttctgcctgtgcatcaggccaaaaatacctccacaatacctgctcgacatcctgggcttccaagtgacaaacaaataattgggtgaaacaaaccctgggcgccgagcagctgccatcagtgtcggagcacagaagagtccacggcagtaacagtcacagcgctgcctggttcatgtcagagcaaatctttgaacagtgggttgtgctgacaccagagaatgacagctttggaaatggcatgctagttactgctgcaagtgaggcctctcatgtagaccatgacaagcggctgtcatttccatacaggtgaacaactgacatcctagaagggggagggcgggagccacgcaggaggctgtgtttggcagtaggtggggccagacttcggagaggggtcccaagtaccggtgaccctggcgaaaactagcctaaaaacacagtctctttccatgcccctttactcactccccacacatcttctctgttacctctttggagttcatctgagagagggctac

SEQ ID NO: 125665 - DNA, 1037 bp, Homo sapiens
caaagtgctgggattacaggcgtgagccaccgcgcccggcctcatcctgacattctttatgtgtaaggtgctaaggtggtagcatactgctaaaactagattagtagtacttaatctagagggatcttttcaataattccatacattaaacaatttactgtctccattacaaggtgtaccattgacttaatactggttttttggggagggagtgagtttgagaaacactaggacgttaaaaactgctatgttgattgtaggatatctggatttcagaaacgttagcacatgcttgtgcaggggtgggagagggagaacctgtgtcttagaaatgaagaactatggtacatttatgtaggatatgatatcacattttataatttgtctgcttaaacaatgatttacagatcttttgagaaagagagcaaggaggttgggccttttagtaagacagaaaaatgaccttccgtttaagacttagacaaattaaattggactttgaaagtggtttacccttttcctctcgggtaaatgtcggaagtgagtgccctggctgaacataagggaaggtccattgtcagcaccctgaaagcctgtttgaaatgtcatcaacttggagcattcattggcagcgactatcaacagcccattttaaaaggatgccttgggtagaatggaaattacagtggccagccgttaatcctttttaataagggcaactgttgaggagaattatgttgtaagaatgaatgaaatttgggagcaactctagtccccatgttctgtcgtgactgtcaacaccaaatgtactttcatttttgcaactgcctaaggattttccatttaacaaacttacatgacaaatgggaaagcagtggcattccctgagagtccaaaatctggtttggctctgccgttagcacatttgcctgcagggattgatgtatctgattgaagaatgttgagttcagccaagagttaaggttaaggtccttctatttgttttgggtcagttcctacaggtagagaatttgaaa

SEQ ID NO: 125666 - DNA, 1047 bp, Homo sapiens
acttgaagatattctgctgtgtgccattgggttttcgtttttcttttccccaccatctcatggctaaggtaaaacacagttttggtccagagtcttccaggataagcacataactgcatttccaaagacgtgtttcattaaaagaattaaaaggcattagaggtggggtcccctcccccttcaaaatcacctgcattgaattgcattgaattcagttcatctattgaatttgcctgcattgaattgcagcctatatgcaaggttacagatatacagggcttttatgactgcctcgttaaacacctcctgtctggagataaaatgatggtgattttaaactccttcccccagtctgcacctcactactccctcagaccctggtctgtcccctctaggttacaccaaatctctggggcctccccaaacagactggtaggtcatttaataaattagactatttccctcgctcacaattatccaatcacacagaaaactacatctgggcaagaaagtgtctctcctggtgttgaaataggcctttccaggccatcgtcctgattgaatatgtagattgcagttcattagtggagttcttcatatgtatgcaaatcaggttgttaacaactccagcttaattgttagttgtactgcagctgattgcttttctttctttcattcttttcccccccttctccttgtaggcaagcttcgggcctaaacttgagctccttttccccacgagtttaacttcctggtgtggggggtgttcatagaagttgtgatttcttccataaaatagctggtgtcgtgtcctgaatcctttcccactagaaatagtgattgtgcccaaagtaggctttttattgttgctaattcaaaggacagaagctcacagataaggttaatattagcaatatttgagaatggtggtgggaataggtaagagcaagcagaattgctttagaaatcatcaaagagcagatccgcaaggtccctaaattaggttctcttgtcccatttccaccactgctaatgagtaattactga

SEQ ID NO: 125667 - DNA, 1077 bp, Homo sapiens
gctctgtcaatatagatgccccctcatggggctttgctgttgtacagcagggcaaggatccctcaggacatgagggagattgagctgaggctagaatggggctaaaggggctgagagcatcagatgagtccgggagatcagaagagtagccaggcacgatggctcactcctctaatccaagcactttgggaagccaaggcaagcactttgggatcgcttgagcccaggagttcaagaccagcctgggcaacatagagagagagacctgtctctaccaaaatgaaaaaacattagctgggcatggtgacatggatctgtagtcccagctactcaggagactaaggcaagaggatgcagtgaactatgattgtgccactgcatttcagtctgggcaaaagagcgagaccctatctatctcatctctttaaaaaaaaaaaaaaagagtgaaagtcagaagcaggtactaagggcagtgaaaacccaggagactgatggggaagaggtcatagcaagggaaattcaactagaagcttcaagtcccaggaccccatgccttgggagcagtgcttatccaaggcagtgtgaagccagttcaaagagaaagctgtcaagaaacaaggaggtggggcagctttgaaaccatgctggtgcaagggcctccagcctagagaaggatgccaggggaaaagattgagaggaagattaagacccaatttctactgcctaagaggatggtaggcggaaagattagcctgaggatagataaataagacaaaacagagtgatttctgtccatgataaggacttcacacaagagtttgttttttttttttggagacagcctcggtcacagcaacctccgcctcctaggttcaagcaattctcgtgcctcagcctccccagtagctgggacgacaggcgtgcaccaccacgcctggctgatcttttgtattttagtagagacagggtttcaccatgttgcccaggctgcccttcaactcctgagctcaggcagtccgcccgccttggcctcccaaagcgctgggattatggtttacttgtctggatggacactgc

SEQ ID NO: 125668 - DNA, 1036 bp, Homo sapiens
ccccatttctgatccttacgagacaagtcttacagccatcctgccagctgccaccccaggcttttatccaagactcactgttggtggacctctggctcttctgttcaggaagagagaagcacccacactgcaagaaatcatcattataatgggccttagctaccaaagcaagtgcgtccccctggagggtagatggaatttgctaaggtctcaggtttttctctgtcagtgctgtctggggacatatttgaaggctctgttaccatggcacctaggctctgagacagggctacatgaagagcaatttttggaaagaatagatttctctctggcttccatttgagccaagtggatgaattggcttcttttgcttcaataattctggaactgcaaggcacccctgggggccctgggctcagcaaagctctggtcttcattgaagcattaattagcttgcactacacagacagtatgtggccaaaattttatttagctgacaacactgctaacggcctgatgaatattctggaatatattcacttggtggaggcggggtatcatttttacacttcccaggtggaaaataagccagtatgcagggctgaatagataactcctcaggtgtcttccaattccgaactactgtgacggggatgatgttcctcctgtactgagtggcttcctctccaaacccaggccacaagacttttgcagcccagggaacagcagtccaaaacataaatcgagttaacagagtgtagacagcaacaacccctacgtttaatccattttcctaagggaatttatatttgtttataggaacttagacaaaatgcaaaggattatggaacagtttttagtaaattctttatccaggccttgtttatacttccattctagaatgtaaccttctttagcataagcagtatgggattctgcccaaaatagttatttggtgaaccttgtaactgatgtgtataacttgtacatacttaagaaatccagccattttcatcttgctattgggtgctaatcc

SEQ ID NO: 125669 - DNA, 1060 bp, Homo sapiens
ttcggccacaaggatggccccagtgtgcagaactttagcaaccctcacgaaccctggaaccggctgcaccgaacgcctccgtcgttcccgacccctccgccctggctgaagccaggggagctggagcgcagcgcgtccgctgcagctcatgacagagatagagatgtagataaacgagactcatctgttagtaaagatgacaaagaaaggtacggaaagaaaccgctctcgagtccccacgggggagcctgctctatgccaagtaccagtggaactggccgcccaccctccctgtcccagcctcgtgctttagccgccccggtagcctcagctcctccccacagccagtgcccgcagcccctcgcagtccccatggcccatagcatatggtgaccgtaggagatagcagagctagcgacagattcctgtctcagtcgcagttatacatcagcacgtcccaagtccctgttagcgtgtccaaacagaagtctttctctagaagacagggagttggagcttcgggccagacacacacagcatgaatcaattccatatttgctttcaagtccgtgcagtccatttaaccatccataggtttttctcgctcttttcctctttttgttttcttttagaaagccatgtttgcattgcctcatcatatttttctcaaattttgttcaaactcaaagcctggggctcacagatgactaataaaattttactcacatagatgtagagaaacgtcgacaagcagttttggtttggttttggtttcactagtggataattttgttaaccgttgtctctgcacttggtaacccatgcctaaaaaaaaaagtagcgttaaacagggaatgtcttggagttttttttccaaagaatatcgtaacgcattcttgacaaaaatgtctttttttttttctttctttaggctatttattttcactttaaatgaactgataaggaatgcacaaatatgcttgacagaaaatacctaatcccaatttccttgcagtatttaagattcaaatttgatccgaatctttaatgtttcttttct

SEQ ID NO: 125670 - DNA, 1028 bp, Homo sapiens
gttcagttttctgtgctttgtgaagttagctattatagaatgtaaaacgtaaaatgcttgggcatgttggcccacacctgtaatcccagtgctctgggaggccaaggcgagggaattgcttgaggccaggagttcaagaccagcctgagcaacatagtgagacactcccccataaaaaaattaaaaataaaaattagccaggagtagctgttactggggacgatgaggcgggaagatggcttgagcctggcagttcagtgttgcagtcagctatgattgcaccactgcactctagcctgggcaacagagcaagaccctgtctccaaaaaccaaaacaaaacaaaagaagaatatgaaacgtaaaacaaatgtagacaaatgtgtatcccaccgtaatggaatttgttgtgtagtgccaaaggatttttatattctgaagtttctgtgctatttacttttgctttatttacagaagattctgggatgttgccaaggataactaggaattgcttgtaactatattggaaatacacacgatgaggttgaatgtggaaatgcagctgcatgtgttgtaaatcagtcctagagctgctgctgggcttggtgatagcttttctttaactaacttcggtgatcacatttgtaaagagatgggcaatatcatgaagaatggagggttacaaatttctgaacaacttgagtgaaagtttctagagtgttttccttgactatttttgactttccgtcgtttgagatttactttccagaaaggatgcaccctcccacccccagcccacctatccaatcttcaggattaattcttttcagctcttgggttacctgggggtggtaatgtgagagggattttatggaagggaattaaggaataggtggaagaaaaccacataggacagatgggaaacagaatatatgaagaatatgagaggagggcgaagaagtgagaaggagaagttaaggtgtgtgtgttcatcataactatggatgaggctgggtgcagtggctcacgc

SEQ ID NO: 125671 - DNA, 1078 bp, Homo sapiens
gccaccgtgcctggctggttgcaacctttttatgagaatctaatgtctgatgatctaaggtggaatagtttcatcctgaaaccatctcccctgacccccatgttccatggaaaaattgtcttccacaaagccactccctgatgccaaaaaggttgaggaccgctgctctagggctcataagaatcattgactggccatggatctagatgaacttccttcttctcattagctaaagcagatgacagtgaagagctgaattcctcctccactccccaccccgcaccccatctttgttgtccttctccaaaaagcgaaataaaaaattccatcccgtgttaggaactgtttatctacattggaattctcctctgggccactgtgcccaaaatgatcttaagtagaagtgagtggtgtttgctcatcttctggaattcagcgctactaggaatgatggctcaatgaaaactgtacaacaggcaaatattgcatgtcaataacaaaactcctgggagatccttggagatatttaacagttggacaaaggcgtggcatccagggcaatgggggtgggtgctgctgatggtgcctttgtgttggatcccaacctgcaaaattcagtgtgctcactgctgggagccacccccacaagctcatgagataaaagaaagccagctagagtgagtgcctgaaggccaagaaagcttatcttctcagcaactacaggattaggagtaggctaaaccccttcctttcatcgtgctgggtaggagagggattaccctgcaagctgctccgtcgtccggaagatggtgaggaggaggcaatgccacgggtcctgtttaaaaccggattatcttgaggagcacaggaatgagcctctcctatttaatcagcctgggagctgatatccctggccccttctgaaccggcccactcttctgaagggcttgggtgcacctgggcccagtggtttgccttctctgggacctctggcttacagagatgggtcatttgttggatttttcacatccttagttttatttccttacctttggccattagttatctatagattctt

SEQ ID NO: 125672 - DNA, 1029 bp, Homo sapiens
ttaaattcttataattcctggagactggagactgtccctttctgcttccagaaacatgtcatctcttacctctcccagctccctggaccttctttgcttcccacaggaccttgggcgggaagctgggctttcccctggagtgctccttaatgcctctgcacactcagctttagctgtgatgacaggagagagtcctaagtgatccgcctaccttggcctcccaaagtgctggtattacaagtgtgagccactgccttatagtattttcttaaaagtaactttattcagggggaaaaaaatcccctaaatcttgtagtcgtttctgagaaacgggaatattttcttgaagaagcttgaaattgcagaggcttaaatcttaaattatatgaggagggaggagcagaggctggcagccatgaaattagagctccataatttgtctacagccattcaagaggggaagaaataagaatgattttctgctctgcttccaatccagatgttgtcttccagcccagtagagaagaacaagaccagagcctaggagaccaatcactttaaaaattatagtgtaaaaatactttttttattatgtattcattataaaatttatactgtatccattataaatttaatattcactgtaaaaatcaaaaatacaaaagatcattagataatcactgataatcataacacccaacgataaccataaccaatgttaatatttcatgagtagctttaatatttcacattattttttactcctacaaataatgtaaaatttatattttcatataaacattttgtatgtacatgtttaaaagtcaaatatatattctacaaggctctacctactctttagaggtaccactttatttatttacttatttattttgaggtggagttttgctctagtcgcccaggctggagtgcaatggcatgatctcggctcactgcaacctctgcctcctgggttcaagtgattcttctgcttcgacctccagagtagctgggattacaggcatgtgc

SEQ ID NO: 125673 - DNA, 1051 bp, Homo sapiens
tgtcatcatcataatcatcatcacagctaaagcttattgagtgcttactatgtgctaggcactgttcaaagtgttttatgtggattaactcatttaaccttttcaatcatcctattatgcatatactattaatttttatttatttatttaaaaaattttaaagacagactgtcattctgttgccccggctggagtgcagtggcacgatcatagctcactgcagcctcacacttctgggctcaagcaatcctgccatctcagcctcccgagtagctgaggctacaagtgcacaacaccacacctagctaatttttaaatttttagcaaagacgaggtcttgctgtgttgcccaggctgatctcaaactcctggcctcaagcaatcctccttcctcagcctgccaaagtgctgggattacagatgtgagtcaacacacccggcccaggtactgttactaactacatttttgcaaacgtgaaaaatccagaagttaaataaccttgtccaaggttacataaccagcatctgctggacctgggattcaagctgccacctggctgcacagcccatgccattcactttcatgtactgaatcctgctccctgtgagatgagatcctgtgtgcttcccttgtacccgtcatgtcaccatcacatatatctctgccaccactgtgacacatgggtgagcacttggctgattaatcaaatttcagtgggtggagagatatttttaaagctctgtgtgagcccagagtgctccttactgagaggagaggtgccctgcagcccaggaaaggctggccatgagcatgactttatgccaggaggggggctggtttctgtgcagtaagctctggagggccctctccacctgccacccatgtggtccatcctacgttttcttgtaatgaaggtcccccgtcccctactgttttatcccgtttttgccggttgatttcaggatcccagaggcaaactcaacttgccttttttggagacacttctctctacaggctttctaagaggaggtttgaaggaggcagaaacat

SEQ ID NO: 125674 - DNA, 1030 bp, Homo sapiens
gatcattaaataatgagggagtaggaaagaagacaggacttgctaacaattcttgtcactaacaacttgggtgattattacctgaaagcctagagggcatttcaattaattttttatggcctaacactgtttggtcagtttatcattccttactaaatgtaattcagtgtgtctgtgtcaagaaacctctgggtgcctggcataatgttaaatgttgtggggcagagaaaagaaatatgtcagtatctcatgtgccttccataaggcatgttagaatcatagtgtttatttttgtttcatctttcctcaaaatatagcttcagtttacaaaagttcatgatgagttttgcctgccctgggttctctgggttgaaaaagcttgagaaaccctctaggttaagaggtgacatccaccaagataacaacgaagttggcttttcctttgttttagcaacaacgaactgtctacagactgatgctcgtgaaagcatggaacgtggacgagctccaggcctacgcgcagctcgtgtccctggggaatcctgacttcatcgaagtgaaggtaagcccctgctgactctggtggccgtggtggagtgacaaagaatcgtggtgcttcgttggccatcgtggagttaaaaccttgtaaaactctagaggtcccaggaattttattgatgtattcatttcgtgatcgatattcatcaagaacctggaattgttctaggccttggggataatagcagtcaagaagaccaagctcttgctcttataaagctagtattttagtgggaggatggacagtccacacaaagtgagtcattaaaaaccatgtagtgacatgaatatgctgagaaataaaatagtgtggtggtgagtaattggttgacttttacataaacctttatttcagacatagacggaaatagagagattggtctaatgaactcccatccacccatcactcaccttcaaaaatgatcaactcatgacccagagttgtttcaattatacctttacccattttctc

SEQ ID NO: 125675 - DNA, 1022 bp, Homo sapiens
agtaaagacggggtttcactgtgttagccaggatggtctcgatctcctgacctcgtgatctgcccgcttcggcctcccaaagtgctgggattacaggtgggagccaccgtgcccggcttttgaaagtgatttttatttgttttaggtcacatagatcatggattttcacctagcagagaactgggggagggggcactccaagagcacccgggtggtttgaactgacattttaaaaaataaccattgctttcaatttgtttttaatgatatttactttgaaatttcaaatagcattgaaggaacattttcatgtttatcaaaagtggtttgggatttaaaatgatggtgacccattgccacaaacagataacaaagaagtcatcgtgccgccaccccccccacaaccccccgccttgactaagagaccagtggcattttaccccattaccaagtagatttcatcctccttaatttcttctaaatggaatcattcacggccattcatctcaccacttgtttaaaaatttttagcctggctattgccattttggagattagagttgaacctttttatgagaatcatcatgtttgatttatgaaaaaaagaatttacaggaaagggaaataaaaaagaatgatcagaagctaatttcttttgctcattgaaactagaaagaaggaagcactttctcaagttgacatttgaaaacctttattagtgcatttgggaaatgaagataatagaaactatatgggttctatttgatttatggcagtgtgaagatggcttgctcttctgatgtgggtccataagaaactcatgtacatggcaaaaactcatttgccactttcataggaataaaaaaaattatgccattagttccttcatagtctgagatattggattgaaataaataccatttatattcagccatttgcaccttcccttccacacactggggggaaaaatgtgttttgcctgttagaaatgttaaaaatcatgtaaataaaatttgagcagc

SEQ ID NO: 125676 - DNA, 1027 bp, Homo sapiens
atgtagtacaatgtaaatgccatgtaagtggttgttatactgcattttaaatatttgtgtgatttttaattgttttattttttccaaatatttttcatccatggttggttgaatgtgtggaaatggagcccacagatatgaaggaccgactgtacgtaaccaccttaaaagaggcgtctgcaggccaggtgtggtagctcacacctgtaatcccagcactttgagaggccaaggtgggcagatcgcttgaggtcaggagttcaagaccagcctgggcaacatggcaaaaccccgtctctaccaaaaaacaaaatacaaaaattacctgtggtcctagctactcaggaggctaaggtgggagaatcacttgagcctgggaggcagaggttgtagtgagccgagattgcgccactgcactccagtgtgggtgacagtgagacccctatctaaaaaaaaaaaaaaaaaaaagatgtctgcaaatagtatacgtttaaatataaagttaattttcctgaatttctagaaccaaatttcctaagccatcaatagcctcagaatgttcacattgaatgtcattttctgcaaacatttggcctttcttgtgtgttttcatatggcatacttaccttccttttctttttcacctaaagtaatcatctggttctgcttttccattaatcctccttctttccttccttgcttcctttctgtcacttttctaagcgttctttgtgccttcttgacatctgactgataatgagaatcaccccaggagcttaaaaaaatgacagtttcctggtcctcatggcatctgagatctgcttgttagacatcccaggcgtcatttggtatgcagccagatatgggagtcactgtcccagaaaacttgcctttctctcctgtgcccagcgcttactttgacattcctaacccatcactgtctggcctcgatgtacatttcctggctcatttttcaccttattccccaggagggccatgcttccctgcttacgttgccatttctgca

SEQ ID NO: 125677 - DNA, 1006 bp, Homo sapiens
gtttcttgttccttagaagacttccgtcagtgattgatggagggaggtggcccagcagcacagaccccatgtggtcggcagagtgtgtgggtgggaaagttagatcagagagcccctctaattgtgctgggctgatgctgtcatacctgaagttagatcacattttgtttattttccattcaaacttagtatttgaagaagggccaattttaagtaattcaatattttcaatgtattagggatggtttccagtcatttaaaaaacaaccagaggccgtcccattttgtcacatgattaaaatcattagttcagtcttttgggggaagtggaagtctctagaccctgtgaagtgtttaatacccatgtctattacaggttttatatcatggaaagcctgatagaggaataatttttctttcttcctttaaaaaaaaaaattactaaggaacctcgagccagttactcagctgtatgtcagtgtggatgccagtaccaaagacagcctgaagaaaatcgaccgcccactcttcaaggatttctggcagcaattccttgacagtttaaaagccttggcagtcaaggtaagaattatgacatcttaaaaataaataaacaaccctcaggtgtgtactgaagttaagaagaaagaaagatggaagaaaagaacagaggtactttttcctcttttctctttaaaataaaaaaagatgaaatatagcgttcaactttttagagacttcttcaaggaattttgaacatttactatttgttaaataattattgagttcttcttaagtttgtagcacaatgctttgtatgtatcatttgcctttcattcatttaaggagaggggtatatatactcccaaagttaattaataacaattggtcctagaaccaattccccatagatacccaacccggaatctatggaagattggttgtaggactccccatgggtaccaaaatccacagatgctcaagtttatataaaatggcataggcc

SEQ ID NO: 125678 - DNA, 1092 bp, Homo sapiens
gctgccctgactcccgcttagcacacccttaggcaggcgccccttccacctttccccgagaccgtcgtcgctggagggggcagggtccagcccgcctggatcggtggtgtgcacctgatgggatttgggaaatgggctatccgtaaagctttatcttgcttggcttagctgtgagaagtggttctcttcctctggtcccttctggggactctgtttccccatttcttgctgctgtgtccctcaccagttccttgcaggattccttcgtttttaaatgcccttgaatctagctttgccttggagaccccagtgggtgctgctcctgccgttttcttcctgccaagcctgaatcaatgtttcatctccaaccctctgccagtttggcccctcagagcttggtggctcaagactgttagcctggcagagccaggggtgaagggagaagctcttggagcaggcaggatgcccaccgctgcttcagctgcctcctcgcccagctaccctttggccccattgggccctcgtctgcctctccaggattgtatgtttcaagccttgtcctgtgttcctttgtctgacgctctgtgtattgctctttgaatcgagtttggaggaagagttgagttgtatgagtggcggcatgttggtagtgccggacttcctgtttcaagttttctggggcctcgctaattgaatgtggaaagtagcaccacttgacggctacaagtgccgactcctgaattttcccatggtgttctgacttcaagggctggcagccagggagaatgggcccaggggaagcaaagacctcttccctctgccgtttctgtcccacttaactgacctcactggaggctacatcacccaaagtagatgttagaaaacctaaattaatgaaccatatttttaaaatcctatttttcccaaacagggccctctgcagcccatcctttccttccgtccttctgaaaccacataccccaggcccaagcgccttgctgccacgcccaacctctttgggagaagtatgaatgcgtgtgtctaaattaaaagaaaaaaatatttaaacgttttttaacaaaaatttatttt

SEQ ID NO: 125679 - DNA, 1060 bp, Homo sapiens
cccagacaccggagaggccagcaaagaaaataaggtattcggcattctcctgcagttttcatttgctacgtggacagaagggggtgaggaaaggtgggaaacgaacctggctcttaggctttgtgctgctgtgacttggagaatcaaagaaactaagtccctgagagggacaatgcagcacccacctgaacaactatcatccctacagtcttggatactgactccagtggcctctggctgtcgcctcccactccagcatgagggatcgggtgcaagcacagaggccatgcagagtggagagcagagagagtcaagtcagcgggcagtcaccttcaggttcttgactcgagctgatcccctaggtgcttgcagttggctggaatgccactccctcagggatcacatctgtgtctagaactcccagggacttggtaggttgtaagtaaggtttgaagattattgttttgtgcttgttttaagacaaaaactgtcttcatggcctctgtgaacagtctcccttcattctgttggaatttcctgttgactttttttatcctggcatactgagatcttaaatgatggttgttttagatgttggccacttggtagttaggagggtgtgagaaattatttaatacttcagccaagaagtctttctagactaaattgttccttttttcccaacagagaagaagagatgtgtcatcattccagttcttcaactccattggcagcagacaaggagtcccagggagaaaagggtaggttgctgagccaggaggaggggctgctgttggtggtggaggtatttgtggaggatgtagagattaatacctattgaaaaaaggtcttgagcattgctatgtctaaggcatgttagatacaaagagagagatttcctctccttcagaagtttatagtctgatgagggagaaaggctacagacgggggctaacgattggatagaggtaagctcagtttgagtcacctgtgggtgatcccagtaattactgcacagtaagcggtttgtgtgcgcgccttaatcttacaaacaccatcc

SEQ ID NO: 125680 - DNA, 1020 bp, Homo sapiens
tctcggcgaggggaacagctgaccttggtatggtcttgtccatctactcctgccctccccggcttagctctcctaagtcttaggaacgctaaggacaagtttcttctgattttttttctaatttatttttgtttttgttttttgagacaacatccctctgtcacccaggctggagtgcagtggctcgattttggctaaccgtaacctctgcctcctgagttcaagcaattctcctgcctcagcctcccaagtagctgggattacaggtgcttgctaccacgcctggctgattttttgtgtttttagtagagatggggtttcaccatgttggccaggccggcctcaaactcctgacctcaagtgatccagctggcttggcctcccaaagtgctgagattaccggtgtgagccaccatgcctagccttcccgttttttctgattggcctgacttcttctttttcactttggtagcctccacctccccagcttggctattcgatcactgccgaggacctagacttagagaagaaggcttcattacagtggttcaaccaggccttggaggacaagagcggtaaggagcacagattgttgcacactggagaggtttcaggtgtctgttttctttggttttattttggtgtttgaaaaaatgggtttctctgggaaaatcccaagtagggttccatgttttcttgtggtctttctcacctgagatatccgtgttggtcttcacgggaactggacagcagggaccactgcaatttagggcaggcattcctccatgagctgtgctgagagcctgctctccgacaggcatgtggaaagaagtcccagacaagccaggactgcttcacctttctttctttcttagatgctgcctcgaactctgtcactgagaccccacctatcactcagccttcatttacctttaccctgcctgctgctgcacctgcctccccacccacctccctcctggccccaagcaccaacccactgttagagagcttgaagaagat

SEQ ID NO: 125681 - DNA, 1851 bp, Homo sapiens
tcaagggcagagacttccccattcatagttgtgtgctcttagcgcctggcaggtgagcttagtaggcaaataaagtatatctagattcatacgtgaacttcagagttcagacaattggactgtcttagtctctacacattaggcccccatttaggccccattttatccccttctgtctgatgatctgtgaggtggaaataatgaacacttccttgatttactgtacaggcctgtagtgtagacttagctgagtttattgactgactcttggatcccaggctctgtggtaggcgtggggaggacactgaaatactgaataccatcatctttgaagtgtttattccaatttcacattttctattcttcttccagaatctgctggagcagcaaccactgaggccctctcacctccaaagacacccaacctcctacccccgctgggtttatcacagtcagggccgccagggctgctccccagcccctcctttgactccaaccccccgaccactttgctggggctgatccctgctccatccatggtaccagccactgacaccaaggcacctccaacccttcaggcagagacgactaccaaaccccaagccacatctgccccgtcccccgcccccaagcaaagcttcctgtttggaacacagaacacctcaccttccagccctgccgcccctgctgcatcttcagcatctcccatgttcaagcccattttcacggctccacccaagagtgagaaggaaggccccacaccgcctggcccttcagtctcagccacagcgccctccagctcctccctccccacgaccaccagcaccacagccccgaccttccagcctgtctttagcagcatggggccacctgcatctgtgcccttgcctgctcccttcttcaagcagacaactactcccgccactgctcccaccacaactgccccgctcttcactggcctggccagcgccacctctgctgtggctcccatcacctctgccagtccatccacagactctgcttcgaagcctgcgtttggctttggcataaacagtgtgagcagcagcagtgtgagtaccacgaccagcaccgccactgccgcctcacagcctttcctcttcggggcgccccaggcctctgctgccagcttcaccccggccatgggctccatattccagtttggcaaacctcctgccttgcccacaaccaccacagtcaccaccttcagccagtccctgcccactgccgtgccaacggccaccagcagcagcgctgccgactttagtggttttggcagcaccctcgccacctccgccccggccaccagcagccagcccactctgacgttcagtaacacgagcacccccacgttcaacattccctttggctcaagcgccaagtccccgctcccatcatatccgggagccaacccccagcccgcatttggggccgctgaggggcagccaccgggggccgccaagccagcccttacccccagctttggcagctctttcacttttggaaactctgcagccccggctgctgcacccacacctgcacctccgtccatgatcaagatcgtgcctgcgcacgtgcctacgcccatccagcctacctttggcggtgccacgcactcggcgtttgggttgaaagccacggcttcggccttcggcgctcccgccagctcacagcccgcctttggcggctccactgctgtcttctccttcggtgcagccaccagctctggctttggagccaccacccagaccgccagcagcgggagcagcagctcggtgtttggcagcacaacaccatcacccttcacgtttgggggttcggcagcccccgctg

SEQ ID NO: 125682 - DNA, 3336 bp, Homo sapiens
gctcgtctgtctgaggagaggttgggcggggtggcaggctcctggccctctgaggccccgtgaagatcaggttcagcacaggaaagacatttcgggttaggagtacagcacagcccagggatgggagttggatggcagagatcagagaggagctgtccggggtggaagtttgcctcccatgggaagccaggtaaaaatggattcttgggcctcgctctgagactctctgggagtttgcatttcgggaggcttctcccgtacagtgtttctgatgcagcggggaaagccctattgaggcaccctgtgttttattactggcctggccttccagagatttgggcacccagagccagagtctcaggtagcagctgccctgatgaggtcttgttgaatctttccaggatcggcggccccttcattttccattggtgcgggatccaagaccctaggggctcgacagcgactgcaggcccgaaggcagcacacccgcaaaaagtagcctttgtcccctgtccctgttccccccaccccttccctaaatctggaccttggcacgtgctagaaagagccttggacccttccagctgcgtaaagcaaacctaccccggatctctggcttcagccgccagggggcagtggcagccctggggccctttcccttctggaggaagcacaagcctcagggaaggggaagcaggatgcggagggccaaagcccgggacctctacttgaacagttccactggggaggctggagaactaaggaaacacctgtacatagtgtccgctgccctgactcccgcttagcgcacccttaggcaggcgccccttccacctttccccgagagccgtcgtcgctggagggggcagggtccagcccgcctggatcggtggtgtgcacctgatgggatttgggaaatgggctatccgtaaagctttatcttgcttggcttagctgtgagaagtggttctcttcctctggtcccttctggggactctgtttccccatttcttgctgctgtgtccctcaccggttccttgcaggattccctcctttttaaatgcccttgaatctagctttgccttggagaccccagtgggtgctgctcctgccattttcttcctgccaagcctgaatcaatgtttcatctccaaccctctgccagtttggcccctcagagcttggtggctcaagactgttagcctggcagagccaggggtgaagggagaagctcttggagcaggcaggatgcccaccgctgcttcagctgcctcctcgcccagctaccctttggccccattgggccctcgtctgcctctccaggattgtatgtttcaagccttgccctgtgttcctttgtctgacgctctgtgtattgctctttgaatcgagtttggaggaagagttgagttgtatgagtggcggcatgttggtagtgccggacttcctgtttcaagttttctggggcctcgctaattgaatgtggaaagtagcaccacttgacggctacaagtgccgactcctgaattttcccatggtgttctgacttcaagggctggcagccagggagaatgggcccaggggaagcaaagacctcttccctctgccgtttctgtcccacttaactgacctcactggaggctacatcacccaaagtagatgttagaaaacctaaattaatgaaccatatttttaaaatcctatttttcccaaacagggccctctgcagcccagcctttccttccgtccttctgaaaccacataccccaggcccaagcgccttgctgccacgcccaacctctttgggagaagtatgaatgcgtgtgtctaaattaaaagaaaaaaatatttaaacgttttttaacaaaaatttatttttgtatttaagctaaattgccttttaaattccttcaagcttggttcattgaggtggttaagtataaatgctattaactaggaattagctgtatagttaagttatgcctgtgcaaagaagaggctcaaatgctgtccccggcagctttcctgggggactagagctccttctggccatgttatatgaaatgtaattcttattttataaataatgtgatgtaaatgtaactggtgccccctccccgatgtgactgagggtgagtgagtggtggtggggctgctccttcccacccctcagaacagctctgatcctcgttaatacctggctgcgtgtgcagctgaggagggagtgaacctcaagcctaaatacctgttaggattggagggtctgggtgggcctgggcctagcaatcaagcttctacctgtaccttatgtaaggtagaccctcctagtgtcagcacctgagctagtttacctcagttccgcaggcaggacagccggtccgggaaccctgagtgagtgtgagtgtggatgtgtacagtacacgcactggacggcagcgggaggctgggactttccattacaaatagagacttcattcctgttgagtctagttggaacttttagtatgaatgtgagatttttctcctgcttgtgacattaagaataaaaaactgtgatctatcgtagagtacgttctgcattttatttttgcaggcaacactttgctcaccagcaagaacacagcccaaggaagggacccaataacctttcaaaacccaaactgcttcctgcggtgagggcccagggtcctccacggagaggacaggcatcttcctttcccaccaggaaggagtcagcccggagcctctgctatgtgcaaggcggtgtgcaagcaccggctgcggctctttgctgtctcttctttctctttggggctgggctgggtgtgcgttctggtgctgatgctttggcctgtgaggctgagctagagaagtgtagatgttagatgtgccggtgccatcctgcgcctcccaagcacgcccccactcactcaccttggcacctcgacccgttcaattacagcaacgaagaagccactgctgagtgtggtctcaggggaggcccggaggcagtgctcggcacccgggaacgtgctcaggcctcggtggggccaggcaggcagggcgggagctagcctgcaagagaaacggccccaatgctgggtaagagagcagctcaccccgtcccccactccccacgaccctggcgcccgccctgtacctgaaggcgcccgggttctgctgcagcgcatctcgcaccacgtcttcattctcctcctggcagagggagcacgtggagtagacgagccgctgcagggaagggaaagtgagcgcgtggcacagggctcgctgctggaaccctgccagggcatgcagacgcaccgggctaggtgtgcc

SEQ ID NO: 125683 - DNA, 1015 bp, Homo sapiens
gagcagacagctggaggagcccggggcaggcacacctagcccggtgcgtctgcatgccctggcagggttccagcagcgagccctgtgccacgcgctcactttcccttccctgcagcggctcgtctactccacgtgctccctctgccaggaggagaatgaagacgtggtgcgagatgcgctgcagcagaacccgggcgccttcaggtacagggcgggcgccagggtcgtggggagtgggggacggggtgagctgctctcttacccagcattggggccgtttctcttgcaggctagctcccgccctgcctgcctggccccaccgaggcctgagcacgttcccgggtgccgagcactgcctccgggcctcccctgagaccacactcagcagtggcttcttcgttgctgtaattgaacgggtcgaggtgccaaggtgagtgagtgggggcgtgcttgggaggcgcaggatggcaccggcacatctaacatctacacttctctagctcagcctcacaggccaaagcatcagcaccagaacgcacacccagcccagccccaaagagaaagaagagacagcaaagagccgcagccggtgcttgcacaccgccttgcacatagcagaggctccgggctgactccttcctggtgggaaaggaagatgcctgtcctctccgtggaggaccctgggccctcaccgcaggaagcagtttgggttttgaaaggttattgggtcccttccttgggctgtgttcttgctggtgagcaaagtgttgcctgcaaaaataaaatgcagaacgtactctacgatagatcacagttttttattcttaatgtcacaagcaggagaaaaatctcacattcatactaaaagttccaactagactcaacaggaatgaagtctctatttgtaatggaaagtcccagcctcccgctgccgtccagtgcgtgtactgtacacatccacactcacactcactcagggttcccggaccggctgtcctgcctgcggaactgaggt

SEQ ID NO: 125684 - DNA, 1051 bp, Homo sapiens
gggtacagggaagtgcttgaggctggggctgcgaggcagggctggcacacgacacccaccgccaccgtgggaacggcacctgctgagccttgatcctcagctctttgtcctccgatttccgacagaaacatcctgggctctacagcctccagcccgtggctccgcgattacatcactcctctgtcttctctgttacatttcacacccttctttgattactgcttattatgttgtgcgattatggtggacaccactggcattgctgcttgggtttctagttcacagtccctgtgccttttccgaggcctggggcccacccgccgtggaagcagcctggttcgtaggaatggattcagctggagtcggctgtggacctttgtctgtgttcgctgcctcagcctgactgccattgtctttgtcgatctccggacttatttctccttgagccacggatacagcttttttctgactttgcacctctgtgcgatacatgtattgggttttcaaaatgaaatgtgagctgagctttcctatgttggcgcattctcgtttatgctaaagtgttactttttattggctccgatttgaaaattcaactacctgaacctcgtgggatcccttcgtctgtagggagcttgaagttgatctccccccatctgcattcatgcctggagaatattgattttagggcttattcctaaagtcatttcatgggacacaccctagatcaaaactttcttttttcacttgattattattaaacttgtcattatggacattttcaaacgtctccaaaggtaaaaaaaaaaaaaatgataacatgatcactacccatgtatcattacccaggcttgacagtgaacatctttctgctgttcctgtacccactctccaattttttggtagtacttaattttgaattataaaaatgccacatgccagccgggtgcgatggctcacacctgtaatcccagtactttgggaggccgaagcaggcagatcacgaggtcaggagatcgagaccatcctggctaacacagtgaaactccgt

SEQ ID NO: 125685 - DNA, 1030 bp, Homo sapiens
acgttgtagcacatggagaggaagatgatggggcgctcggggtactggaagcggtggggctccagcaagaaggtgagcacagtgaaggcggtggagaagaagcacagcgccgaccacacggccatccagaccagcgcgaagtccttgtcgcgccgggaccagaacacctcgacgccgggcccgcagcgcggtgcgcacgagcggctcttctccacgtactggaacttctcggggttctcgcaggtgccactgccgcccgcgcccgggcccaggtctccgggagggcgcgcgggccgcggcgccacgggcagcatgcccaggcccttgtggggctccgcggggccggccgtggcgttctcgggcgcctccatgcacagcgcgtgcgggtcgttgcgcgtgggcagccgggcgcagtcgagcgagtccggccagccgaagttgaactgctccatgatgggcgcgcagcgcaggcgcgcctgctcgcacatgggccggcaggcgggaatgggcgtcgagacctggtcggtgcacatgggcgcgtagagcgagcacaggaagaagcgcaggtggctgtggcagccgtactgcaccagcggcgcgaactccgctagctcggcagccgcctcgccctgcgacgtgtggcccagcaggttgggcatgcgggtcaggttgtagccgatgccgcggcacatggggatctccaccgcctggcacggcgcagccccgcgcccgcgctccgggtcgaagcggccgatctccagtgccgcgccgcccgccgccagcagctgccacagcagcagcgccccccgcagaggcgccacggccatcccgggaggcccgggccgaaggcgggagcgcggccccggctcactcgggctcagcggtcccgcgccccggtgcctgcccgccacgtcgcggggcgcgggccatcgctgagccgcccacgtgtgtccgggcgccctgggcagcgagcgggcagccgcccgagggacaggagccgccgagcccgcctagccgccaccgccgctgc

SEQ ID NO: 125686 - DNA, 1288 bp, Homo sapiens
ggcaccaacacagagaagctggagaagctcatggtcaagatcggggtcttctccatcctctacacggtgcccgccacctgcgtcatcgtttgctatgtctacgaacgcctcaacatggacttctggcgccttcgggccacagagcagccatgcgcagcggccgcggggcccggaggccggagggactgctcgctgccagggggctcggtgcccaccgtggcggtcttcatgctcaaaattttcatgtcactggtggtggggatcaccagcggcgtctgggtgtggagctccaagactttccagacctggcagagcctgtgctaccgcaagatagcagctggccgggcccgggccaaggcctgccgcgcccccgggagctacggacgtggcacgcactgccactataaggctcccaccgtggtcttgcacatgactaagacggacccctctttggagaaccccacacacctctagccacacaggcctggcgcggggtggctgctgccccctccttgccctccacgccctgccccctgcatcccctagagacagctgactagcagctgcccagctgtcaaggtcaggcaagtgagcaccggggactgaggatcagggcgggaccccgtgaggctcattaggggagatgggggtctcccctaatgcgggggctggaccaggctgagtccccacagggtcctagtggaggatgtggaggggcggggcagaggggtccagccggagtttatttaatgatgtaatttattgttgcgttcctctggaagctgtgactggaataaacccccgcgtggcactgctgagtcctctctggctgggaaggggggaaggtaggagggtgagggccctgcaggagtctttcttgtaagcagagctggcagtgggtgctggcaccccccaatcaggaggaagtccccccggaacagctgtgcattgcaggagtcccagacaccatgtgtgcgtgttttcccctcccgcccgtctctgtgcttccaaatggagacagggacgcctgcggatgttcagggaattccccagggtgacactgccacctctggccccagggagtccagtttgaggctatggatgagttttccttctctgggaacttgctctccttattggcgtggaaagtaaaggtgtcagcctgtgtcaatgttgtcacgaggaccgcctccctggggccttggaaaattgctggtgcgtctgcctggctcctcggggcccccaccagggcagcccccaccagggcagccccagcctgctccctggc

SEQ ID NO: 125687 - DNA, 2252 bp, Homo sapiens
aagtttcctgataggcttgctgaagatgaaggggacagtgagccagaggccgttggacagtccaggggacgaagacagaagaagtagagaggcagggccgtggtaagggagctgaggtggggggacagctagggagggtgggagggaggcgagcgaggaagaccaagaacctggaagagatcacagggagtccagaaacgcctgtcatcccaagcttatgctgtttttctaaaagctctttatggggcttgatattgggttggtggtctttgtccagaaatatgaagggacaaagagggccataaccctcccttctgagagtttccaggaggagtccgagggtctagcttttctggtgaagccagttcctgttcctgccttctttcctaagggcctgctcgctctggcttccaccacagtgccaagcccctctggtctccaggggagggattgctgtgttacatagcaggatcggggtaatcaggccaacaggggagatggtggcgatttttcttttttaatctgtatttattatacagtcttgtttctttaagcccatactctgtctcttcccccgtcttcctctcaggtgacagtatcagtgagtgccatacagaattgtgtattcaccagcatcatgaaacagttgtggtcttttgagttgatcttggcagagtaaagggacgtgtcctggagccattcctgaatctccccttctttgtgacagctcctcccacccccccaaaaaataaaaaaaccacaaaaaacaaaaaaacaaaactaaggcacttcacttagagactggagtcctgcttataatcatgcatataacctttactttgatggatctggccagaggggtgttggagcccagcccacccacataccagtcaagctcttaggggagcagaagaaaagcaggaagaatttaaatgtttaattttttttttaaattgacttttctagttattaaaagttgcttgtttcagcagtgatattgtataaagaacatcttgtaagatactcctgacatcttgctttagcacatgtacagtacagtttctatgataatgtgtttgctctaacttccctggcttctccttcagcccatccactctcctctagagcagttgggttggaggctcattgaggcaagcagcaacattggagggggagcagggcagtgctgtgtctgctgcctcccatgcccgttctgacctcagccttggaactcctcaagaacctgaagattccagtggtcagtgtcggtggggggtgggaggagagagcggcagagaagctctgagagccccttcccccacaacaaatctagctctagttgttatatttaggcaaaactttgtagtcttctttcccttttatgatggattttgataaaagtacaaaacagggtttttcttttttatcacctttgaatttggaaattttgagcacccaagctcttctgtacctatttaaagtccaccaaggggactgcagctcctagaacatgagaatcaagcctcttaattttaaactgcggaatgtggcctctgcttcctccgtcctcctgcccaaggacgacgaggattgctccagggctgctgggtagtttaccgtcccttctataggcatggagttggcactgacatcacagcttcataaccccaccaccgccagcttcccctgcctcctacatccagtctgttcttgttcatagtgagaatcctgtgttcccacttcagtgacacctgaattgtttgttgttgttttttttttttattgtcttcaaagaggaagggccccattaaagggtgaacttgtaataaattggaatttcaaataaacctcatgtacttgtgtttataaagaagaaaccactctggtggctgtttgtgctctttcttggtgggtgggggtgggtagtgctgtcccgagtgctgctttcccactgacccttggagccgggtcctctgaaggcttggcctccagagtcagggcctctcagtgttcttaaccacagaaagaagtactccctccaagcctctcctggccctgtctccgtctaaaaccctgaaaaacttcatttgaaactaggaattacggtgaaaataggtttttaagccttcactatggggaaattctgccattttaaaacctttctcagggaaaaaaaattttggggaggggggcggtggggacagtctcactccatcacccaggctggaatgcagtggcgtggtctcagctcg

SEQ ID NO: 125688 - DNA, 1045 bp, Homo sapiens
tgagcacctgttgtaaacctgagacacaagtagtctcagtgcctttgtgtgtgtgtgtgtgtgtgttttttttcttttgtgagatggagttacacccttgtttcccaggctggagtgcagtggcgtgatctcggctcactgcaacctccgcctcccaggttcaagcgattttcctgcctcagcctcctgagtagctgggattaccagcatgtgccaccacgccctgctaattttgtatttttagtagagacggggtttcaccatgttggtcaggctggtcttgaactcccgacctcaggtgatccacctgcctcagcctcctaaagtggtgggattacatgtgtgagccacaacgcccggcctatattctttattctctcattggggatcctgggcagggctcttatggaggggactagccctaaattgtatttaatgaggagccttgtggcccttcatggaagtaccagcttttctctggaaagattctgatggtaagtgtagaataactctgggaattacaacatagggtttgttttacaatccagttccatcttacatgtaaatacatccactcgctcaggctgagcttgggctgtgggaaatccaggctgacctattagcaaatggcttctcatgagtgagagtttacagttgattcctgcaggggccttatggctgggagtaactgcaggacggggcaggacagaagtactgaaggacctagccctctgaagggctttggcagtggatgaaaggcacccattcttcatcggctgccactgccttttagtgtcctgttaggtaaggcaagataaaatagcaagagcaccttaaaaccaaaggaggccactgctttccttgtccaggaaaaggattctccctgcatccctttcccccatttcgaagatgctcctcccttcaccttccgttgttctctgctgaatccatagtttttctttcagtgagacctcgaaagaccatccggggcaagcacagcgtcatcccccctgcagcaaggtcaggccggcgcccgggtaagaag

SEQ ID NO: 125689 - DNA, 1390 bp, Homo sapiens
gaaaaagccaaagaacgaagagagaaagaaatgcttgagagattagaaaaacagaagcggtatgaggaccaagagttaactggcaaaaaccttccagcattcagattggtggatacccctgaagggctgcccaacacgctgtttggggatgtggccatggtggtggaattcttgagctgttattctgggctacttttaccagatgctcagtatcctattactgctgtgtcccttatggaagccttgagtgcagataagggtggctttttataccttaacagggtgttggtcatcctcttacagaccctcctacaagatgagatagcagaagactatggtgaattgggaatgaagctgtcggaaatccccttgactctgcattctgtttcagagctggtgcggctctgcttgcgcagatctgatgttcaggaggaaagcgagggctcagacacagatgacaataaagattcagctgcatttgaggataatgaggtacaagatgagttcctagaaaagctggagacctctgaattttttgagctgacgtcagaggagaagctacagatcttgacagcactgtgccaccggatcctcatgacatactcagtgcaagaccacatggagaccagacagcagatgtctgcagagttgtggaaggaacggcttgctgtgttgaaggaagaaaatgataagaagagagcagagaaacagaaacggaaagaaatggaagccaaaaataaagaaaatggaaaagttgagaatgggttaggcaaaactgataggaaaaaagaaattgtgaagtttgagccccaagtagatacagaagctgaagacatgattagtgctgtgaagagcagaaggttgcttgccattcaagctaagaaggaacgggaaatccaggaaagagaaatgaaaggtaaaatttcatgctgagagaaaaggggaagctctgtagaagatagtaaaagaaaggaaattactgaggtaatggtagggtctctgtttgtttacttatttctgtatgtaataacccagcacctattggtatgtattttattttttattagttctgttgataatttcatatttcagctggagtgttcagcctggcattctgattagttaataagttaatgtgatgttggcatcttttctgggttcagtaaaggaccaaatctacaaatagaaatagtggaaacaacataggacttgggagttgactgacctgggttcaggttctagctctgacttagctgtacagtgttcctttgggcagattacttatccgtgcctcactttcctcatatgcttgataagattgttgtaaaattgattgacaaggtatttgaagcccctagcacggtcaccaactcagatagtaatctgtcct

SEQ ID NO: 125690 - DNA, 1411 bp, Homo sapiens
tgttgctcttttctggttagtcccttctgttgaaaaactggatgttcatatctgtgagtgccattgatgtacttagctgattttggtaataaaaatcaagtattctagagttgatctagtcttttccctaatcacataaagcaacagttttcttctgaaatgggctgtattttggattacttgacttggttatttcaattagtttgcattttagctaccaggcatttttctttgtaattatcttttttaaagcattccactcaaagagtttggtttttctttttttcaatacacatttaaaaagagaagcagtggtatcatgacaaatggaccggactgtaacctgttaactgattgtatatgatggagatgaggcatgggaggtatgaggagatgagatgtgtatcaggagagtgggaacatgagtggactaaaggaacatactgtgtttgctaggtgatatggaggacccgtttgaggtgcctggcaatgaatttaaagtgagaccactcactttttttttttttttttgaggcagagtcttgctccatcgcccaagctggagtgcagtggcgtgatctcggctcactgcaagctccaccttgcgggttcacgcctcagtctcccaagtagctgggactacaggcacccgccaccatgcctggctaatttttttgatttttagtagagactgggtttcaccgtgttagccaggatggtctcgatctcctgaccttgtgatcagcccgccttggcctccgaaagtgctgggattacaggtgtgagcctccacacccagctgagaccacccacttttatttatcttttattttagccgtgtttcagctgaacatatgcagggcaggagtaaatagagtgagttaatcagggttatggtttttccaagtagatacaatagaataagagagacaagggaactataggtttatgtgagattaattatcatgattgactaaaatttaatctgggtaaagcaagacatgggggttaggatggtgaaaatgtaatagaattaatggatttaaggttctggtgagattgaaggattgtagagttgtgggactggagggagtggatttggaacataagagggtatgttcaaagagaggatggtgtgaaattagttgtgggaatgagttctttttttttttttttttttgagacgggggtcttgctctgtcctccaggctggagtgcagtggtgtgatcctggctcactgcaccctcctcctcccgggttcaagcaatttcgagcctcagcctcccgagtagctggggtgacaggcatgtgccaccatgcctggctaatttttgcatttttagtagagacggggtttcaccatgttggccaggctggtctccaactcctgacctcaagtgatctgcctgc

SEQ ID NO: 125691 - DNA, 2902 bp, Homo sapiens
ttttctttaaagtctcgctcttaaagtttgtttgttgtgtatggctgggcgtagtggctcttgcttgtaatttcagcagtttgaggggctgaggtgggaggattgcttgagcccatgagtttgagaccagcctgggtaacatggcgagaccctgtttctacatacacaaaaaattaactgggtgtggtggcgtgtgcctctagtccaagctactttggagatggaggcagggtgatcccttgagcccaggaggtcaaggttgcagtgagctgtgatcatgccactgcactccagcctgtgtgacagacagagtgagaccctgttttgggtggaggaaaaaaaaaagtttgtgagttaggggttagaacagaagtactttaaaaggtaaattatattgttgaaggaatggttgctagaagaaaaaaaatgaaaagtaagttatattattttgagaacactttaaatatattttatagtaacaaattttgcaaacttgctaataaaggcatgtggaaattgagaaaagcccactatttgagtgttgtcctcagagttctaacatgttgccctgggtgaatgagaacagtgagataagaatcaatatggattgccaaggtttgctaattcagggttttgctgcctagattatattgcttattattaagttgtgtgcagcatctgaatgagctgctacaagtaatttctttaatttttatcctttttttaatcaagaaacaggagttgcagacagatatttgtggttgtggtgagtttcaagtgacaggaacaaatgtaaaattgtggacgctctctttttctttcaaccttccatgttgccgagacagtcataaatatttttttctgtttagcaattaggaagggcctttggcaaaaattatactgctggtaatccaggtgtcctttcttctccctccccatctgctagtctggtagattaactgtgctgagtgggggatagggagcactgttagcacataagtggttttatactttttcagatccccctgagtccagccatgccggctcccatttggctgtgactgcccagcatgccccatgctgagatgatccagttactgaaggactgctcacgtggggagccggcctattgggagggggttgggtgagttcatttctttcatttttaagaaaaaaacaaacaaaaacatggtgtggcttggcacaaaaacacaccttacgaataaaaatgggttgctagaccctcatggctaagccatcccaccattttcttgtatcatttcttcatactactatgcttctaagtggaagaagtttaaagaacctcatgtaaaatgtgagtgatttttcttttaaaatagaactataatcagtaaataaagaagtgtcccagttattgtaacagaccctattaaaacatacctatttaaaatgctaaaaatgaaacttagtctcctttttagcgataaatttcattttaggatgactttaaatatataatctgttgttctgagcattagaaaaaatgtccgcctgtatgtgtgtactctgaagattttccaaggctgactgaagaaggttgttaactttttgggggcacacatttgttcttatttcctgccagggtagtaatgggtcttgctctgcaatttggatggtctctgccatattctctttggagtactgatagtaattactgtgcatgaagagattggagtcttaaataagttatcttggcttattcttcctagcattttgaaatacagttctgggaaactagaatgaggaaattctgcatctagggaaagtaatcccggagtcatggatagggtttatatgttgtaaagctataaagcctctttgtcagcccattctaaggatggttattggagattggggaacaacacattccagtttctttttgtttgtttgtttgtttttttgagacagagtctcgctctttctcccaggccagagtgcagtggcgggatctcggctcactgcgagctccgcctcccgggttcacgccattctcctgcctcagcttcccgagtaactgggactacaggcgcccgccaccgcgccaggctaattttttttgtatttttagtagagatggtgtttcactgtgttagccaggatggtctcgatctcttgacctcgtgatctgcccgcctcagccttccaaagtgctgggattacaggcgtgagccaccccgcccggcaacacattacagttttaatcaggcaacaaaaagggcagaggaacaataacctgcagttgcctggaactcttcaaaggccagttggcctttgaagttagatagcttagccaaaagagggatttgttaagtatatcctactcagtgtaggccatatttttttcctctgcgtgtagccatggttctgtgggctcgtttctctcattgtatctttaatgtttaaatctttttttttttttttttgagatggagtctcgctctgttccccaggctggagtgcagtggcgccatctcggctcgctgctagctccacctcccaggttcaggccattctcctgcctcagcctcccgagtagctgggactacaggcgcccgccaccgcacctggctaaaattttttgtatttttactagagatggggtttcactgtggtctcaatctcctgacctcatgatccgcctgcctcggcctcccagagtgctgggattacaggcgtgaaccaccacgcccagcccctaatgtttaaatcttaattggggtctggctgggtggctcatgcctgtaatcccagcactttgggaggcggaggtgggcagatcacctgtttgagttagagaccaggctggccaacatagtgaaaccctgtctgtactaaaaatacaaaagttagccaggtatgg

SEQ ID NO: 125692 - DNA, 1049 bp, Homo sapiens
aaattattctccgttttctgtctctcagatagggtctcactctgttgcccaggctagagtgcattggtgtgaccatagctcactatagcttcgaactcctgggttcaagtaattcccctgcttcagcctcccaaatagctaggactattggcgtattttgatttttgtacacagagggtcttgttatattgcccaggtcgatctgtaactcctggcctcaaacaatctttataccttggcctcctgagttgatgagattacaagtgtaagaaaccatccctggcctatatatttttctttctaatttgtagccctgttgatatagatggaattttgatttttctggagagaacgtatattgcttgttctcatttgggtaattactttttaccccagtggtgagttatttgtttctttttaacctagatcatcagtaacgtgccagcagacagcttgattcgtacagagcgcccaccaaataaggagatagttcgatactttatacggcataatgcattacgagctggtactggtgaaaatgcaccttgggtcgtagaagatgaattggtgaagaaatactctctgcccagcaagttcagtgactttttacttgatccatacaaggtaaggtcactgttaatttttggacagcaggataaagcatcattatttctctgatggctccagtatatttatatttatagcaggttttgaactctaacatcagataatgaattaaaaatttttcaggtatatctgttacatacaggttgttatgtgaggttggtaggggagaggccacatttaatatcttccccagttcaatttattttttattatgctagcataattttaaaagtctatatacatgtgcttttgtgcctcagaccctttttggaatgaggtatggtataaatataaaaagtattttgttaaccagttaccaagaatgaaaactgattttgcatgtcggacaagatgatcacatacagtggcagccttgaaaagaacctggaatgaggagcagtgtgtgtgatagattagtggaa

SEQ ID NO: 125693 - DNA, 2180 bp, Homo sapiens
gttcaggctggtcttgtactcgtgagttcaagcgatcctcctgccttgacctcttttttttgaaacagggtcttactctgttgcccccaggctggagtggagtgttgtgatgacagcttagtgcagcctggacctccttgtggcctcggcctcatgctgaattacaggtatgacgcactgtgcctggctgtatacacaggtttttgactgcgagaggaggagaggtcagagccctaacccccatgctgttcaagggtcagttgcacttttttctctccataatctgtaatctaagtccctctcacacgggagcaggtaaaatcctgaaactatgatgtcctagggacctggagactctaacaataatgtttttaaatttgaacaattgagatttggctcactgggaagaccgttcagcctctgaggccttcattaataaagaatttgactggacttgattattgttgtctccaaaaatgtaggtgcaccaagtgtttggtgtgtattggtctccctccgcatgagtattagaggatcaaatgttagcttactatttaactggtacaaactttgcattagaatgtgatgttgtctgtctcccattctattttgtgtgtctagatgttttggatctgtgcagatggtttttgaggtactttcttaatgtagttcgaagcaaacttctgagagtgtcattgtagttggtccatcccaagttgttgatacttcagtttgttttctcctgtattgtgaatgctaacgtctgtattttccagtttccctcttctttttgatactgaagttttgtaataagggcattacttgcaattccttgaggttgagaagtgttttggttaggaatattctctctgctttccgaacatcagttttattgtggtcttacttctgcctctatattcctgaaatagttcctattaagtttacaagtgtcctcttaattgtcaaaagcagagatttcttcttggcctgtgttggacttttctgttatatttattaatatttatttattttttaacgtttaagttcaagggtagaagtgcagggttgttgcataggtaaacttgtgtcatagggcttggttgcatagattaattatttcatcacccaagtgttaagcctagtacccattagttgtttttctttaaaaggcctgagtgtgtgttgttcccctctatgtgtccatgtgttctcatcatttagctcccacttacaagtgagaacatgcagtatttggttttctgttcctgtgttagtttgcaaggataatagcctccagcttcattcatgtcgctgcaaaggacatgatctcattcttttttatggctgcatagtattccatggtgtatgtgtaccacattttctttcttgtgtccattgttggcatttaagttgattctgtgtctttgctattgtgaatagtgctgtatctgttacatttaatactgttggtcactcatatctcttagcttgataccactgtctcctagtgctccagctattcggtttctttacttccttccttccctgccattcctttgactttttccataggattctattctttgccttctgtttttcagtttgcatagtgtaatgttatatgctattcatggcacagtttgaattcttaactgtttgtagcctggtgatttccaagcctgggtcagacttttaactgtagacttgatctttacttgcctgtcctatatgcaatttatttatttatttatttatttttgagacggagtctcgctctgtcacccaggctggagcgcagtggcacgatcttggctcactgcaaccttcgcctcatgggttcaagtgattctcctgcttcagcctccccagtaactgggactatgggagcacgctaccacaaccagctaattttgtatttttagtagagacggggtttcaccatgctggccaggctggtctcgaactctggacctcaggtgatctgcccaccttggcctcccaaagtgctggaattacaggcgtgagtcaccacgcctggcccctcctttatgcagtttagattcaacatgtgtaaagctgaattgacttcactcttcttgtatcccaaggcaggtaaacaagaattgttctctcattcttttacttggctcaccgtccatccacctagtgtctaaggcaga

SEQ ID NO: 125694 - DNA, 1233 bp, Homo sapiens
tccggaggctgaggcaggttagaatggcttgaacccaggaagcggaggttgcagtgagccgagatcataccactgcacttcagcctgggtgacagagagagactgtgtctcaaaaaaaaaataataataagtaaatacatacaaaaatgtaaattcttgaactgtattcacatattttaggctggtacagtgattgccctttggccttgtatattggcattttacatgaatcatgaacctagattgtgatcatttatttcatttttttaggctgtcatatttcaacctagaagtctgagaaaaaaagttgaaaacacttcattgtacttggatactttactgtttcaatcaccttttgttagttgaggaggcatgtatattggatgatatgttctaaacatcttcaggtttctgggtgtttattatctctgattttctctactacctcctttataggttgggaaggagaaaatgctcaaggtgaagattgtgaagattcatcctttggagaaagtggatgaagaggccactgagaagaaatctgatggtgcctgtgattctccatcaagtgacaaagagaactccagtcagattgctcaggaccatcagaagaaggagacagttgtgaaagaggatgaaggaaggagagagagtattagtatgtttgatattagctttccttagtgttttatgagatcctgtttattttattatgaacacatcttttagggttctctagcaactaaatgtgtgattttttatgtagacatgattttgttcatttatgattcatagaacaactaaaatgtccacaacatgaaacacttgaatatccctaaataattaagaccattgggaagtcgtttcctctagttgcttagaaagctctatgcagggctgggtgccgtggctcatgcctgtaatcccagcactttgggaggctgaggagggtggatcatctgaggtcaagagttcgagaccagcctggtcaacatggtgaaaccctgtctctactaaaaatacaaaaattagcggcttgtggtggtgggtgcctataatcccagctactcgggaagctgaggcaggagaatcgcttgaacccaggaggtggagtttgcagtgaactgagatcgcaccattgcactctagtctgtgccacaagagcagggccacaaaaacaaaactccatctcaaaaaaaaaaaaacaaaacacaaaagctgtgtgcacattgc

SEQ ID NO: 125695 - DNA, 1060 bp, Homo sapiens
gtctcgatctcctgacctcgtgatccacccgcctcggcctcccagagtgctgggattacagatgtgagccaccacgcctggccgcctagctaagttttttattttttatagagaaacagggtcttgccatgttgtccaggctggtttcagactcctggacttgcatgatcctcccaccttggcctggcaaaatgctgagattacaggcatgaatcactgtggctgaccattagtgggttctaatcacatactttatatcagtcagtgtcctggcaggaaacagatggcatactcaaatgtaattgaattgagtttaataaaggggctgttgacagcagacagcagtctgatcagggttaaggaaaacttaacaaggaaaggttgagtgcctcatacctatcagcagttggggaagactttatcatttctaaaccccaaggaagcagagggagggagtgggtacaggaactagaaaagagtagctgctgttgttgaagagtactatggtagtgagagaaaactgtaactgtaaccatcctcctagggaggcatttggaaataaacaccccaaggatgctttacttccatctcctggttttctgctcatgctccctatgaactgaactcaccagaatctagagggcaaggggagtcttggtggaggctgtaaaggtcagcctatttaagcatagagccaggtagagaaggatggaaatggaattgacatggcaaaacgaaaatattttgcacacatctgcaaggtgaaagaagaaatgtttgaggaaagatgggctgaacccaatggctcctgcctgtaatcccagtactttgggaggctgaggcgggaggttggcttgaagctaggagtttgagaccagcctgggcaacatagggagaccctgtttctacaaaaaataataaaaattggccgtgcatggtggtgcatttctgtagtcccagctacttggaagacaggcaagaggatcgcttgaactcaggagttcaaggctgcagtgagctatgatcgcaccactgtactccagcctgggcaacatagcaa

SEQ ID NO: 125696 - DNA, 1023 bp, Homo sapiens
atctcgctctgtcgcccaggctggagtgcagtggtgcgatctcggctcactgtaagctccgcttcctgggttcatgccattctcctgcctcagcctcccaagtagctgggacgataggcaccagccaccatggccggctaattttttatatttttagtagagatggggtttcatcgtgttagccaggatggtcttgatctcctgacctcgtgatccacccgcctcggcctcccaaagtgctgggaatacaggcgtgagccaccgcgccctgcccaaaagttaagtcttaaaagaggttaggtgcagtggtgcatgcctgtggtcccagctacctgagaggtaggaggattgttcgagcccaggaggtggaggctagtgagctatgattgtgccactgcactccagccttggtgacagagcgataaatgtttgaaatgtttggaaaagaaagaaagaaatgtttgaattgacttgaattaaatctctgggtaggtgtttctgtgttttcttgataactaattacatttatttagtttgaaggaggagtttcctgcctggtatgagaagcttgttctggaaatggttcaccataacacagcctccttagagaagttagtagatactgcttggttggagatcatgaccaaatatgctgtgggagaagagtgtgacttcgaggtgagtgcctgttcgtttctgatttgacttaccatcagaattagagctgtcatcgtaggttacagaacacatttctatgtgtgtaaaactgtgttatatttagtattatatttaatgttaagtattaatactttacgttaatacttgtgtgttttcttggttttgtttttttgagatggagtctcactctgtcgccaaggctggagtgcagtgcgcaatcttggctcactgcaacctcattctcccgtgttcaagtgattctcccacctcagccttctgagtagctgggactacaggtgtgcaccaccacgcccggctagttttttgtatttttggtagagacag

SEQ ID NO: 125697 - DNA, 1357 bp, Homo sapiens
atgcaggtgcccagcccatgacaatccattctcattatacttcagtcttagtcatcttgctttgggccctgattccatttttttcatttttttttattttttttagtttttgagacggagccgcactgtctcccaggcttgagtgcagtggcgtgatcttggctcactgcaagctccgcctcccgggttcacgccattctcctgcctcagcctcctgagtagctgggactacaggcgcccacaaccactcacagctaattttttgtatttttagtagacacggggtttcaccgtgttagccaggctggtctcgatctgacctcgtgatccgcccgcctcggcctcccaaagtgctgggattacaggcgtgaaccactgcgcccggcctccaattccatttttatcctctcatgctacacattttaaaaaggagactagatttttttctgtatataagtatcttatgggtatgggtttgtcgtctctgttgcttgcatattgttttcctgaactactgccaacagagagtatgaagcccgcttggaaaggtacagtgagcgcatttggacgtgcaagagtactggaagcagtcagctaacacacaaggaagcctgggaggaagaacaggaagttgctgagctgtaagtaatggaagtattgctctttgccaccatcttcacattgttaggaaaggagggaatattaaccctaaagcagtatgtgtatttaagtttatggggcacaaattagactatattacattagtgtactgtatgggtttctgggttcctttgcctaatggcattttgcagtagcaatatggaatatttatttagttataggtgcacttgtttaggtatttaccaggcctttgagtgttcctgctccatactttgaccttgtaagtactctggtaatgtggtttattcttttttgctttttctttttttgagacggaatctcgctctcgcccaggctggagtgcagtggcacgatctcggctcactgcaagctccgcctcccgggttcaagtgattctcctgcctcagcctcccaagtagctgggactacaggtgctcgccaccaagcccggataattttttgtagttttagtagagatggggtttcactatgttagccaggatggtctcaatctcctgacctcgtgatcctcccgccttggcctcccaaagtgctgggattacaggcgtgagctaccgcgcctggcccttattcttatttttatttttgagatggagtctcactctgttgcccaggctggaatgcaggggcacgatttcggcccactgtaacctctatctcctgggttcaagtgattctcgtgcctcagcctcct

SEQ ID NO: 125698 - DNA, 1267 bp, Homo sapiens
acacctgtaatcccataactttgggagattgaggcaggaggactgtttgagcccaggagttcaagaccaacctgggcaatgtggtgagaccctgactctgcaaagataaaaaatgtaggtgggcatggtggtgtgcacctgtagtcctagctactcaggaggctgaggcccaggattgcttgaccccaggaggtcaaggctacagtgagccatgatcccaccactgcacttcagcctgggtgacagagtgagaccctgtgtcaaaaataaatacataaatagataaaaatgagctagatgctgcagtgtaagtctgtaatcccagctattcaggaggctaaggtaggaggatctcttgagctcaggagatacaggccagccttgtttccaaaaaacaaaaattagaatatttgtttatttgttagatagtattgtagaggaaactgtttaaatacttttatttcaaccactataaaatgtgtcacttggaatatacaggtattgttcactaactttctacttatgtcagttgattttcttacatagcatctgttgctgtgcttaaaagtaaattagttacttgccgtttgaatttggaagtggctggctgatggtgaattccagttggttttgtgtggaaagttgccatatttacactaccaacttgatgtttttctttccctcgtctccctcacgaagactgtctaaacggctagtaaatgatcttctgaatctcagtattattggagacatcatagagactggataaatattatatcaaaagtactttccggaatacttctaagtattttatgaaatttattttttaaaccagggtagccaatcttttggccatattggaagaagaattgtctcgggccacacataaaatacactaacactaaaaacagttgatcagctaaaaaaaaaaaaaatcacacaaaaaactcataatgttttaagaaactttatgaacttgtgttgggctgtgttcaaagccgtcctgggccgcaggttggacaaaggttggacaagcttgtaaaccctaagaagtaacatgtttccaaggtggactggagggctgtgggtaaatggatcattaatgtatgctcaaggttattccaaactgcctgtgagactgtggcctagtcacctcattttactgtagactgattcctttttttttttttttttttttttttttttgaggtggagtttcgctcttatcacccaggctgtagtgcagtggtgccatctcggctcactg

SEQ ID NO: 125699 - DNA, 1271 bp, Homo sapiens
gggctcactgccatctccgcctccagggttcaagtgattctcctgcctcagcctcctgagtagctaggattacaggcgcgtgccaccacgcccggctaactttttgtgtttttagtagagatggggttttaccatgttggccaggctggtctcaaactcctgacctcaggtgatccgcccatctcggcctcccaaagtactgggattaacaggcgtgagccaccgcgcctggccagtaccctactttttaatacattcgaatcggcagtggagtagcaacttgtgagaatccgacatatacttttccaatgtcattaatgttttgagccgttgatggatgctcacacactttcagatgatactttctcaggtctggttctagcagagtataagaaacatgccatagagaagagacaatttctaagtatatttcaggtactgagctatgtaaaaaatggctgtaggaagttaatttaggactggcaacgcaggctttttcatattattgaatgaatgaaattgaaatatatatatgaagagttttgatggtaacaatttaaaactgaaaccggaaacattttaagtggtatgtatttaataaacattcttcattttttaatttcccataacagcatttaaaactgttttaacaaaagaagtcttaaaacatattatatattggggggaaattgctctttcgggaatttctgcaagtggaagcactttgaggatggtttttaaacaattgtactgtatggttggcagattggcatatttctttattaggctattagtggtttcatagaggagaacaaatatgtggttaggtaacagctgcctttgaagtagtattcccagttctcaacttatatttacaattatgtttttaatgggacttgatattttaattttcttttaatacctaccttttgattgcatgtatcacagaactttgtgtgatattttactgacttaaagctgtatgttggtatgttcttggagtatattgtgaatcttcattaaacttagtggaagttgtgagtaatgcacacatttaatgactaggtgttaaatattggtgattatgttgattgtactgtagctttgtatggtacattacttcctaaggtattcccacaggcaggacactagatcttggaaaacactaactttatcagaatcagttcttgatgtgacactgactgtatttaagtcaagataggttttaggcaggaattggagctacaagcagcgtgttgtagatgagtatt

SEQ ID NO: 125700 - DNA, 1073 bp, Homo sapiens
gcgcgccccggccgctcgcgggcctggaggctgagtctcagcctgcgcccgccgatccttccaggggatccggcggggggcgcgcaccggccctggaaggagaagggcccgcttcggccgcccccggggccccgcactttgtcccggggcctcgccggcgaggagcgcatcccccatccccattaccttccccgggttggctttaggccttgaggacccgagagggaggaggaggcgtggggagggggagctaggttttctcctttaatttttacaaaaattttttaaaaatttaaatgaaacctgcagcttaagttttgaaattgtactcgcgcggcctcgtgatgcggcgtgtgcaagactcaactgcgtcttaccccgatctctgcggggatacttggcgtttttttcgtctcccgaggggactttaggccggggatgaactgacaggaccctggggcagaaaactaggaatgagattccccgcttagaggaaagggagggaaggaaactgcctgtggaggagctgatgcctgccttccctgggcagacacaggtttgaaattttgaaggtttagaaggagattggtatttgttaaaattaaacaaacaaaaaaaccaagacgtgaagtttttatgttgtattttaggaacatgaaattggatgttttacaaaggaagcatcctctcgtcatgactaagatttcttgcataagcattatcttttagtgaaaagttgtgcagcttttatttgcttttttttaatgggtgccagaagaatcgtttttgaggcttatctgtaaaaaaaacaaaaacgatttcggaatcaagcatttctttggtgactgaaagctttaagagtgaaggctaatgtgttatgagttttctcagccccttctgttcggaaggacttcatttctcagtttcttgcttgcttctgtataggaggaagtgtctctcagagttatttcatttctccctgatcctcactttaacgcagtactttagaggataatctcattcttgttggagtgcaatttgtgagtgtccctttgtggggagtatacacacaa

SEQ ID NO: 125701 - DNA, 1037 bp, Homo sapiens
acatagccagtctagtaactgttggaatgaatgtcactttaagtccttctattttcagcatttatgctgtctgcattacatgctaaatttttttcttttctttttttttttttttttttttttaaagagatagggtcttgctctgttgcccaggctagaatgcagtggctgaatcctagctcactgcagtcttgaactcctggggtcaagtgatcctcttgcctcagactccgtagtagtaggactgtaagcctttgccaccatgcctggctttcttttaattttctgtagaaatggagtctcactatgttgcccaggctggtcttgaactcctgggcttcaagtgatcctcccacctcagcctccagagtagctgggattataggtgtgagccaccatgcccgacccaggtttcttgttataatatggatatatagatgtgtcttaggcccttgttaccttctcctgtgctgtgacctgttaacagccaactacaaaatggaacttgtttctccatgggaaatgccaattgtagttaatatttattgtgttcttactatttggcatgtgctgttcttagctcctgtgttttattacttcatctcgtcctcatagcaactctcagaaaactgggagattgagttagagttgtgatgtttgggctagaggatgacaagatgagctgctttgtcggttccagatatctccagcccagcagagatggccctctgcagtctagccgtattttgcccttccaccattcttggctgtgacctggtccagctgggccctgaatgaatgtttgcttctcaggccagtattctcccctcctcaccaagccacctccacacagctctaaggaagctcccccaggtccaggcctcaggggagccctgccctcaggccgaccctactgccttttcagagccctccctgccctcctcggaagttgctgatgaacctcctaccctcaccaaggaagaaccagttccactagagacacaggtaagcaatcactttgagttttccagtttttt

SEQ ID NO: 125702 - DNA, 1164 bp, Homo sapiens
gacctcttttcagttcatcaagttcatcagatatttgagtgcccactctgtgcccaaataaatatgagctggggattaaatacgaataagacatggtttctgccatcaaagatggctggtgggagagagagatacacccttattaagtgctttgtgttagtttattcatagctattgttatatatgtcaaggcaagagaggaccagagcaggacagaggcaatgggtattgaagttgaaggggtacatttgataagagagtcggtattgagaagtttaaatttgtgaatttgaaggctgcgtgggtgtggcaggtaagggaaatgaggtatctgggaaggcttgagtgtaggcaaatttattcatcccaagtcaaactcttgatctctctcacgaaaactatgaccccccctggttgcccctgacctctcaatgttggaacaagccacaaccgtggagttatccttgatgactccccattcattatcccttctgtcccaccaccacagctgtcatctgttcaccagaacgttcttttggttacactccatgtgacatcctgaggctgttgcttctctccagcttttctgttaccatcctggtcctggctactgtcacctagtgggccactataatatggcttcctaatggatcttcctgcttcctctgttgcctcattacttttctatatagcagaatgatcttttgaaaatgtgaaccagatcacattattccctagttaaaaccccccaaggcttcccatcacacttggaataaaatccaaaagaatttttctaaaccaaaaatagtaaaaacaattttttttttctgacaatctcttgtcacccaggctggagtacaatggcgcaatctcggctcactgcaaccgccgcctcctaggttcaagcgattctcctgcctcagcctccagagtagctgggattacaggcatgtgccaccacgcctggctaatttttgtatttttagtagagacagggtttcacgatgttggccaggctgctctcgaactcctgacctcaaatgatccaccaccccccttggcctccccaagtgctgggattacaggtgtgagccatcgtgcctagctaaaaacacttaatccaaaattcttaccatggcctgcaaggtcctgtgtaacctggct

SEQ ID NO: 125703 - DNA, 1011 bp, Homo sapiens
accacacccggcctttttttttttttttttctgagacagtctcactctgttgcccaggctggagtgcagtggtgcaatctcaatctcagctcactgcaacctccacctaccaggttcaagtgattctcccacctcagccttcccagtaggtgggactacaggcatgcgccaccacgcctggctaattttgtatttttagtagagatgaggtttcaccatgttggccaggctggtctcgaactcctgacctcaggtgatccacccacctcggcctcccaaagtgctgggatgacaggcgtgagccaccgcgcccggccaaaataactctttaaaggtttatattatccagatatgaggattatcaactttctcaggaaagagattgaggggttttacaggaacaacatgctccgaaaatgaagttttaaaggcttctgggttgtatggcagatttgtagcctcgtgtggcttcaccccagatgtgaaggtttgggaagtctgctttggaaagaagggggagttccaggaggtggtgcgagccttcgaactaaagggccactccgcggctgtgcactcgtttgctttctccaacgactcacggaggtgagtgaatccgctctgatgtctgaccagtggctcttggcccctcttgacaaccagggtccttctgtctgtttgtgccatggctctgaagagggtggggtgcctggccctcggcaggaagctgacttagcttcctagctggagctgctcaagttgggccagtgcttaccctgccagggtgtgttggggcttgagctgtgattttctgtgttgcaggatggcttctgtctccaaggatggtacatggaaactgtgggacacagatgtggaatacaagaagaagcaggacccctacttgctgaagacaggccgctttgaagaggcggcgggtgccgcgccgtgccgcctggccctctcccccaacgcccaggtcttggccttggccagtggcagtagtattcatctcta

SEQ ID NO: 125704 - DNA, 1050 bp, Homo sapiens
tttccacctgacaaatcttcgggatccaagaagcagaaacaatatcagcggattcggaaggagaagcctcaacaacacaacttcacccaccgcctcctggctgcagctctgaaggtacgtggggtacctggcacagcgtgcaccctgagactcagccccacaggcttttcctctggagtattccatgcatgttacaggctctcctgcctctgatcagaatcagcgggggtgcttaattctgtcccctctcatcgcagcccaatctcagcttgctgttaatccaggccacagggccccatctccccggctccaggtttggcttccccatctcccccaggagctcctattgacacttcctgccacccttcccctagagccacagcgggaacatatcttgcatggactttagcagcaatggcaaatacctggctacctgtgcagatgatcgcaccatccgcatctggagcaccaaggacttcctgcagcgagagcaccgcagcatgagagccaacgtggagctggaccacgccaccctggtgcgcttcagccctgactgcaggtgggacaagacggagcctcaggtttgcctgcagaggcctagtcccaggctttggccttcccatatctgctttgaggtagtgaggagggacctggacccagggcctcccttggggtgccagaaagagcatccacatagtttgcgcgctgcctggggctccctggagatctgggctgctatacagcaaggaaacagggggaggtctcttcctacctggaaataccttggcctggcttccagatgagccttagtttctaaaccctagagagaaactaaaggagccaaagctatcagaatcttaccttttgaggagttttatgagatttggaaccaggggcttaagttttaaggctagactgtggggcatgaggagagatcttgacttccccgagaacccagcacaggacctggaacacagagcctctttgtccagtgagagcgtgacttgtctgctgcctgtctctagagccttcatcgtctggctggccaac

SEQ ID NO: 125705 - DNA, 1030 bp, Homo sapiens
gctgctggccctgatggcgacggcggcggtagcgcgggggtggctgcgcgcgggggaggagaggagcggccggcccgcctgtaagtggggccgggtcgggtgggggcggcccgcggtgtcccggctcccggcctcctcgtggtccgacctgcggtttgggcccgcggctggtggggcccggcgactccatgggcctcagtttctcctctggtaacgtgagcttcgcttccagagacggggacccgccttgccgggttaggcgcacctcctggggcgggactggctccaacctgggccccttactgcggctttctctgtggccgaggccaggccgtccccggggtggccaggagagcaccgtaaactcttcagcctgctccgtggccgcgatctcggaaaaagcaccaattctgtgatgtgcagcagcatttactgggcatctatgaccctgtgataggctttggggtctttttctgtaaggagtccagtaaaggagaagtacatctgtattatgaacacctaaatatgtaagtgaaaaacacggtgaaataagtttcactgaggccaggcgaagtggctcacgcctgtattcccagcactttgggaggccgaggcagggagatcgcttgagcccaggagtttgggaccagcctgagcaacatagcaagaccccatctctacgcaaaattagctgggtgtggttgtgcacgcccctgtagtcccagctccatgggaggccgaggcaggagggtgtcgtgagtccaggaattcaaggctgcagtgagttgtgatagatcgcgccactgtacttcagcctgggtgacggcaagagcctgtctctgaaaagtttcatagaagaggttagtactagaaatgggaaacaccagagagtcagtgggcagccctgctctttttatttatttttcagacagagtttcgctcttcttgcccaggctggagtgcagtggcacaatcttggctcgttgcaacttccgcctgccaggttcaagcgattcttctgcctctgcct

SEQ ID NO: 125706 - DNA, 1022 bp, Homo sapiens
gccccggctcccaccccctcctgtacccccacctctgctgcattaccctccccctgccaaggtgccaggcctggagccctgccccccacctcccttccctcccatggcaccacccactgctttgctgcaggaagagcctctcttctctcccaggtttcccttccccaccgtccctcctgccccaggagtgtctccgctgcctgctcctgcagccttcccacccaccccacagtctgtccccagcccagcccccacccccttccccatagagcttctacccttggggtattcggagcctgcctttgggccttgcttctccatgcccagaggcaagccccccgccccatcccctaggggacagaaagccagcccccctaccttagcccctgccactgccagtccccccaccactgcggggagcaacaacccctgcctcacacagctgctcacagcaggtgagggccagcaacggggagaggaaagcctggggagggaggccagggggtggggaggacagggggttttgggagcagaagatgaaggtgaaggggcaggtccagttcaagggacagagtggcaaggaatgagggatgtggggcctgtacctaaaaggggtgtggactcttgggaggggcaggatggggtcttgatagatgccgggggtgggccagccccagtagcctcacggttctgcccgtgcacagctaagccggagcaagccctggagccaccacttgtatccagcaccctcctccggtccccagggtccccggtaagatctcgggcactgggcggtggggctgtgcccacggccttcaacccgactctccgcccttctccaccccagcaggagacagtccctgaattcccctgcacattccttcccccgaccccggcccctacaccgccccggccacctccaggcccggccacattggccccttccaggcccctgcttgtccccaaagcggagcggctctcacccccagcgcccagcggtaaagagaggggttgcagggatt

SEQ ID NO: 125707 - DNA, 1133 bp, Homo sapiens
ttgtcaggggctgggagaggccatcattagtgcagtcctcactctctggttagggccaaagaaaaagttttggctacagatgtggggcagaggagggaagagagaggggacgtgcaggcttaggattgctgttcagataggagaagaggaagaggaactggggtttgctatgcatttactgcaagccaggcactgcacaagcttttctggcactgtttccttcttcctgataaccagagaaggaaaagatctccattttacagatgaggaaacaggctcagagaggtcaaggctctggctcaaggtcacacagcctgggaacggcaaagctgatattcaaacccaagcatcttggctccaaagccctggtttctgttcccactactgtcagtgaccttggcaagccctgtcctcctccgggcttcactctgcacacctgtaacctggggttaaatgggctcgcctggactgttgagcagagctgggaggaggtctggaagcaacatgggtggtgcattctctgcattcagggagaaacacacaagaggggattacattggctgacccccaacctcccaggtcagctcatgggtgtccatgtgtcctgcgcccacctcacccacctccaccccctccccacccatctttctcactcctgaaacttaggggcaaggtggctctgtctctcctctttgaagttagctaagctgaccttggagaagggggcccccaacaagggaagagtgaacagaatattcccagggtaggtcctggcactgataaataagagacagacaactactgccctagggccagaggcagtggctcaagcctgtaatctcaacactttgggaggccaaagtgggagggttgcttgaggccaggagttcaagaccagcctggacagcatagaaagatctgtgtctctgcaacaaattaaaaaattagccaggtgtggtggcacaggcatatagtcatagctactcaggaggctgacacaggacgatcacttgagaccaggagtttgaggctgcagtgagctatgatgtcaccactgcattccagcctgggcaacagagcaagaacccctctcttaaaaaaaaaaaaatgctctacccagaatcccaggccac

SEQ ID NO: 125708 - DNA, 1048 bp, Homo sapiens
gcagcaacctccaaggtaacagccgctgccaccatcgccagcgcatggctgccatgttgaattgattcggcaggcggtgcaagagaaaccggccaatgagaggagtcggttggtcgccctgtggccagtcacgtaaaggggggggcggggcggtcgtgggggtggaacatgcgtattactaagcggtcgccgggctgatgacataaaaaccgggtgccggcaggcgccagtcgcaggtgtgctgctgaggcgtgagaatggcgtcccgcggccggcgtccggagcatggcggacccccagagctggtaagtcccggggcccgcggacacccctctccccacttctgcggccaccgcgtctgaattattcctctacatgccattttctctttttcgcagttttatgacgagacagaagcccggaaatacgttcgcaagtgaggggagcctgaatactgcggggcgtccgggggtcgggaagcggcaagttgcccctgttgctggcgttgcccggaaaggccgtagaatttgggggtgcgggaagggaaggacccgggtgggtgccgatttctgtctctggtaaatcaactttaagttgccgacctctctgggcctcggtacctcagcgttgaggtaggggtgatcgcgcttgctttccgtgggtggttttcaaagtcgaatgtgacaatttgtcctaaacatgtggtaaaagaggcgctgggcggtgggtacgggcgaggggtcagtcctggtggggggaaggaagtaatggccgtaggatgcttatcgtggcgccttgttgccaataaatctccaagacagcagttggtgtattattgtctgaatttcatagagggtagtttgtataactactgagttgtagccaggtgggagtggctcacgcgtgtaatctcagcaatcgcagcactttgggaggctgaggcgggaggatcgcttgagctcaggggttcgagaccagcctgggcaacgtagcgagcccccgtctccgcaagtaataaaaaaattagccgggtgtggtggctcccctc

SEQ ID NO: 125709 - DNA, 1069 bp, Homo sapiens
ggcgggaaccgagccctaagctgcaaccagaaccgagcacgcacagagcggcgcagaccgaattcccagattctacgcaccgcggcgcttcgcgaggggaggggcaagcaccgcgggttgcccagcctagggcgaggccaggtgcggcgctcagggcgacccgcgcaaagcctgcggggattacgtaatggcgtaaggggcggggatggaggcggggccggactgttctcggggatacgtaaggaaacgggaccaagggcggagaatcccgcgatgggggcggggagagggcggggctcaagtcggaactgggcggggcggctgaagacggaaatgggcggggctgcgagctagggcgggagaaggagcgcggggaggacgtaccttgtgagatgcgagccggccaacagcttgcaagcatgctccgctggacccgagcctggaggctcccgcgtgagggactcggcccccacggccctagcttcgcgagggtgcctgtcgcacccagcagcagcagcggcggccgagggggcgccgagccgaggtcagtcaagggcaccgggcgggaggccatcctctgtcctccttttcctgccgggccccgacggccccatctcctccctttgggcctgtcacctcccaggcctctcccccaaagctctttccccctacccctttccccgtctccgccggctcagactctgacctcgatccttcccctgccaggccgcttccgctttcctacaggcttctggacggggaggcagccctcccggccgtcgtctttttgcacgggctcttcggcagcaaaactaacttcaactccatcgccaagatcttggcccagcagacaggccgtagggtgagctttcgagtgggcggggctcctttggggctgggcgggagtgggcggggcctgagaggaggcggggcagggggggtcccgcttctcacgctcacttccagatccctcactctgagtatggaccctgaacggcaaccccatttattccctcacgttgccatcttcattaattcatgttgtagatctccatcggggctggcccat

SEQ ID NO: 125710 - DNA, 1514 bp, Homo sapiens
ccatgtccatgggcctggagatcacgggcaccgcgctggccgtgctgggctggctgggcaccatcgtgtgctgcgcgttgcccatgtggcgcgtgtcggccttcatcggcagcaacatcatcacgtcgcagaacatctgggagggcctgtggatgaactgcgtggtgcagagcaccggccagatgcagtgcaaggtgtacgactcgctgctggcactgccacaggaccttcaggcggcccgcgccctcatcgtggtggccatcctgctggccgccttcgggctgctagtggcgctggtgggcgcccagtgcaccaactgcgtgcaggacgacacggccaaggccaagatcaccatcgtggcaggcgtgctgttccttctcgccgccctgctcaccctcgtgccggtgtcctggtcggccaacaccattatccgggacttctacaaccccgtggtgcccgaggcgcagaagcgcgagatgggcgcgggcctgtacgtgggctgggcggccgcggcgctgcagctgctggggggcgcgctgctctgctgctcgtgtcccccacgcgagaagaagtacacggccaccaaggtcgtctactccgcgccgcgctccaccggcccgggagccagcctgggcacaggctacgaccgcaaggactacgtctaagggacagacgcagggagaccccaccaccaccaccaccaccaacaccaccaccaccaccgcgagctggagcgcgcaccaggccatccagcgtgcagccttgcctcggaggccagcccacccccagaagccaggaagcccccgcgctggactggggcagcttccccagcagccacggctttgcgggccgggcagtcgacttcggggcccagggaccaacctgcatggactgtgaaacctcacccttctggagcacggggcctgggtgaccgccaatacttgaccaccccgtcgagccccatcgggccgctgcccccatgctcgcgctgggcagggaccggcagccctggaaggggcacttgatatttttcaataaaagcctttcgttttgcactcgctggagcctccttgttcccagcgcctccacctccctgcagagctccccctcggggcggccttggctggatctcgctctcccggatggagcttagagggaagatggggttgtaagctgagcttggtgatggcggggtggtcacttgcccactccctggggattcggaagacagcctgtgaggccaaagccagcgcccaatctaggaagcaggcatgagcactttccgcacgccatggctggggatgggaggggaaggtggcagagatgtgcccctgggtctgtgctgggagcccggaccccgcacaatacccgacacattcggaatctcccgtgcgccttgtgaaagagcgcattccgtactgccatttcctattggaaaaacgaaaacaaaaagacctattgtttggataaaacacgccaccaaaagtaaaaccgggccaaatcttctcacctgg

SEQ ID NO: 125711 - DNA, 1369 bp, Homo sapiens
ctgtacaatttctctggacatatacatgccctgcctggctgttttctgcttttatagcatacttaacatcgcctctattcttaccataaccctggaagtgagtcatgcagacaccatttccctaattttatagaggaggaaactgaggctaagagaggcgacgtgactttcaccagcctcaaggccagcaggcgtagggctcacagtgcccaatccaggcacaactggcagtgcagtggggaccactctgggcctcaacccctagtctaagcccagccacaccacctggagggtctacttttcttctggcccagagccacccccactcaccaggaaactgtagcagccagtagtccactggaggacttgagttatatgaacttcctctagaacagctccacccagcaccagctgggccctctggactggcactcccagatctgcccaggccctgcccaacaggtgcagcccaagacctttgctcctgaaagaagtagaaccctggtttccatgagcccctgacactgtttcttactcttcttcttcttttctttttttttatttttttgaaatggagtctcgccctgtcgcccaggctggagtgcagtggtacgatctcagctcactgcaaccaccgcctcctgggttcaagcgattctcatgcctcagcctcccgagtagctggcactgcaggtgcatgccaccacgcccagctaatttttgtatttttagtagagacggggtttcaccatgctggccaggctggtctcgaactcctgacctcaggtgatccacccgcctcagcttcccaaagtgctgggattacaggtgtgagccactgcacccagccatgtttcttgctcttctatcattccaaggcttaggcatttacagaagagggcacaggctgcatgcctgtgatttgagatatggaggcaaccccaaaaaaccccaaggcccagctcaatggggtctctcttctctctggaagagcccttgactcctacaagatgaccaagcccccttgactcagcacagcagtatccctttatcagtcatttatgccagtaggaaagcctgggtaggcaaggttgaaggaacatgagaaagtcttcccttcattcaagtcactaaatcgactctctgttgagtacccaacaccattctaggcaataggaatgcagcagtgaataaaaccagcaaaattcttgcctgttctgggacattacagatgtcccaatggagctgacatactggaacagaaagaaagaaacaatttaaaaattggctgggtgccatggctcatgcctgtaatcccagcactttgggaggccaaggcgggcagatcatgaggtcaggagttcgagac

SEQ ID NO: 125712 - DNA, 2578 bp, Homo sapiens
tcgtggacgtttccaagacttcattctcaaattctctccctcagggtccccaccctgtcctcccacctaagcctggaatgagggggcactggcctgtggggaccctggtcttcaggctcccaaacctggctgggtctggttgccccctggccttaacctgtgaacatccagctgtccctgggctgtgattcagtgtctgtctcccgggtgacctcagcatgggctttgaggaaggggagagagtagtttcttctgagactggatagtgactcagggacccggggctggggcctcaaaagtgcctttgttggcctgggctcaggaatccagagaaactggtcaggaggaggccccagtgacaaaaacccctccctctgcccccgcccctctgccagagccatataactgctcaacctgtccccgagagagagtgccctggcagctgtcggctggaaggaactggtctgctcacacttgctggcttgcgcatcaggactggctttatctcctgactcacggtgcaaaggtgcactctgcgaacgttaagtccgtccccagcgcttggaatcctacggcccccacagccggatcccctcagccttccaggtcctcaactcccgtggacgctgaacaatggcctccatggggctacaggtaatgggcatcgcgctggccgtcctgggctggctggccgtcatgctgtgctgcgcgctgcccatgtggcgcgtgacggccttcatcggcagcaacattgtcacctcgcagaccatctgggagggcctatggatgaactgcgtggtgcagagcaccggccagatgcagtgcaaggtgtacgactcgctgctggcactgccgcaggacctgcaggcggcccgcgccctcgtcatcatcagcatcatcgtggctgctctgggcgtgctgctgtccgtggtggggggcaagtgtaccaactgcctggaggatgaaagcgccaaggccaagaccatgatcgtggcgggcgtggtgttcctgttggccggccttatggtgatagtgccggtgtcctggacggcccacaacatcatccaagacttctacaatccgctggtggcctccgggcagaagcgggagatgggtgcctcgctctacgtcggctgggccgcctccggcctgctgctccttggcggggggctgctttgctgcaactgtccaccccgcacagacaagccttactccgccaagtattctgctgcccgctctgctgctgccagcaactacgtgtaaggtgccacggctccactctgttcctctctgctttgttcttccctggactgagctcagcgcaggctgtgaccccaggagggccctgccacgggccactggctgctggggactggggactgggcagagactgagccaggcaggaaggcagcagccttcagcctctctggcccactcggacaacttcccaaggccgcctcctgctagcaagaacagagtccaccctcctctggatattggggagggacggaagtgacagggtgtggtggtggagtggggagctggcttctgctggccaggatagcttaaccctgactttgggatctgcctgcatcggcgttggccactgtccccatttacattttccccactctgtctgcctgcatctcctctgttccgggtaggccttgatatcacctctgggactgtgccttgctcaccgaaacccgcgcccaggagtatggctgaggccttgcccacccacctgcctgggaagtgcagagtggatggacgggtttagaggggaggggcgaaggtgctgtaaacaggtttgggcagtggtgggggagggggccagagaggcggctcaggttgcccagctctgtggcctcaggactctctgcctcacccgcttcagcccagggcccctggagactgatcccctctgagtcctctgccccttccaaggacactaatgagcctgggagggtggcagggaggaggggacagcttcacccttggaagtcctggggtttttcctcttccttctttgtggtttctgttttgtaatttaagaagagctattcatcactgtaattattattattttctacaataaatgggacctgtgcacaggaggaaattttattgtctctgatttcaactgtggaggtgggtggggaagggctggaggcctgggtgcgggggtggggggggtcagtcaggggcaggaccactgtgttttggccgggacataaacacttaaaaaaaaaaaaaaaaaacgagatccagggaattgtgaaaaattggagctgggccgggtgcggtagtgagcacctgcaatcccagcactttaaaaggtcgaggtgggaggatcgctcgaggcaggagtttgagaccagcctggggaacatagtggcaccatctctacaaaaagttaaaaaaattagctgggtgtggtggctcatgcctgtaatccctgtacttggggaggtcgaggtaggcgaattgcttgagcccaggagtttgaggctgcagtgagctttgatcgcaccactgcactccagcctgggtgacagggcgagaccttatctcttaa

SEQ ID NO: 125713 - DNA, 1050 bp, Homo sapiens
gagggggatggtggaggtgctgctacctgacggtggagggggaggccggggccagaccaccgagaagcccctaaacccgcacagcaggaaaacatctccgcagtccctgctctaccaaggctggaggagggccacaagccttgagctcattggctggcggggggggggggggcgggcagactgccagcgccttcctttgactggctattttctctcagcggaaaaccaatcattgcgggcaggcggtgagggtgtggccagggtcgcaacacaggccccgccccgagtcctgttgcccacacgcccgaggcgcgctggattggcggtgagttctgactccggcctccttcgagaccgtttcgctccggatgtcgcccacctccgaccctctctcagtcggagggcggaaaagaggaagataggtccttcctccagccgcggggcacccccttctcccaccttgcccttcccccagccctgcagccccagagtgtaaatatccaagcccgccctctctgcgctcagtgtccccatctgggataggggccgggataggggtcgcgctggcaggaggcctggcagcctcctctgaagggggaggagggaagggggaaaggaggggatgggcgattgaggtggacctcgagacagggcaacggtgtccccacaggagcatggcccaggaggagggtgggagcctgcccgaggtgcgggcgcgggtcagggccgcgcatggcatccccgacctggcccaaaagctccatttctatgaccgctgggctccggactacgaccaggtaaactcatttggggccttgcctccactagaccagcctccatttttctacctgtaaagtggggaatcagccttgcacccgggggcggctgtgaggacgaagtgaggcctggctaagaaccctacagtcctgccccttccagaacccgccccacagctctggattggcagccccatcaggggccatgacctcctgaggggggctgcctggaggaggtgctattgagaagtcactgtggggccgggcgcggtgg

SEQ ID NO: 125714 - DNA, 1046 bp, Homo sapiens
tttgggtcttttttttgtttctttcttaaagccactttagtgagaagcaggtaccaagcctcagggtgaagggggtcccttgagggagcgtggagctgcggtgccctggccggcgatggggaggagccggctccggcagtgagaggataggcacagtggaccgggcaggtgtccaccagcagctcagcccctgcagtcatctcagagccccttcccgggcctctcccccaaggctccctgcccctcctcatgcccctctgtcctctgcgttttttctgtgtaatctattttttaagaagagtttgtattattttttcatacggctgcagcagcagctgccaggggcttgggattttatttttgtggcgggcgggggtgggagggccattttgtcactttgcctcagttgagcatctaggaagtattaaaactgtgaagctttctcagtgcactttgaacctggaaaacaatcccaacaggcccgtgggaccatgacttagggaggtgggacccacccacccccatccaggaaccgtgacgtccaaggaaccaaacccagacgcagaacaataaaataaattccgtactccccacccaggtcctgcgtggcgatgtgtgtctggggccctggggaaatagtcaaggtaagaggagttagtcttccctgaccagaagacaaggatgagtgtggtggctcatgcctgtgatcccagcactctgggaggctgagacaggacgatcccttaagcccaggagttcaagaccagtctggacaacatagtgagatcctgtctctacaaaaatttttttttaattagttgggcagaggccaggtgtggtggctcatgcctgtaatcccagcactttgggaggcagaggcgggtggatcacctgaagttaggagttcaagaccagtctggccaacatggtgaaaactcgtctctactaaaaatacaaaaattagccgggcgtggtggcacatgcctgtagtcctagctacttgggagactgaggcaggagaatcgcttgaacccgaaaggcagagg

SEQ ID NO: 125715 - DNA, 1049 bp, Homo sapiens
ggtggcctttacttgggtgtcacccggggaccacttgggggtccaagcgggacaggcctccgaggtccccgccatgtatggaggccgaaaggcagcgtcccaggcgaactggagagggagttccccccagctctccaggtcacctcccgccgacggacggaaaggccggcgcgcacgggcgtggtgcggcggggataggaggcagccacgggcgcaccccagggccagcacataatgggccgcgtaggccgggcaggcgtccagctgggacgccgccgcaccacgtgggctgcagagcgcacggggcaggcagctgccggtgggcccagggccgggcgctgcgcggccagcgtccgtgcgtgcgtgcgcgcgcgcgcgtgcgcgtgcctgcgtccaagggatttgcgatcaggcggcgcggcggacagccccggcggcggggcggggggagttatattgcggggtccttcctcgctcaccctggttcctctcggagcggagacggcaaatggcggacttcgacacctacgacgatcgggcctacagcagcttcggcggcggcagagggtgaggcgggcgtgcgcgggccccgtcgggggctgcgggaccggcggagtcggggccgtcagggtggcggccgtcctgcgctcagccggggcggcgggaggcgggggcccgcggaggcctaggagcggcgcctggagggccggggcctggaaatggcgcgctcggagacggggcggcggcggctgggctcccggggtcttgcttgcggggcggatcccttccactgcctcccgccaacgacaacgtgttggtttttgccctgccttggccgcggcggcgccgatgcccggagacgagcgcccgcttccagccccatcccccctacggtaggaccagtgcggggctgagctgtggcgctggggtacgggccacacggcctgccccgctccggtcccggcctctttcgcggccctctgttgcctgcccgccttgcaggcccctggccccttcgccacgaggccggccgactggggaaggtcggc

SEQ ID NO: 125716 - DNA, 1012 bp, Homo sapiens
gctagaaactcctctgttgggaggtttaaatgagatgtgtctcataatttggaggcatagtcttgccctgttgcccaggctggagtgcagttgcacaatcacagtcccaaagtgctgggactacaggccggagccacatgcccatgcccagccttgagcactcaactttctgttgcatctacttactggatacatccctaccctcataacatctactctgtacattggcttctttttatagttaccctctctcagtctcctttgacacctacagatcttttctggctcaccctaagggttcagtattggccccatctgccatctggaagtggagtcccacttctgttgctctctgctgtgctgcatatcctggctcccaactgctccaccctggtgaaactgttctcattgctatcttccagattttctgcagtcctttgcttgtgacgtgatttctcctttccaaattatcagctccttgagggcagaaaccgagtcttaggtttgtgccttctctacattctctccacccttcatagacatgcagatacgtggttgatttgagtaaggaaaagtgatttgcctgtcaaggattttagtcacacttggagccgaaagtagggtttcctaaattactgaggctgtaattgactactttaatctttcataatcaatagactgtccctaatgggcagtagaaaggacactgctcagtagtggcagggagtttgcagcacagaccttgacttcaggtgtcctgaattggcacgctctgctgatctgttcctgttctacacgcactcctgccagcccagtgtagcctcaggcctgttgggtctacccaggagcatggcagaattatatagcacttggtacttaggaaatgtttttatggtcagttttaaacttataaaatcaagattgaaatataacagacaagaaaacataggtacagaggtaatttggcagaggtcctacatcaagctagctaaggtgtcaagtgaacctgttc

SEQ ID NO: 125717 - DNA, 1050 bp, Homo sapiens
tgaaaccctgtttctactaaaaatgcacaaattagccaggtgtggtggcacatgcctgtaatctcagcatccttaggaggctgagacaggagaatctcttgaacccgggaagcagaggttccagtgagccaagattgtgccactgcactccagcctgggtgacagagtgacagtctgtctcaaaaaatttttcttttcctttttttttgtttctccagccattctctgtaacagtcttgtggtacatcgagcagagtgcctcacctggggcgctggcggcgtagctcagcggaagaccgctttacttgttttgcttattccactctgggcacacttgaatcctgtttgtctcccctcctaggtcccgcggcagtgctggtggccatggttcccgtagccagaaggagttgcccacagagcccccctacacagcatacgtaggaaatctacctttcaatacggttcagggcgacatagatgctatctttaaggatctcagcataaggagtgtacggctagtcagagacaaagacacagataaatttaaaggtgagtttgggggattcttattgtatattactgtaaagtgtaggggaggatgggaaggggttctaaataaaaatagatttgtgaaccagaggctgtaatcaagaaagtgttttaaacatttgcctggtctaagtggccgaaagaaacataactcttcaactcataggtcttcagttcacttaggggaaaatgttttgtacacagtgtagttcatagaaatacatggcatatgcccaggtttgtgagcctgacctctacagcagtcctgtctgccagtaaaggagttccccaggagagagaggaatagagccgaggactcttaggcacattcctcctggaatgactcgtagattttccttggtagttaatccagtaatcatatggtactgtcatccagtaatcataaaacccagaagagaagcagccagtgctgtcagtatgcatttgtaaatttggagagtgtgcttgggagggctggctgagatttcagatatggtgtct

SEQ ID NO: 125718 - DNA, 1989 bp, Homo sapiens
ttaattaacattcagagaagaatgccctgattgccaaggatatattttcagctttgtgaagcaaattttatgtcagttacctgagtagtaagttaaatcggcactttaagcctctttcttcagagcattttaggtaccaagtttgaaatctacgaaatctaatcctcacttagattaaatagtcattcagaagtcagaagagctctgcagatggcctgagaaaggtttgaatattatggttaaaacattcaagaagaaagctttctagaaacgcagctgctatttcagtgcatgttcagttagcattttctgactgataaaatagaattgagagggaggaatgccagtcagggttctatctattgaaaggctctcctagtctgccatcatctagacaacagaatggtagttgtgacgtggagaagtagtatgaataggatcttcccacatctttaacccagaattacttgaggaaatcggggtcttcttttcttttccaggattctgctatgtagaattcgatgaagtggattcccttaaggaagccttgacatacgatggtgcagtaagtatcctcgggttttctctgtcatagcagttgagattgttttctttgccaatacttacactattttccctttatcattagctgttgggcgatcggtcacttcgtgtggacattgcagaaggcagaaaacaagataaaggtggctttggattcagaaaaggtggaccagatgacagaggtgattggttcttctaaagctgaacatcataaagatttgcagtatgcctaccaattccaactcgtgaacgttcctagtagaactcgattatctcataggtgtgataggttctcgtgagctcttaaaagtttgcgtaaaatcctagaaagaatggctgatgcttctgcaagcctggcgttttttgttttctgttggaagcaaaagctcttaaaatgatttcattgaaccttccatcacttgagttgtatgtcttccaaatgaatttttccatgtttgcgcagcaaggtaatgacacgacctcaactttatcttttttgtgtatcctcaggaatgggtagctctcgagaatctagaggtggatgggattcccgggatgacttcaattctggtatcagtatttaaagtatcaccacttaatttttcctaggagccttgctgctgttctctgtttcttacgagtagcccgcctggccggactacttatttagttcctttaacaaatacaactctcctgcagggtgcccaggcatgcaagtaagcctctgttagagcctgtgggggcaggacttgagccccatgcaccttgtgtggtcacctttgttagcctgcagctccttggatgtgtacgggcctgggtccttgagctcgctcagcagtctttctcagactctagcccagggaaactcctctgtggttttgtgtatggcaccaagagaagtactgttccttctggaaaacataggatagaggtttgggttcttacatggtgaaaggtagtcctgatggcccttttttttcttggaggattgtggggaggtccagtcccttgatggtggacctgatgcacttcgccgttctctttcttagccaacccaggcagagcagctggtggtatagcacaaagcatcagtccacacgccaggcctctgccctgcagggtgattttaagcatttttatcatctttactttctgtttttaaattacaaaagtataattttttatatatgcacatgataaaaacttcagttgtaacccagaaaggtaggaagagaaaaacaaatttgttttctttcccgcaaacttgggatgtgctgtcaatgctgtgctgtatagaacgtcagcaccctccccccatcaaaacaaaaccggtgtaaagtagtgggtgagtatgggagggactggtgcacgctgtcttgtgagtctgagatttttaaaaactcagctttggctgaacaggtgacg

SEQ ID NO: 125719 - DNA, 3328 bp, Homo sapiens
ttgtttaccacacaggtgctttgcttgtagaatggcccacacctaaaacgcagccaaaacaggaaaattgggactttgtgtttttattttgtcttcatatagcgttttcttgtgatttttgtgttctgagttgtaaatacttctaaatttcaggtttatcttttaaaatagctgtatagatttctattagaaaatagagttcaacctgctttgaggctttcttgttttgcttaagccgtattaaaatacagtttcgtggtattaatatttttctacttttcatgcaagctgagcatgtaaacagctcgtttgtttgctctcctaagatcttgattcctttttctttgggaagtctgttagcgctgtcattactccacacattggcatttggacccacttttaacacactttattttggagagacttcagatagtggacaaactaaagaatttaaaatgaaactcaaacaattcccagaacattattctataagcagcttggagacgatagtttgaaaagtaattcagtgtcctgtttcttcctcaggcttcagggatgacttcttagggggcaggggaggtagtcgcccaggcgaccggcgaacaggcccccccatgggcagccgcttcagagatggccctcccctccgtggatccaacatggatttcagagaacccacagaaggtacgggctcatgtgtcagtggagggcatcttgtcctgatgggatgatcatggccggttcacaccccgtggggacttggcgttctacggcacacagagttgtcggcatagatccccacgttctctggaatagcaagttcaccttggtcattagagcatctgctgttggggtagcaggccaggtgaattttagaaagtgggctggtttgctgacagcaacatcagcatggtcgttttgctggatatggaatgggatccacactctgacaaactctgctttttctcccccagaggaaagagcacagagaccacgactccagcttaaacctcgaacagtcgcgacgcccctcaatcaagtagccaatcccaactctgctatcttcgggggtgccaggcctagagaggaagtcgttcaaaaggagcaagaatgagcctgcggttgggagggaatggggcgtggggggttagagcaggaccacagcctggtgagtccccgggcagccgtcctgcagccgccactcctgcgcctgccattggcctcctcacagcggaaacacagcttgtgagtgcatgtcagctgttaacaagtggtttttagtacattctgggctttgctgtatctatctagtgcctgtttgtgcgtttttttctttcttccgctgcttccccattttccttctgtcctttttctcctgctccttgttttcccagcagcacatggggttcctcggaggagcagaggtggccgccgtgggggggcgtttgggctgcggtgctgcgtcatttttcctttgctttctctttactttagacactggcccaactccaggcgtttcctttcattccctcagtgcttctcttctgacctgcatgttgagttctgtattgctggggcttccaacaaaaaccagagtcactgacagagggaacagcagagaccttgttggtattcagctgtgatggatatagagaatcagaggcaccttgttttcacaactaggataaaaatatctgcagggtcctttccattcctatttagagggagtcctggctccatgaccccctcccgagtggactgtccaagcagataggctcacacgagaaacagtgaggctgaaagggggggctatggaagagcggtagggagtccacggagaagatgcagtgaatgcttgcatgcattcacacgtgtgtgtgtcccagctagttcactcctttcgccgtgcgtggtggaggctggcctctctggctgggtgcagtgaatggccagcgggtttcttttctgctgggccaaggcgctttgggggtggagggggtggtgctggtgctgcactgggctgactgcggcgctgacgcagcgtttccccccatccctgttgcctgtgtgttgtgtggatctgttcctagtataggcaacataatgagatactgtgcttcccacctccccttcagttcagagccaaaatgggtctagaatctggcactttactcatttcctttgataaattgtactatgcagagctgtcaggaaccttcagatagcagtagaggactgcagctgtctaggtctgcggccacatcttggggacacactggactgttcccatgtgcagggttcagcagttatgtgggagtgctaggggttaggcttttgagcttgaacgcctgcgtgtgaacagatgaaaaatccttcagtacccaagtcccagtctgtcctatggggagcagtttgggggcggccggcagcaggagcctgggaaagaggccctcgccaggtgatggcagggccagggtggcctggggcacccagcggaatgtgcttagtatttggtcaccagccgtcatcctgggcttttcctactgtgtcttgttacaaggcctcagcaatccacagaactctctctccttccttccacctgtcagcttctctgcttctgagataagaaccatttgtgtaacaccaacacttaacttcagaaagacatgcattatgtggtgtaatcaaacccgatgctttcagatgacctacttacatcttcaatgtggataagataaagaacaaaacacatgcatctaaactgctgggcaatccagttgacttttaaatgtaagaatggaattccaaacacttaacacattcagctatatgacagaaagtaaatctatggatatggtattttgtgaatgatcttttaaataaaagaaaaccttacgtaatatttaatgcttgcctttatttttgagttctttttagctgctcatggaatgtaacaattttaaatttgggaagcaccattgaaatggaagagtcttcctgtcattttaattctgggatgagtgaagttattttaaaagctggtgatgattagaaataggatgccaattttttcccctcacttgctaaaaatgtccttttcccaaccaggcagaaaccttgaaagtctggctgtttttggttaggtaaaggaacatttttttcccaagatggaagaaatcaagcatttacacaacatgtggcttcttttaacaactgcttgtaaacgaaattctaggtgcccctcatggctgggagggctgctgcttcctgacagcagatcctgactctggggaggtgctgctataggttggtattggatagtgttaaa

SEQ ID NO: 125720 - DNA, 1046 bp, Homo sapiens
atttttgtatttttagtagagatggggttttaccatgttggtcaggctgatctcgaactcctgggctcgtgatccacctgccttgacctcccaaagtactgggattacaggcatgagccaccacgcctggactttattactgaatttttgagaattctttatacagtctggatgcaagttctttatcagatatataaatattttcctctagcctggctttccgtgccaccaccccgccccccctcgccccacccattttcttaacagtttctttgaaagaactatcagcatccttttaagaaataaatagaactttaggtaaacataatccattgcatcttagcattcattttccggctggggttggaattcctcatgctgattttgaaaaaaccattagttcagtttgtttctgtttttatttttatttttttcagttcagattttaaaaaagaactcccccacttattaaccagatttgaatttggtttgtttttcaggaaattggatacactcacatgaaaatagcggaaggagtgaactctcttttgcagatggcaggcctcctggcaaggctgtgtcagaagacaatggccccggtggccagttagagcagagacttcactgactgacttacaggtgccctattctgaggtacaggagccgcggctttctgatgggggaaaatgccgccttaggctggagccaacatgactgtcctttaaactccagtggctggccaggcacggtagctcacgcctgtaatcccaacactttgggaggccgaggcaggtggatcacctgaggtcagaagttcaagaccagcctggccaacatggggaaaccctgtctttactaaaaatataaaaattagctgggtgtggtggcgggcacctgtaatcccagctactcgggaggctgtggcaggagaatcgcttgaacccaggaggtggaggttgcagtgagccaagatcacaccattgcactccagcctgggcgacagagtctccatctggggaaaaaaattaaataaataaactcccgtg

SEQ ID NO: 125721 - DNA, 1028 bp, Homo sapiens
tagtcatcagattaataaagcattttaagagctccggatcaagagattacatgggtgtggtagtagaccattttgcaacacagcttaacacatttgcgataggctgggctcagtggctcatgcctgtaatcccagcacttttggaggtcgaggcaggaggattgcttgaggccgggaacttgggaccagcctgggcaatatagcaagactcttatctttatattactgaaaaaaaaatatttaagcaaaacaacaatacatttgcaatgttatctctctatctgccatgaaaatcagttaaggtacccccatgtgacctgaagggtgggccccaccagctgtggtgagtctcaaaatcacatgtcttcttacagtttaaagtggtaagcagccttttctgtctcctttgtctagattcttgctcacttgtggcatctgggctactcaccagaagatatcattggcaacatctttcgagtgtgtaaaactttccaaatggcagaatacctgaaactggagtttatcaaggtcggtgagaatgtagaaatgcctctgtcctcaagaatgtggcccatagtggccgggtgctgtgggccacacctgtaatcccagcactttgggaggccgaggtgggcagatcacctgaggtcaggagttcgagaccagcctggccaacgtagtgaaagcctctgtctactaaaaatacaaaaattagctgggcatggctgggcgtggtggctcatgcctgtaatcccagcactttgggaggccgaggtgggcggatcacctgaggtcaggagtttgagaccagcctggccaacatggcaaagccccatctctactaaaaatacaaaacttagctgggtgtggtggcaagcgcctataatcccagctacttgggaggctgagggaggaggatcgcttgaacctgggaggtggaggttgcagtgagccaagatcgcaccactgcactccagcctgggcagcagagcgagactgtctcaaaacaaaaaaaaaagactgtgggc

SEQ ID NO: 125722 - DNA, 1024 bp, Homo sapiens
ttatttatttttttttctgaaacggagtctcactctgtcacccaggctagagtgcagtggtgcaatctctgctcaccgcaacctctccctcccaggttcaagcgattcttgtacctcagcctcccgactagctgggattacaggtgcctgccatcacgcccagctaagttttgtatttttagtagagacggggtttcgccatgttggccagtctggtcttgaactcctgacctcaggtgatctgcccgccttggcctcccaaagtgctgggattataggtgtgagccactgtctccggccagctgtattgatctgtgtgtgctgtgggtggaatgcaggggtcagaggtgacggagatgcaaacagcagtgaacataactcaagagctacctgaggtccttctggtggtttgaagtctttactggagatctcattcccagggccctccaggaaccggcaagaccacaagcattctgtgcttggcccgggccctgctgggcccagcactcaaagatgccatgttggaactcaatgcttcaaatgacaggtaggtcttagagtcagacctgtaggggggcgggtgctctgcattgagaattgttacagaaacaacctttctcagcattgggttgtatgcgaagccttgccagctatgtgatttcctccaccccttcccagtgaaagagcgttgctcacttgtcaacttgccggtttattttttttgttttcatggaaattttcaaaaactgttcttctcagccaggcatggtggctcacacctgtaattccagcactttgggaggccgaggcaggtagatcacctgaggtcaggaattcgagaccatcctagccaacatggtgaaaccccgtctccactaaaaatacaaaacttagctgggcgtggtgctgggtgcctgtaatcccagctactcaggaggttgaggcaggaggattgcttgaacccaggagaaggaggttacagtgagctgagatcgcaccgttgagcactccagcctgggtgacg

SEQ ID NO: 125723 - DNA, 1050 bp, Homo sapiens
attgcttgaacccaggaagcggaggttgtagtgagccaagatcgtaccactgcactctagcctgggtgacagagtgagactttgtctccaaaaaaaaaaaaccgccaggtatgatggtgcactcctgtagtcccagctactcaggaggctgaggcaggaggattgcttgagctcaggagttggaggctgcaatgagctataattgtgccactgtactccagtctgggtgacagagccagacccaatctctaaaaaaaccgtcaaaactatgcagtggggtatgtcaccttcatcccctgggagaatcagcgccctgcccaggtctttgcccttgggtgggacagaagctcacgtgttcccaatcctcttcctcccttccctgccggctgaccccagcgctggagagcaagtgtaagtcaggcgagaagaaggtggacgccctcctgaaggagaagcggcgcctggaggcagagctggagaccgtgtcccggaagacccatgacgcctcgggccagctagtcctcatcagccaggagctgctgcggaaggagcggtgaggcggccgtggggccggctgggtcctccctgtggccctggcccttgctcctcttcttgacattagctcatgttatcttggggcagagagggggatagagctggtgggccaggtggccgatctcgagcgatcaccctgctctcctctaagctccgataaagtctccaaagcctctacactgttttccaagcagagcttatagaaaagagtagggccaggcacagtggctcatgcctgtaatcccagcactttgggaggctgaggcaggaggattgagcccaggagttcaagaccagcctgggcaacatagtgagacccctatctctaaaaaaaaaaaaaaaaaaaaaaaaattaggctgggtgcagtggctcacacctgtaatcccagcaccttgggaggccgaggcagccggatcacctgaggtcaggggttcaagactatcctggccaaaatggtgaaaccctgtttctactaaaaatacagaaattagctg

SEQ ID NO: 125724 - DNA, 1158 bp, Homo sapiens
tgcaatggcacgatcttggctcactgcaacctccaccttccaggtccaagtgattctcctgcctcagctgcccgagtacctgggattacaggcacttaccaccacgactggctaatttttgtatttttagtagagatggggtttcaccatgttggccaggctggtctcaaactcctgacctcaaatgatccgcccacctcggccttctgaagtgctgggattacaggcgtgagccactgtgctctgcactccccccacaacaactttaaaaagtactctaggaaaggtcaagtcctcaggaccatcccagccccaaatcctggcccctcttgggctttggttgaattgtgtctactgtggcccctcgtggcacagatgccatctagtagcccatgtcccccaccagttggtcagcccctggacacttggcaaattgctagagtgtgggagctggaggagccagggctgagtgcagtggttctgtgcccgcctcacccccaggagcctgaacgaactgcgggtgttgctgctggaggccaatcgtcactccccagggccggagagggacctgagccgtgaggtacacaaggctgagtggcggatcaaggagcagaaactcaaggatgacatccggggcctgcgtgaaaagctgaccgggctggtatgtggggtaggggtggcctaggggcaggggcactagtccgggtggggctgggctagccttgctgtcaggccatggagactggagacctcctggaatgaccccagggacagctgagtcatggtgaggatttgaaatcttctaggaccacaggcaggtggagggaccctggctagccgcttttgcagacatcatggctgcctatgtggcagtctgtgtgatacggtgcaaaggaaaacttcctatctgacctgtccagaggcaggatgagccaatacaggtaaagagctccctgttcagaggagtaatcaaccacaagccagttccttgctcagggtcctgcagtggggcttcacacatcagtctcaggaaggagacaagaacttgaaagtctacagcaagcctgggattctgggtggctgagttttttttgttttttttttttttttttgagacagagtctcgctctgttgcccaggctggagtgcagtggcgcg

SEQ ID NO: 125725 - DNA, 1825 bp, Homo sapiens
gggaccacaaagggttcagaggagtaagttggggatactcggtctgtgggtggtctctgagttcctgcagatgggtggagaggacagaggaggggccacagggtgctgaacacccacccgccccatcctaagtaccctgggcatgatgggcttgacacctctcctgggctcctcacccctggccagcagccagggagtgagaccctgcctcgcctggcgtgggcccagggaagggggccgctgtgccgctgagagttcgttccaccctcctggcagtgctggagggggctggagctctggcgtctggcctagtgaccctacctcccaggaccaaggtcctgcggtgggagtctcctgtgtccccatcccagctgaagcgagggtgctgggacataggggtctcgctgcagggcctgtgaggggagcactgactcttggatggagaatgtgccaaggggtaccccgggatggccctgggcctggcgggtgggagtggagggcaggcccccgcagtttttggagaagtgggcatttgctggggtttctcttagaagaggagaggggtgtctagaagccaccctggcgcgccgctgccatggtcggcctctgtgtgtctggctgccccgtggccaggactgttgactccttggcactggcccggggccttgggacttggaaggtgccccaagcagctcatttatttcagcagtgtcattccagaggggaagggcaccagcatcgattatttattctaagcaggaggaggtggctggaggctggtggctgctggcagggaggggctaggtataaggtagttaggtggccgtcatgaaccgccctatttggggcccaggagggtgtgagatagactctgacctcttctgagcaggcatctgcggaccaagggacaggcttggccccaaggtgacagggtatcggaacccccatcctgcctctggggtgtgggaggctcaagtccacacctcgttcttccacagcctgttctgagggtgacctagaaattggcagttctaactcagagggtcccacaggaccccacagaggaaactaggaaggaagggttgaaactccgcagccactcagagcctgcactcttaaaatgttcgagaacttaaggccgatggttgtaaaactgggtcttgaagacagctttgtagggggcacgctaaacctacttaaaaggactgttctctcgatgttgggagaagggtcatttatttgcagtatgctaatcacaaataatttttatctgttcattgaaggcagcctcccaggagcccggctagccttctgatgaggtggtagtcgtcagcacttggtgtttggcaatagtctgagtggcagctgtaatctagggtcttggaggtagctgtttttgcagcctgcttgactccagaggccaggccatccacggtttggtgacagcttggttgttggacctggggtcttgtggatggtgggtgatggcttgggacattcacgtcctaagcatgaccttggaaccatagactgcagctcccagatgattctcattcagggtctagtctctgaccactcactgcttcctcagccgactcataaatcctgtagtctggccgggcgcagtggctcacgcctgtaatcccagcactttgggaggccgaggtgggtggatcacgaggtcaggagttcaagaccagcctggccaacatggtgaaaccccatctctactaaaaatacaaaaaattagccaggcgtggtggcaggcatctgtaatcccagctgctcgggaggctgaggcaggagaatcgcttgaacccgggag

SEQ ID NO: 125726 - DNA, 1052 bp, Homo sapiens
ctgcctggctagggtagggggtcaggattatagaatttgcctcttttcctctccttcaggacttggcttggctgtggtatctttgggctgaagacttcctcgtcctcagggctggccatggttccacctttatatccccatgatgtcctctcttttttttctttttttctttttttgagacagtcttgctctgtgcccaggctggggtgcagtagtgtgatcacagctcactgcagcctcgaactcctggactcaagccaccctcccaccccagcctcacaagtagctgggaccgcagacaagggccactacacctggttaattttttattgtttgtagagatggggtcttgctatgttgcccaggctggtttcgaactcctgggcatgaggagtcctcccaccttggcctctcaaagtgctgggatgacaggagtgaaccaccgcgcctagccaacatcctttccttcctttgtcccaacattgatcttactcagatgtttacatctctctccccaattgcactagggacaggaagggatggaggcttgctcctcaaatacttgttaaatggctacatgtttgaatgaatgaatgaatgaaatcctgctcttgagccttgacctaaatggctaagcagactctctcctatttttcttaaatgctcatctctggggcaagttccccaccctggtaggagtcccagggtctctccctgaacttcctggggccccctctctccccactaccccagcctgtgtcttctcccaaccttaaccctgggggctttgctccccaatgtcatcctctctgtatctctcagttctctgactctcgccgtttgtaagtatctctctctcagatgcgtggcagccagggtcacagccaggttctttgggacaagccaggggtgtatgcccagctccatggggcctgcagaggcttcaggggacacccatggaagaagacctgcagggccaatttataaacagaggagcagagcaggacccagggcttggaatccatgctgagttacgtttttgtttttttttt

SEQ ID NO: 125727 - DNA, 1055 bp, Homo sapiens
tggaatcctacagtccacagcctctgaatctggcttcacacagcataatgcatttacggcattgctgggtacacgggtagctggtcccttctggtccctgagtagtgttccatggtgtggatatgccacatacctctagccactctcctctctagggaaatctagcaaaccggcttggccggccctgcatcagctcgggaccccccagaagaaggtggttcctctttctcattttcacaaaggcaccatctggctggcggggggcctgtggcctgcaccccatcactacccaccccccacatcaagagctgaccccaagccgggggagctgctcatctccgccctcagagctggaatttcatcttctgtttctggtgactcatactgtgagccccgcgatgaaattacacctgcctgccgctgccctccgggcctctggccccatgcgatcctcccgccgccatccaggtgggctctggagtaattgaggctatggggccaggacagctggaggttgagggcggtgccagggaggggagctgtctgtgccctggggtgtcttgcccatcatcttatgtatccccaccctgtgggagtctggggttcctggtggtgcgtctctggtcttcactcctgcagctgttttgcttggggtagaagtttcatgtttgcctgaaataagagcaggacttctgagggtagggaaggaaggtggtgaagccactgttgcaggcaggagcaggagttaggatcaaacggaacagggctggccgagtgatgtcacatctctgggctttggtttgttcatctgttcttattattattttgagacagggtctcgttctgtcacccaggctggagtgcagtggtgcaatcatagcttgctgcagtcttgaactcctaggctcaagtgattctcccacttcagcctcctaagtagctgggcttggaggcacttgccactacacccagctaatttttttattttgtagagatgggggtctcgccatgtcgcccaggctggtcttgaactcctgtgttcaagtgatcccaca

SEQ ID NO: 125728 - DNA, 1005 bp, Homo sapiens
gtacacatagagatgagtgtggatgtagtgtcaggtgatgaccagtggatgacagacacagcaggggagggaatgagggatggaggaggctgtgttaggctgccaaagtgctatttgagcaaacacctgaaaggagggagggagggagggagggaaggaaagatgggtggatggatggatggatggatggatggatggatggatggatggatggatgaatggatggatgggcagatggatatacagccgggtgggtgggtgggtggatggatggatggatggatggatggatggatggatggatgaaaggatggatggatgaatgggcagatggatggatggatggatggatggatggatggatggatggatggatggatggacggacaaccgggtggatgggtggatggatggatggatggatggatggatggatggatggatggatagacggatggatggatggatggatagacggactgatggatggatgtttatggatttctaggagaaagggatctgagcagacagaagagcaggtacaaaggcattgaaccgagtgtatgctcctggcctgtaggggaagcaccaagggggcggcaggggtagggggagcacacagaggcatgaagggggcagatgaggccagaggtgatgaagtcacatacgtaggactttggctgtcaccaaatgagatgggagccactggacattttttatttttattttttgagacagggtctcactctgttgcccaggctggagtgcagtggcatgatcttggctcactgcagcttcgaactcctaggctcaagtgattctcccacctcagcctcccgagtagctgggaccacaggcgtgcaccaccacacctagctttttgtattttactttctgcagagatggggtcttgctgtgttgtccaggctggtcttgaactcctgggctcaagccatctgtccacctcagcctcccggagtgctggaattacaggcatgagtcacc

SEQ ID NO: 125729 - DNA, 1969 bp, Homo sapiens
gagggtgggtctgtttcatctctgtagtatcctggaatggaatgagtgagtgtcagaggagagaattgtcacttccccaaacccagcctggcaggaggaaccatgaagtcttaacacagttccgctgccacctggtggcagcctgctcaatttgcaggcttagtgggtacccactagttctatcacatgctacactcagtcacatacctagaaagacccatggtcactcctagtccacagaaccttccaaatcttcattcaggctggcggtgccctagatttgatttcgcaaacaagaatgtgagcccaggaattgtggacctgtctgcgtgtgccatttctgaggaaataagttacccaccgccccagccccagccttcccccattccaagatcccaccacagggccaatgttggtaccagcagagcaggaacatcagccgagaagctgccaccaaccagcctcaacagactgccttttgccttccagacagccacggtgacgtgatccggcccctgcggaagcaggtggagctgctcttcaacacacgatacggtgagcaagaagtgggacagggtctgggggcatcccggcccccctccagccgccctgtttgcagaagggctttggtcgcatccccttgcctgttcccatcccagctgttctctgggcagggacaagggagagagggaagggaggagctgggacccatcatgaggatggggacactagagaggctgtcactcaggctccctggctcactcactcacactctgcctcagtcgcaggttggagaggccactccctcccctgtaatgtcgccagccctcagccctccgccctcaccctcatccctccgccctcaccctcatccagggtcctcaagaagactcataataagaataagataagataacctcagtggtgtgccgggcatgaggctaggtgattccccatgtttttctttttttttttttttttttttgaggcggagtctcactctgttgcccaggctggggtgtggtggcgcaatatcagctcactgcaacctgcgcttcctgggttcaagaaattctcctgcctcaccctcccgagtagctgggattacaggcacctgccaccatacccggctaatttttgtagttttaatagagacagggcttcaccatgttggccaggctggtcttgaactcctgaccttaagcgatctacccaccttggcctcccaaagtgcagggattataggcttgagccactgcacccggccccctgtgttcttgtatcccatctcacaaaatccccgtgtcctaagacccactttacagatgaggagaactgaggcctggtaaaggggtgtgactcgtccaaggccccacaccactcagtggcagagatcgggttcgttccaaggcgtggtgttgtgccacagcagcgtgtggggttgcttatggtggcaggagggacactcggggggccttactggaagggcgaggcccagtggactcggggaagcaatgccgaatctcagcagccattagtggtggcttctgtactgcctgggcatgagggcatggacccagcgtgggccttggggtaaccctgggttgagttcctatcccctggctctgctgttcagtggctctgtgacctcagacaagtcacgtcccctctgaactccaggttcctttcctgcaggctggggggccactctttccacatcccaggaaagctggcaggccctcaaaagggctctggcagctttgccccccgacacaggcacgggacacaggggttgaggctcctggccctgtggcaccgggtggccctacagcagccatgtctctgcagccaaggccattggcatctcggagcccgtcaaggtgccgtactccaagtttctgatgcacccggaggagctgtttgtggtgggactgcctgaaggcatctccctccgcaggcccaactgctt

SEQ ID NO: 125730 - DNA, 1035 bp, Homo sapiens
gaggatacggtgttagcaaaggcaggcaggccagcaagagcaggaggccggggagagtgggccctcgggcttgctttgggaaggaggctggacatgtgggctctggacaggtgggccctgacccccaggggatcaggagcctgaaatcctgaaagggggactcgaaaccttaagacagagcacttttccagggagctcaggaggctgagacagaaaagcctcagcttccagtgtcaacagccttttcccctccttccagccaaagacagcagcattcccaagcgcaagagaaagcgggtctcggaaggaaattccgtctcctcttcctcctcgtcttcctcttcctcgtcctctaacccggattcagtggcatcggccaaccagatctcactcgtggtaaagttgcaccgatttggactccggcactcatctctgtggccctcacccctctgtctggcagggccgtctactctgggatgtgggcccaggggacggggaggcactgggctttgagtggggaccttccggcctcgggggttatagatgcatccacctgtctcacccaagaggtagcccatccttctcgtggggtactcacaggcactcaggcaggaattcacatcctcgctgggcagatgggccggctgaggtccacctgcccacacccttcagccgcaccagagctggagacatgaaaagacatggctggcgggtgcagtggctcacgcctgtaatcccagcactttggcaggtcaagtcgggtggatcacctgaggtcaggagtttgagaccaggctgaccaacacggggaaaccccatctctactaaaaatacaaaattagccgggcaaagtggggcatagtggctcatgcctgtaatcccagctacttggaaggctgagataggagaatcgcttgaacctgggaggcagaggttgcaatgagccgaggtcgcgccattgcactgcagcctgggcaacaagagtgaaacactgtctcagaaaaaaaaattagccaggcatggtggcacgtgcct

SEQ ID NO: 125731 - DNA, 1085 bp, Homo sapiens
tcccaggaagcaccgcgccggctagccccgaacccgaggacgaggcaagcgcggcgcccggccctctccagcaagggctgtcaatggaggcgagggtggtgggagcgagaacatggctgcacctggggcctgcgcggccgcccgggtgggggaggggagccggggtgcagaaacggaaatctggacgggtggtggctccggcgtcgtccccaccgagcgccagccgccgtccaagtccgccacttgctcttgcaccccacattccttgcaaattgcgaggcagggaagctgcaaaagccggggagccccgggctgggccgtcgccctccttgctctgcaaaaggggagtccttccgccttgcaccaccctccaggacacaaagaactcctctctagtgttttccaagctggcctccaaagagaccgttgcccccaagttcggacaggcgagaggggaggagaccttgtgttttaattcctcccccagaccctccgcctctatctctccctcaggatttggaaggaaacttgcaagggagtgggagcagaaatcctgactcgtagctcctgttttgttctgtcaaccgcgatgcgatttaactcaaactcctccccctaccactattttttgcttctcaacttgaattagccggtgggttttgaaaatggagagacattactgttcacctaagttaaactccaaaactttacaaccccgaggccgacgatttttagatgtttatgtaaagcacgagattgagtggttttttgattcccgcccgcccccccacccagtaccacccactggggattcgggccacgacggccatcctccccccacccgccgcttctcggtaggtggcgaccacgacgctttttccagcctccaagcctttgtcgctagcgagaaaactttccgagcagccagtcttttgatgtgggttccaaaaacctttcctttcaatctgggttctccgattggcattccccatcgtctctcttgcacagaccgcacccaataaagcctcctctagaattttcatgttggattttttttgaaaaatacatggagagcgtaaagctca

SEQ ID NO: 125732 - DNA, 1053 bp, Homo sapiens
ccttctgaaaaacagattttagttttggcttttagtacttaataattatagggagaacatggaaatattaaataccaacaatttggctgggcatgatggctcatgcctgtaatcccagcactttaggaggctgaggcgggcaaatcacttgaggtcaggagttcaagaccagcctggccaacatggggaaaccctgtctctactaaaaatacaaaaaaagctagctgggtgtggtgtcaggtgcctgtaatcccagctactccggagatccagccaggagaattgcttgaacccaagaggtggaggttgcagtgagccgagattacgcccctgcactccagcctgggcgacagagtgagactctgtctccaaaacaaaacaaaaacaaaacaaaaaaccgaaaaaaccccaacagtttcagagatgaaaagatttaggcggcctaaaagattgccaaaatgtagtattacatgataatctaaactagttttaatgcagctgaatcctggtttagactaaagtcagctgattgaactactagtattagatcttttggatttattttaagcactattttaggacaaaatatctaacattttacttgatgaattttaactttttcttaccactcattgttttgaagaaattactttgtaaaagtttgagatgtcactaatttttcccttggcattaagcgatacatgaattcattttattcttctgactgaggatgtttctgttagtgtatacattcaagaatatgatgatgccattagtcatttaattttgttgaaacttggctttagtggctgttaataaaatgaattggttggccaggtgtggcactttgggaggctgaggcgggcagatcacctgaggtcaggagttccaagaccagcctggccaacatgctgaaaccccatctctactaaaaaaaagaaaattagccgggcgtggtgacatacacctgtaatcctagctactcgggaggctgaggcaggagaattgcttgaacccaggaggcggaggttgcagtgagccaagatcacgcca

SEQ ID NO: 125733 - DNA, 1021 bp, Homo sapiens
ccttttgtactgagggcactaattgcccaggtgccatggctgttcgagcaccttgtacaagattccaccctttcccaggggagggccatgccagctcccagctctgggtgcagctacatcagtgttcagtgcttcgtctgtccggccctgcctgccttccgcctcccaagtgctgtaattgacagtgccccccagcaagcctgtgtaaactctcagtctactacttggagaatctgacctataagagattacaagggaattgtgttttttttttccttataaattctgtgttgtcttttgtttaaaatcaggccaaaaactatctcgaaagagaagtacctttaaaaaatgttgttagtttttttaattcatcgagcagaaatgatgctcttaaacgtccgcctgtaacatgatgtttgctgtttgtattgtagtgtaaagaactggccaagtccaaagccgaagtggcctgcattgcagtgtatgaaacagacgtgtttgtcgtcggaactgaaagaggacgtgcttttgtcaataccagaaaggattttcaaaaagattttgtaaaatattgtaagcattgtatttttatcttttgcatttcattaattttaagcctaaatatttgtaggtaagacaagttatattattttctttctttctttctttctttttttttttttttgagatggagttttgctcatgttgcctaggctggagtgcagtggcacactcttggctcaccacaacccccgctgcgtgagttcaagtgattctcctgcctcagcctcccaagtagctgggattacaggcacgcgccagcacgcctggctaattttgtatttttagtagagacggggtttctccatgttggtcaggctggtctcaaactcccgacctcaggtgatctgcccaccttggcctcccaaagtgcagagggattataggcgtgggccactgcgcctggccaagttatattttcttctaaaacagaatgaggtttaaactaaaaaagattttc

SEQ ID NO: 125734 - DNA, 1066 bp, Homo sapiens
ctagactcaagcagccctcacttcagcccccagacagctaggactgcagacatacaacactatacctggctattttcatttttttgcagagatgtgtccttgttatgttgccaaagctggtcttgaactcctgggctcaagcaatcctcctgcttcagcctcacaaggtggtggaattacaggcgtgagcccttgggcttgtcctcttttttgcttttataacaaatcacaaatgacttgctattttgttacaaaataacaaatcattggttacaatgattaataaatgttaaagaatggttaggaaatagttttttcctgttagaatacatgataaaagtagttttccctgttaggatacaggaaaacgatttttactaaaaaccaaatattaaggtaatggatatggaccttattattatttttttattttattttttattttttttacaggtgttgaagaagaagaaaaagctgcagagatgcataaaatgaaatctacaacccaggcaaatcggatgagtgtagatgctgtagaaattgaaacactcagaaaaacagttgaggactatttctgcttttgctatggtaaaaacaatagatttaatttttctaaaagatacattatataattgaattttctaaagggaagcttatgtaattgattcgaaaatcatataacacacattttcagtgactgaatggattagcaataaccttactttcttccacttccattttgaaggaacccaggaggaagtgtggccagtagagctgtttctttctttctgttttttttttttgagatggagtctcgctctgtcgcccaggctggagtgcagtggcacgatctcagctcactgcaatctccgcctcccggtttcaagtgattctcctgcctcagccccctgagtaactaggattacaggtgtccgccaccatgcccggctaatttttgtgttaaattttagtagagatggggtttcaccacattcgccaggctggtctcgaactcctgatctcaggtgatccacccaccttggcctcccaaagtgctgggattaca

SEQ ID NO: 125735 - DNA, 1022 bp, Homo sapiens
cccaaaagatagatagaaattgaagtactaagttcagttgataactctttttttttgtggagacagagtctccctctgtggctcaggctggagttcagtggcatgatctcagctcactgcaacctccgcctcccggattcaagtgattcaggtgagcgccaccacgcctggctaatttttgtatttttagtagagatgaggtttcaccatattggccaggctggtcttgaactcctgacctcgtgatctgcccgcctcggcctcccaatgtgttgggattacaggcgtgagccactgtgcccggcccaataactcttatttatgcaataaataaatatgtcagttttaagctgagtcaggtttgcacccaccttggtcaagggagggatcttaacactttgagacccagagactttgaatgctgtgggaatggctgtcaccagcacgtggcttgatcagggctttcttctccttgcagttgtggccccatcaaagtgaaaactgaacccacagaagattctggtatgtactagcacttttagaatcaatggtgaaattaaggaagacttttccttagtgtagaagtttatagtttgactcaattattgttttgttttgataagaaagaggcagtcactactaatgtattccaactgtgacactatttgttaatgttatcacattaagacccagaaaggtaatttgctcagtaagtggtaggcagagttctttgccagttacatatgtttgtagataaaatgtatttttttttcccgttgtacagacatataatgtaagaggtcagctgttctatagtgctttttacaaaaatcaatagaatgcccccttcgtctccaccttccttctctgcactcctgttttccactctccaaggagaccattttcaattctcaaataaaattgctatttaattccttatttatttatttattttttgagatggagtcttgctttgtcacccagactgaagtgcagtggcacgacctcggctcactgcaacc

SEQ ID NO: 125736 - DNA, 1100 bp, Homo sapiens
gggcaaagctttatgcagaaaggtgtgctttgtacccttacacaaatccctgtaataaaagggatgtattaggcagaaaaaaaccaatgtatctcattattgaaattgttgaccattatgctatctctcctttggaatactgagttattaaaactgatgtttataagtgtgtttcaatggtttataaaagtatttttaatattaagtgaaaagggagtgtggtaaaattttctttgattctaaagataagaatttgctggagaaaagagcagcacataattgcagaatattaataaatggttaaaactttgcattggctgggattatagtgattttttaccttctgctacctagcaaacttttgtcttttcaaagacgtaaagtctttacttaaaataaatatgcattgctgtatttatagggagggcagagaggatttccctacacaatctagctgaaagttctcacatgcaatcatatcattgcatttgcttttctaggcatttccctggaaatggcagctgtgacagtaaaggaagaatcagaagatcctgattattatcaatataacattcaaggtaatttgaattaatgcaatttttctttctaaaaattattcgtggttaaaattaaaatttgctcatcaattgctttaatttcttaaataatattttattgatcagttcttgattgacatatatattgtaattcagtcccggggataaaacatttaaaaatggggctaaaagatcaactcagacaatccagaggggatatgtaaaatagccatttgtgttcttaaaaggatgagcaaaagttgtggcacaatttagaattcaatcccaggttctagtgttgcaaaataaaacaaacctattaggcaaatgcagataatgtcagcttaattttttctcactgcataattatagtatattaaacacttaaagtaaaaaatctggttagctttgccatctacatatctaatacaccatcttcattgcatccaagataatgaaatatctataaccccaaaagtttcctgtgtccccttgttattcattgccctgcccagtattcaggcaacacggatctgttttctg

SEQ ID NO: 125737 - DNA, 1015 bp, Homo sapiens
gtctacattccaagacttgctcttctttgagattccaaatagaaactatttctttatttctcatgcaattgatttttttctctgatgtgtcctttgcctgtaatgtgtagtgtggtgcatctttgtgaaatttcttaggctttagagaatgaagcctttcaaacaacttcggatgttttcccaattctcttcagagatagttaactgaactgtggtcatattaatgccaaaatgtgttttatattaaatagccattgaaaacacaatgttttgttttctattttaaaactattattattttaatcattaaaaagtttgatgataacatgtaaatgtgttgtcaaaatatagcagtttgtgaagttgaatttaactcagagtactttctgtgttttggaaagaaccttattagaaaaagtgcccgctgtgctggaagaaagggagaatgaattaatagctgttagtttgtcacatttctatttcagtagagattcaaggagatggtttacgttattttagagattctaaggaaggtatataacatttggttctgcatttttcttcagtatgacaaaagagtaagcaaatatttgccaaagaagaaacaaataaacctgtgagataaacctgcatttgtaatctgtatgaagtaaaagttacagtttactgttatgaacattgtactgttttaaaaaacccacatcttccattttagacataccattcccattcaatccatatgtccagtcatcttcaaaatttcttttgactgtttacatatgaattcacctgattacatttttccattcaccaagaccataaattgacattgctcatcttgtcagtcttttttttttttaatttttttctttttatttataaaaaggccattccatgtatctcacccaaatttgttgactaaagtcaccccacatttttttttgggggggattacttttgaagtattatctttgtatcccaaagcaggcccttctgaaactgatgatgttgatga

SEQ ID NO: 125738 - DNA, 1042 bp, Homo sapiens
aggtttcatcccgctttatgagtgcttctgaatccaagtcattgttacctgaatttgcaaattaagttgtgatattcgtgactgttaaattcctgtaattagattaacctctttgcttgcttgtttgttttctctcctattttagcttaaagtatcagtggttgagaagagcttttcggacctgttactaccccaagctgtgtaatatacttgtataacagaaataccttctatacaaacctttttttctacttttagatagaaatgtctactttttcagcagttctgtgaattaaagagcagagtgactgtgggtctggaatggctggtgtacttgggaatgtactatcaggattttacagcaatgctgggaaatgacagggaaaatgacaggaatgaatctcaccagattttttatgtactcagcagagccttgagttacggtgtttattttccaatcaagtgaagatatctcctacttctcctactggaacatctcagcttctgcagtgaagaaaaattcctgtgatagttcagttctttagtttttctatttgaaaaaaaaaaatcatttaaatgatcctttgttcacggctctccttaatgactgagtgaacagttcctatctgtatatttgactaaaccttttcctaagctatctctcatggttcctatgtttttttatcataattaaaagcaaaaccatctggatcacctaacagtcagaggtcagtatctcagcgtgtgaattatagaggaaatacagagagaacctcttccacttttacttttcgtccaaataaaatgcatggtgtaccagaagttgaagatcgggttgaggattggggctagctcgatgacactaaggccccaacatcgcgggacctgctgtggcgcggattcttaggaacgctgttctagccggccccctctccaggggtcgccgtggccggcattatttcctagttcttcttgtaaccctgaggtgccagcgcggggagtgaggaggggtcagggggctaaggatgcaacctctgacgtt

SEQ ID NO: 125739 - DNA, 1028 bp, Homo sapiens
gtatctcttaggcttgtcagacaccgagtgtcccgagcaaaaacaagtgtttgcacacccaagtccaacccagaaatcccccgtgcagcctgtagaggacctagctgggaacttatgggagaagttacgtgaaaaaatcaggtcttttgtggcatattctatcgcaatcgatgagatcacggatataaataataccacccagttggccatattcatccgtggtgtcgatgagaatttcgatgtgtccgaagaacttctggacacggtgcccatgacgggtacaaaatctggcaacgagatcttttcgcgtgttgagaagagcctgaaaaagttctgtatcgactggtcgaaattagtaagcgtggcctccactggcaccccagcgatggtggatgccaataacgggcttgtcacaaaactgaagtccagggtggcgacgttctgcaagggtgcggaactgaagtccatctgttgtataattcatccggaatcactctgtgctcagaagttgaagatggaccacgtcatggacgtggtagtgaagtccgtgaactggatatgctcccggggactgaaccacagtgagttcacaaccttgctctatgagctggacagccagtatggtagcctcctgtactacacggagattaagtggctcagtcgcgggctcgtgctaaagagatttttcgaatccttggaagaaatcgactccttcatgtcatccagagggaaacccctgcctcaactgagctccatagattggatccgagacctggccttcttggttgacatgacgatgcatctgaacgctttgaacatctctctccaaggacactcccaaatcgtcacgcagatgtatgacctgatccgggcgttcctagcaaaactgtgcctctgggagactcatttgacgaggaataatctggcccactttcccaccctgaaattggcttccagaaatgaaagcgatggcctgaactacattcccaaaatcgcggaactcaagaccgaattccagaaaaggctgt

SEQ ID NO: 125740 - DNA, 1037 bp, Homo sapiens
aatgctcaataaatgctagttgctgtcttaataatatgtgttcttgggccaggcacggtggctgacgcatatagtcccagcaccttgggaagccaaggcggacagatcacttgaggccgggaatttgagatcacctgggccaacatagtgaaattctgtctctactaaaaatacagaagttagccagacgtggtgtgcacacctgtagtcccagctacttgggaggcttgaacctgggagatggagattgcagtgagccgagattgcgccactgcactccagcctgggcaacagagtgagactgtctcaaaaacaaaaacaaaacccccgtaaatagtatgtgttcttggatttgataaataacctgtcatttactactgaacaaacttgacattataaatcagttcatgctttgtgggaactgcttttcagatttcatctgctgcttgcggctatggattcacactgctgtcctctaagactgcggatgttacgaaagtctgggggatgggactcaacaaagattctcagcttggatttcacaggagccggaaagataaaagtgagcatccctaccttgtctcctctttgccgggattggtctgagaaagctctttttttgtattttttttgagacagagtctcagtctgttgccaggctagagtgcagtggcgagatcctggctcactgcaacctccacctcccgggttcaagtgattctcctgcctcagcctcccgagtagctgggattacaggcacatgccaccatgcctgcctaatttttgcatttttagtagagttggggtttcactatgttcaccaggctggtctcgaactcctgagctcaggtgatccaccctcctcagcctcccaaagtgctgtgattacaggcatgaggcacagcgcccagccctccctttggtgttcaagaacatggttacataaacaaagaaatagcaaagaaatagaggaagacttaaagggatgttgtttgaaaccatctgggctaggttattttttagcctctttggtaaca

SEQ ID NO: 125741 - DNA, 1055 bp, Homo sapiens
tcttaactctgatttttttttaacagctttgttgaggtataattgacataactgtacttgtttaaagcatgtgacattttgacacgcatacacctgtggaaccatcccaccactaagataatgaacatccatgacctccaaaagttcccacatgcctgtaatccctctctttagttccacccgtgtccccaggcatccactgatctgtcttctgtcactgtagataggtatgcattttccagaatattctataaatcatacatttaagttttaaatatttggcttttcttactgactttgtcagatagatttggccagattgttagcagtaaaaattaaaagcattattctcttcccttcatgttattaagaaagatgtcatgaccgtggatgaaatcgtaaaagaatgttgccttcaataaagcatctaactgtcttctcttttattaggcctgggtctctgaagagaggcctcaattctcagagctcagatgaccacttgaataagagatcccgaagctcttccatgagctccttgacaggcgcttacacaagtggcatccctagctccagccgcaatgccattaccagttcctacagctccactcgaggcatctcacaggtacaagtacagctcttgtaatgtggggggcatgaattcccagcgttcattcattgattagggccagacatggtagcttagccatgtaatcccagcactttggaaggccaaagcgggaggattgcttgagcccaggagttcaaaaccagcctgggcaatatagtgagaccttgtctgtacaaaagaatctttaaagaaatttttttaaataaagtaattggttagcaaaagtttactaatcaccttctatctgttggacattaggattgtctctaactaatagaaaatacagatcattgagtgatcaatataggccagcagaacggagtagaaagcccggaatgtaaagcagtgcatgtgtgcgagctgattcgagacagagctgtgatgtagataaacggacagagggtgattcgaaaggtagactgagtcc

SEQ ID NO: 125742 - DNA, 1022 bp, Homo sapiens
tgctctcatgggactcttgagggaaacaccattttataaggctgggtatggtggtgcatgcctgtactcctaacactttgacaggccaaggtgggaggatcgctggaacccaggagctcaagaccagcctgggcaacatagggagccctcgcctgtacaaaaaattaagaaattagccaggtgtggtggtgcatacttgtagtcccagctgcgctggaggctgaggcaggagaattggttgaacccgggaggcagaggtttgttgcagtgagccaagattgtgctattgcactccagcctgggcaacaagagtgaaactctgtctgaaaaaaaaaaatttacctttcagaaacttagggattttaaacaaccattttctggtctagcatggaatctgtgctccatagagatagtataaggtcccagaaatgtgagaatacactttaaagggacaaacaaagtcatgtcatttcatttgagacttttttgatttgtcgcaggcgccatgatagcagtggcagtggacattcagcatttgagcccctggtggccagtggagtccccgcttcttttgtgcctaagtaagtgcgagtccatccagatgaaataccaactgtttggaaaaaggcctgatcagagctgttgccctatagattttcctctttgttttttgcattgcttaattagttcaggttcatgtctttgaaattaggaatattctgagtaacttgtcacaattaactgccttctgtctaattccttttaatgttcttgcattaatatggatgaaatatgctgagactagaggttttataaatatatttaataaccaagcacatacacagaaggattgcaaagtttgtgcagcggataagacagtatgaaacttaaatgtttaatttctacatgtcagtttaaaaacaaattggaggaagaattgggtggaaaggaaagtggctcaaaagtctgtgtggaaagacttaggataacttagatacctcatctgagtcagcagtgtgatg

SEQ ID NO: 125743 - DNA, 2469 bp, Homo sapiens
tcgctgggagccatgcaggaaaccgcaagagtcagaaacaggcgttgaaggcaggcagcattttccaaaacagctgtgtctcgggagctgccgggctgtagcgtctccccgagtcgcgcgcgcatgacgtggcgggcgcgcgatgacgcgacgcgtggcgcggtgcacgctgggatatttaagtctcctccgcggcgcggagccgcgatgtctccggcggctgcggcggctggagcaggcgagcggcggcggccgatagcgagtgtcagggacggccggggccggggctgcggcgggccggccggggcggcgcttctcggcctgtcgctggtcggcctcctactgtacctcgtgcctgctgcggctgcgctggcctggctggccgtggggactaccgcggcctggtggggactgagccgcgagccccgaggttcgcgccccttgtcctccttcgttcagaaggcgcgacatcggcgaacactgttcgcttcgcctccggccaagtcgacagccaacggaaacctcctagagccgcggaccctgctcgaaggacctgaccctgccgaactgctcctcatgggcagttacctgggcaagcccgggccgccgcagcccgcccccgctccggagggccaggacctgcggaataggcctggccgccgcccacccgcccgcccggcgccgcgctccacaccgccctccccgccgacccatcgcgttcaccacttttacccctctctccccactcctcttctccgaccctccgggaggccttccccacggtgagatgcgctgattttcccagatcatcctctggctcggctggcttgaaatcgaggacttgacttttaaatccgatttgcattttcatcaaatccgaagggaattgtgtgtggttttgccctccttaacaccttggtgtgtgccagccgtctcctggcctctgactcttggtgtgagatgtgttgccaaaacgattcccttctttccagttctaaaaactccccgaattttagtgcagtctagatttagtctagatttagattttccctctcaaattgttgcaatccattgttgaggcagctgttaagcagctgtcactctctgctcttagatggaataggggaaagttgccataaaaacaacgtgttctgtgttgcgtagaaagagatttaagttctttggaaaatgtcttaactggtgggtttttaaccgtctaaaattttgacattcttttatactttgtttccatgatttgtctcgcattctctgcagggatcgtgggactttaccagatcggtttgtaataacacctcgaagacgctatccgatccatcagacccagtattcctgtccgggggtacttcccacagtgtgctggaatggttatcacaagaaggctgtgctgtcccctcgcaactccaggatggtgtgtagcccagtgactgtgaggatcgcccctcctgacagaagattttcacgttctgcgatgtgagtattatcgttggaagaatactctcccttttcgtgtccactttattcttctccagttgttcctgtgacaacatgactacaacgcaaaaaagaaaggacgaatctgcttgtttgaatgagaaataccaaattctagtaaaaccgtttgtttttcactttttgccgttaacgaaaaagtagctttacttgctaaggggaactgttgtgagtgtataaattatactttggcctgttggttagcttctgatttccgtttctgatatggcatgggaattaaaatatcttacggctagaatcttgtctttcattatagaccagagcagataatcagctcaacactgtcgtcaccatcaagtaatgccccagacccatgtgcaaaggagactgtactgagtgccctcaaagagaagaagaagaaaaggacagtggaggaagaagaccaaatattccttgatggccaggaaaataaaagaaggtaacaggctcaggagagtactaagccagtttcccgcttggacccctatgggatgagatgtagacattcccgtaaagatacagaggccacgtccagtttgtgagccttcataggcctccttctttggctttcatgagagaacctaataacaagggttttaatgctgttcatttcaaggcacaggttagatcgatgtcataatttaccttttctgtgagtagcagagataagctgacagctattagccatgttagcctcatgcttctgtagaaacgtgttaaaagtttattttcaagaaagaaggctctaagtcttccggtcggaattttgtggtgttcagttatttgggtaaccaccagttctagtgtcttttttttttttttttgagttggagtctgtctctgtcccccaggctggagtgcagtggcccgatctcagctcactgcaagctcagcctcccaggttcatgccattctcctgcctcagccccccgagtagct

SEQ ID NO: 125744 - DNA, 1054 bp, Homo sapiens
tgaggcaggagaatcacttgaacccgggggacagaggttgtagtgagccaagatcgcaccactgcactccagcctgggtcacagagtgagactccatctcaaaaaaaaaaaagagagagagagagaaagaaatagaagagaagagccatcttggcagggttattttatatctgagcaaggagtttaaatgagactagtttagattgtctgctgatgcagccgtccatagcagtacccctaaaatcccaccagaatacgggtccctctaacccagtggctggaagaaccactgtctagagcaacttttcttggaactgtcccagctaccaagtcagacaccaaggtttatgccaccaggtaacacgggaatcacaggtacatgtcgctccggtcagattagttggctttggcccctcgaccctgtgcaggagctagttctcagcttgcagctggaagttccctcttagctccttagtctagaggggtctcctggctccatttgaccctggtctttaataaccggtcagcatcttgctaccttctaccacctttccaaatctctggaaatcctgccagggaaagcctccagttccaacattggctttccaagcaaactggctttgccctctctctgccatccttgtcctccagagactgcaccacctgtagcatagaaaaccaccaccacggacctgccagccattggcgcagcaaaccagccagctgtttgctgccaaattccttcctctcccaggtccagaccaaatacaagatcagcaccacaccgtggtgttgtcaggagccaaagcaacaggaaacaattcaatgctgttgggttcgattctgagagtagatttttccagacatgtctttcaggtgaccctcaactacctcaggtttgaaggccctaaatgaaactgattaccactcatagggacaaaccgagggggttcggttacatcttggtgataatgcagttgtctcaaacttataacagactctttcacatttcagtttgcagggatagggttgggtttgtttttcttctgttttt

SEQ ID NO: 125745 - DNA, 1019 bp, Homo sapiens
tgcagacgtctgccttggcatcctcttgaataggaagatcgttccaccttctacgcaattgacaaacccggaagatcagatgcaattgctcccatcagggaagaaccctatacttggtttgctacccttagtatttattactaacctcccttaagcagcaacagcctacaaagagatgcttggagcaatcagaacttcaggtgtgactctagcaaggctcatctttctgcccggctacatcagccttcaagaatcagaagaaaggccaaggtgctggactgttactgacttggatcccaaagcaaggagatcatttggagctcttgggtcagagaaaatgagaaaggacagagccagcggctccaactcctttcagccacatgccccaggctctcgctgccctgtggacaggatgaggacagagggcacatgaacagcttgccagggatgggcagcccaacagcacttttcctcttctagatggaccccagcatttaagtgaccttctgatcttggaaaaacagcgtcttccttctttatctatagcaactcattggtggtagccatcaagcacttcccaggatctgctccaacagaatattgctaggttttgctacatgacgggttgtgagacttctgtttgatcactgtgaaccaacccccatctccctagcccacccccctccccaactccctctctgtgcattttctaagtgggacattcaaaaaactctctcccaggacctcggatgaccatactcagacgtgtgacctccatactgggctaaggaagtatcagcactagaaattgggcagtcttaatgttgaatgctgctttctgcttagtatttttttgattcaaggctcagaaggaatggtgcgtggcttccctgtcccagttgtggcaactaaaccaatcggtgtgttcttgatgcgggtcaacatttccaaaagtggctagtcctcacttctagatctcagccattctaactcatatgttcccaattaccaaggggtgg

SEQ ID NO: 125746 - DNA, 1031 bp, Homo sapiens
gcctccacctccctgggctcaggtgatcctccccacttagccccccgagtaactgggactacaggcacacacccctacacctggctagtttttgtattttctttggtagagacggggtttcactatgttgcccaggctggtctcgaactccagggctcaagtgatcctcccacctcagcctcctaaagtgctgggattacagacatgagccttcatgcccggcctcctttcttgccccacccctggctttggcgttgctgtcatccaccatccttggcctggccaagtcagcccccactgcaatcagtgtgtccccgggagggaatcagagtggcaggttaaagagccatcaccttcccagtccttgcaacccggtggtgggttggacctctgggaagtagggactgtttaactcaaccagcgtctccctctttccttgtggtcacctttgcagtcagaagcaaactgggcagccgagttcgccgagctagagaaggagcgggacagcctggtgagtggcgcagctcatagggaggaggaattatctgctcttcggaaagaactgcaggacactcagctcaaactggccagcacagaggcaagtcacggacatggacacgagcgagcacctgtgaattcccaccgagggcctctgcgcatgcacggaggctgggaggaccccggggctgctgagaaggggtttggggccttggcctgattgtgcagacattctgtaggtgtaatgccagcaggccctgcattgcctgcagagtccatgagggaaagcaaactgctgtcttttttgtatgagaagagaagtttggcatctcctcccagccatgagaagcgggcgcagtgatccatccccacagcctctgtgggcagccgcacatcgtgggcagccgcacatcctgtgcacacagttaaagcgcctttctctgtctcaggcttactggcttggacctcattggccatgacttgagctaagatgctaagagccccagccaggtcatcctgctcaggttcattat

SEQ ID NO: 125747 - DNA, 1754 bp, Homo sapiens
atgggaggatcacttgagcctgggaggccaaggctacagtgagctgttatcatgccactgcactccagcctaggcaagagaacaagaaccaggccctaaaaatataaatacataaaattaaaataaaaaaattatccaggtatggtggcacacacctatacttccagctactcaggaggctgaaacaggaggatcacttgagccaggagttggaggctgcagtgagctatgattgcaccactgtactctagcctgggcagtagagcgagaacctgtctcaaaaaaattaaaaaaattaaacaggtctgaaccgtttaattcgagaaagggggcattctcccatatcactcaactgacccacacacagaattctctggctctctgacttattctcactcctttttggtcaaccacagaatttatttgacaacaagtttgatgacatctttggcagttcattcagcagtgatcccttcaatttcaacagtcaaaatggtgtgaacaaggatgagaagtgagtccaagctgggttcaagcagatggttcaggagctaagttaagccatggtctgcctcaaaacactaaccaaagaggaattcttaatgatactggggcttcttagatacagaacatcttgaagggttgggggcaatggcttatgcctgtaatcccaacatgtggggaggatgaggtaggaggattttttaaggccaggagtttaagaccaagcttgggcaacatagcaagatcccatctttattaaataaaagtaaaaaaattagctgggcaggtggtacacacctgtagtcccagtaactcaggaggctgaagtgggaagatcatttgagcctgggatatcaaggctgcagtgagctatgatcgtgccactacacttcagcctgggcgacaaagccagactgtctctaaaacaaaaccgaaaacacacacaaaaaaggaatgtcttgaccctcaaatattggcccctttaatctcagaagaaaatcaataaccatggatttatgagtattagattagtatctggtaacatttagagtataatttatggcatttcaaagaattgtccccaaattaataccagcttttaatttcctcccctgagctcacaattaaaaacagagggatagaagcactatgaaagcaaactcattccccttctcttcccagggaccacttaattgagcgactatacagagagatcagtggattgaaggcacagctagaaaacatgaagactgaggtataacttggatctgctctgcctttgcgcttcaccaaaacacggtagatttgaatgttaaatttgcatcacactagccaggcacagtggctcacacctgtaatcctagcactttgggaggccaaggcaggaggattacctgaggtcgggagttcgagaccagcctgggcaacagggtgaaacccccgtcttcaataaaaatgcaataattagccgggtgtgttggcaggcacctgtaatcccagctactcgggaagctgaggcatgagaattgcttgaacttgggaggcagaggttgcagtgaactgagatcgtgtcactgcactccagcctgggcgatagaacaagactctgtctcaaaaaaaaaaaaaaaaattgcatcacctagacagtttttggaccacatccttagggtaggttaattagtagaaacaagccaggcgtggtggtgtgcacctgtgatcccagctactcaggaggctgaggtaggaggatc

SEQ ID NO: 125748 - DNA, 1074 bp, Homo sapiens
atatataagtctggattctcttaggtttcttggtcttcagtgtttagattcaaaatagagatttgagaatgagaaaaagatgttgattttgccagatgtggtggctcatgcctgtaatcccagcactttgggaggccaaggcagtaggattgcttgaagccaggagtttgagaccagcctgggcaacacagcaagagcctgtttctaccaaaaaattaaaaattagccaggcatggtggtgcatccctgtaattctagctactcaggaggctgaggcagaagactgcttgagcccaggaattcaaggctgcaatgagctctgattgcaccactgcactctagcctgggtgacagagcaagaccctgcctctacaaaaagagagagagagagaaaaaaaatattggtttcttcatgtgcatatccacccaagattaggacatagtaccaaacgattgtaattctccaagtgtttattgaacggctgccctgtccctggcattatgggaaacagctcagcggagctcagtccccacttcccaggaacttatagtcttaattgtggagagaacaaatagtccaaaaacaaagagaagtaatgaaagaagagagctacctttgtagtaaaattcccttcccttttcctatggttagatggcttatcctcagagaaagtcaatttcttttaatgttactctaaaccaaacactcctcggaagttaaatctgcaaaataacaacatgtgttctacagcaatgaagaaattagctttttgattatctactcttccaaaggatttgtagcatgaattactctttcctcaccagcaggtcactgaggaccagctttaaataatcctctgcagcatcataattgaatcccagcaccatggagtttatctccttgacagcctgtgcctttgggctggggagggggcaggaaagccaggtggctgctctgtcccctacatggggctgatgaagacacccagcacccctcaggtccttctccacccctaggttgaaagatctgttctaccgctccagcaacctgcagtacttcaagcggctcattca

SEQ ID NO: 125749 - DNA, 1102 bp, Homo sapiens
tggctaggctggtttcgaactcctaacctcaggtgatccaatgcctcagcctctcaaattgctaggattacaggcatgagccaccacacctggcccaattagtacagttttcatttcttgaagttctatttatttattttttttcaaatctgcttgttttttgcgggggaaggtggttgttgttgctgtttgagacagggtctcactctgtcacccaggctggagtgcagtggcgcgatcatggcttattgcagcctcaacctcctgagctcaggtgattcttccacctcagccttccaagtagctgggaaaacaggtgtgcaccaccaaacccagctaatttttgtagacgcaggttttcgccatgttgccaagggtggtctcgaactcctgggcttaagcgatctgccacctcagcctcccaaagcactgggattacaggcaggaggagccactgtgtctggccctgcttctcctcctttacaatttattatgccctgcatatattttgaaacagtctcttatttctttagatatatgaaccaaagtcatctcatatatgttttgtaattctattatctaaagtctttagagatttgtttctgtcctccgtcccttttggtgcattttgcccatgctgtgtagttttctttatgttcggttactttctaccctaagctgctcatcttccttggaattttatctgtggagaattctttgaagtctgtaatgaaggcaggttcctccagagagaattggcatttgcttcgattgagatcactcgaaattaaattctcagcttaaggttttgtgagtttagggcagattttccttccccaatcacagcggtgatttgaggcggtagaattcttcatagtccttagggaggacttcctcagtgcaggagtacaagcgtttgttactttattatttatctttacttcccctataccaaggaggcagtcttttgtgtgtgtgttggtggtggtggtggtgttttgagacagtttcttgctctgtcaccaaggctggaggaatggtgacatgatcacagctcactgcagcctcaacttcctgggctcaagtgatcctcccacttcag

SEQ ID NO: 125750 - DNA, 1043 bp, Homo sapiens
tggctaatttttgtattttcagtagagactggtttcaccatgttggccaggctggtctcgaacttctgacctcaagtgacccacccaccttggcctcccaaagtgatgggattacaggcatgagccattgtgcctggccttttttttttttttttttaaagacatggtcttgctctgttgcccaggctggtgtacagtggcgcaatattggctcactgcaacttctgcctcctgagctcaggtgatcctcccacctcagcctcccaagtagctggaactataagcatgcaccaccacgcctggataatttcttgtatttttgtagagacagggtttcaccatgttgcccccagctggtcttgaactcctgggctcaaacaatccacccaccttggcctcccaaagcgctgggattacaggcatgagccaccgcaccctcactgtatttctagagtagtgccaggcatatgataggccttccagaaatatatgtcgaatgaatgagtgaatatgaaaacaattcagagcagttgttccctgagtttagggaagaccagagagagatctgggtggcccctaagaatctgttacccgtgatcacggtgaaacagaaatagatgacagagagcaggggtggtatcttttagaagaaaataggtgaccatctatactgggccagttctatagttagcaagatgacatgggaggagagctatttttctgagctttatgtaacagatgtggttttgtataaatcacacttctgtaaactgaatcctctcttaaatgtactaacggagattgctatttaagggtatcgaatgccaatgtcttctgtgaaatgaataataatctcctaatttggccttagtggcaattcacattttccagaaaaaaatttacttacatcaaggtatacttgtctgagctgagaaactgacttcattcttcacatttccaccatctttattctttgctctcattcttcctttttgttactgtttttcttctcttttttttttttttttgagacaaagtcttgc

SEQ ID NO: 125751 - DNA, 1127 bp, Homo sapiens
acgaggtcaggagatcgagaccatcctggctaacacggtgaaaccccgtctctactaaaaatacaaaaaattagccgggtgtggtggcgggtgcctgtagtcccagctactcaagaggctgaggcaggagaatggcgtgaacccgggaggcggagtttgcagtgagccgagatcgcgccactgcactccagcctgggcgacagagcaagactccgtctcaaaaaaaaaaaaaagtgttcacctggtcactgtaaccccaggagacgtttctgtccccttctcgttggttttcctcaggtgttgtcttttgtctctgccgtggctgtgttttgagtgactgtagatggtaagctccatgtcagttaaccagcaaatatgtttttcaggactcactgtaagtaccaggtgtgaaaaaacagatcccaccctcatggagactctgcttggtcccttgaggacaggagacctgtcatcttcttctgctttctctgcaaaggcccatcagggttctgggtgagcaggttagctggaatgtcagtctgccctcaacagtgcccttcatgccacagaaaaggtttcccaagtgcctacagggccaggcgccacaagtcagggctgaacctggcttgattgctgggttcgagttgctcttggaccccaggaagagctgacgggctcatggtcaccgcagtcactttcataaccacagtagcagaggatgtgaaaagggtgggatgagcccaggaagccagcatgaactgtctcaagctgtttattcaagaactcggtgccggccaggcacggtggctcatgcttgtaatcccaacactttgagaggccgatgcgggcggatcacttgaggccaggagttcgagaccagcctggccagcatggcaaaaccctatctctactaaaaatacaaatattagccaggtgtagtggtgcgcacctgtaatcccagctactagggaagctgaggcaggaggatcgcttgagcctgggaggtggaggttgcagtgagccgagattgtgccactgcactccagcctgggtgacagagagagactctgtctcaaaggaaaaaaaaaaatcagtgctgctcccgtggctgcacagcttgtggttgg

SEQ ID NO: 125752 - DNA, 1045 bp, Homo sapiens
gaggcggggcgcgggaacgacggcggccatggcggcctcggggcccgggtgtcgcagctggtgcttgtgtcccgaggtgccatccgccaccttcttcactgcgctgctctcgctgctggtttccgggcctcgcctgttcctgctgcagcagcccctggcgccctcgggcctcacgctgaagtccgaggcccttcgcaactggcaaggtgagcaggggcgggccgggatcgcggggcgagtccttgtcctccgactttgccggttcctgggctctagcctccgggactcgccccttcaggcctcaccgccagtctccccctgtctcggtcctcatcaccatgcccgccccccggaggaccgacctccagcaccgtctcttgctctccgtgttccacacctttgtctgcagaccccatcttcgtcatcactgtaatcccttccctacccgaatttgttcccttccctgtcgccaccagactggttaaggccccaaatccattcgctagcaaatccatgctcgctctccaagggtaaagatttttcgtctccccctcccatttcacatacacacctacgtctgctttaggcctaagccccactgaaaaacgtttttctctcacctacatcacgacaattggactttatccacaaacccctataagccctataaacgtcctgccctcttgagatttggaatttcttctgctttttcatctgtatcttaatcttgactgccattcccagctcatgggggtaccagggtgtcttctgcctttggagagaagtgtttgtttttctctaggggagagaaattttgcagaccaattaagtataaacatccattcctgaaagacattcctagtctccgtgtcttcctcattttctcgagaggaacacaggaaatttgcatatctcctgctgttttgcaaagcacacacactgatatgtattaatttcgtttaaccctcacaaggatcccatgacgtaggacctgttattggcccgttatctagataagattgaggtttcatgcagagaatcgcag

SEQ ID NO: 125753 - DNA, 1050 bp, Homo sapiens
gaatatcaggagccactcaagggccaggcctggagacttggaacatgcagggtttagggcaacccccgccagccacacagctggggaaagggtttgctgcgaaatggtccactcttgcgtgcacttcctcccgcctgccccccgtgcggtgtccttgtgggattagaggatgttccagcacactgagagtcagtggctgtcattttctctgtcttccagggacccagtcccagctgctgccttagcttgcaccccaggaccaccctgggctggtgctgacaccactgggggctgtctgttatgtcagccccagtccaagactgtggctgtcttggcaggaacctggctgagtgagccccttctcctaccccgtgcagtgaccatttcctgcagccccaggggcaaggcccagcatttaggtgggcaccccagccagcctcaggggcaccctgctaccctctgctgacatctgctgtttctgtctcctaacagtttcatgatcaacatgggagactcccacgtggacaccagctccaccgtgtccgaggcggtggccgaagaagtatctcttttcagcatgacggacatgattctgttttcgctcatcgtgggtctcctaacctactggttcctcttcagaaagaaaaaagaagaagtccccgagttcaccaaaattcagacattgtaagtgccgcctctcagcctcctctctctgtccctcttctgtcaccactccaagcagtgtcctgcatgcgggcctcaggctgaaagaagcaaggctccttgtagcattttggggtgactcttgggttttgccttcttgctagattgtgcttgagctctcccttaatcatctcttatgtggggtttataaggcccttttctatctgctgtttatatgaccttcacaggaagcactgcgaaaatgacaccagtttacagattaagaaccgggggctcaagaatgttaacgggcctgccagggtcattagccagcaatagcagcgctagagctggaacccttttttccatttatttatttatttattt

SEQ ID NO: 125754 - DNA, 1049 bp, Homo sapiens
tgccctgatgggaggggaaggtgtgtctttcatggcacacaggatgcttcccgctgacatggacccagtgtcttaagctctgtttgcccgcaattcttttgtgtgggggaagacagggaccagacttaatttaatgtgattgtgtggcgccctggcagtgggatcagtgtggcttcctttatggagtgcagccctgccatagcaacctgcaggctgtcttctagagcctagaagagctttgttccgcagacatgacttcctttttttttttaatgggaaacggggagggcgtggggagaagggctctgatataaacagttaccaaggagacccgagtcggggttggaaaggttttctccttccctcggtccatacagagggaggaggggtgtgtgcccggtgcagggactcatgggaggcttcactctggaatcctgagtcctgcctgctggggctccagatgttgcagagttcttgggctcatgggggcagacgcaggcaggagctcagggaaattccgagaggactttggggtgtccaggagcactttgaggccacgggcccaggcaacttcctcaccagtacggaacaggggatgcacagggccgaactttccatctgctggcccctgctggtgtccaggagagagctgtgaccctcctttttccttaagtcctggagctgagagtgagaagccatggggtgcacgtactcgtctccacctgaggagcccgctctgagaaggtcagttcctgacactgtccctggcggcagactgccctcatgccccttggccaggggacgcctgcaccctcactcgagtgtgggagacttcctcctggcggggacctgctggaggcctgaagatgcggctgcctggagttaacagcaaggtcagccattcccagggttgctgcccctgtctctggcgagggactcagccaggcctaggcactggtggcccctctggtccaggacttgcacgctgcatttccctgcttccaaaggaaggaatttggactggagaccaggaaggcctcatgcaccct

SEQ ID NO: 125755 - DNA, 1324 bp, Homo sapiens
aggctcccctgtccactcccagggccagccagcctggcattctgctttgtccaactgcgtcaggaggtcacatggaagccctcctcccccgccacttgccgggcttctgggatgggagccgagcttggaagttgccatcccttggcaccccgcttcccgtggggctgtctctccagggggccgttttctattcctgagaagacagcccagctcgtccaagaggcctttcccggtttcttcagccataagcgtctgctccctttgaagccctgtggcgtgaacctgtcctgtcccatccgtccctgtggcgtgaactgtgccatccatctatgtggtcttagcacatgccaccttgtgccatggatgtctttgaaatcacaggctgaccgccttccagggaatgcccttttttctactgggtgttaaccaagttccccagtcaggcactggggaggctgcaataaccagatgcagctctttaataatagtgtgggcacgagaggggcggggcctgtgcagtcccgtgcctgtctagtgtcagagccaggatttaaagccaggtccgccctgccacgtggctcttcccatcttgctgggatcctcctcggaggctgtcttcccctggctggaggattgggcctgtgaagtcacaggttgtctcgttctagtctcatgccctcggtgcctggcgcagtgcctcccgtgcccccacctggctggcctgtgttacccgccaggcactcacggggcactggagtttgctcttgtccttttcttcagcaaatcttcagatccactttgttggagatggaacttccctggaagcatctgtcctttgagtagagataggggttggcttttcagctgatgccaggtcagacctcagaggtggctagggagtgagaagtgccctcaacagcctcttagtccgcccctgccagcctcgtgctggacagagaactcagggctggccaccctaggaggagacacggcgtcctgtgccgtgtgctaggcgtcgcgctcatggcagggatacacagacagcccccaaggttattcaacccaggcttccagttaagccacaggaatgtgcagagtaaagtgccttggccgaccagtgtgtgtgccacagcgaagacggcgacagtagcgttgctgcgtgaggggcagggacggcctctgggagaggaaagttaagttctgtggtaaaggatgagtagaaggtgggaaggggtcacaggaagggccttgtaggcccagggagccgcgtggaaatgtgagtagcttagcgtagcccagagaggtgggaaatggggccgggcca

SEQ ID NO: 125756 - DNA, 1918 bp, Homo sapiens
cctgacctcaggtaatctgccagcctcagcctcccaaagtgctgggatcacaggtgtgagccaccacgcccggctgcatccttggatgtaagtatctatgggaggtcctggaaccattcccccacggataggggctatacatttggttactttttttaactttgttttttccccgtgtcatgaaaatgtcagaagtgtgatcttgagcagccgcgtgtgtgagattgccttggtgacctttgccctcctttgccacagtggctgtgacagtgagaagcaagtcccagaggaacttagaagggactcaaagccaggaaggaaagggggcggcctggagggcccccgcctgccaggcctgcccagtgggtgttcaccggagccgtggctgaggtctgtggccctcaccaaccctgtgtctgccttccttaggggaggaacatcatcgtgttctacggctcccagacggggactgcagaggagtttgccaaccgcctgtccaaggacgcccaccgctacgggatgcgaggcatgtcagcggaccctgaggagtatgacctggtaagctgccaccgcgtgctggccccagatggaggcagtgggtaggacagggagcaggtctgtagggcgcccctcagcagggggaggccggcagggagtggggtcctgggaagacgtcctcggaagttgccttcccgtgagggtcattgccatccctgcccgggctgactgacggaagggccattcctgcagttgcagccacgtgccaggcatcgtttccccaggactggccctcccctgagtgccggctgccctcctggcggccgccacatctcccaaaccaaacccaccctccccagctgctccactcccctctccttcgaggtcttggtgacgggcactaccccacagccctctccaggctgcatttgcagttgatgaacagtttagttagatatcagtgtgcaccggggctgtgcggtgcctgggagctttggaatgaggttcccagggtggccccagacctgcatcagctcaggaggctgcattctgatggctcttttgtgccaagcttcactttcctctagaaacacatcctctccgctccagcctaacacgggtgaccttgtcctgcccacctggcacaaatgcccatgccccagcccctccgtgttgttacttctctctgatcccacgacactcagacatccctggcctggtgccaccctgggcaggacctggccttccccatctggtgcgggttgaaccttgaacaggctcagtcatggccggggcgcggtcctgtccctgtttctgcaggccgacctgagcagcctgccagagatcgacaacgccctggtggttttctgcatggccacctacggtgagggagaccccaccgacaatgcccaggacttctacgactggctgcaggagacagacgtggatctctctggggtcaagttcgcggtgagtcacccagagactgctatgggctcccggtggcctgcggtgcctccctggggactccagatccatgtatctgaaaggcagccctccagacccccaccctgtcctcagcagccagggcaggccacttgtgagaccctctcctctgccccagaccccagcactacgagaatgtcccctccctgtccccagccccagtcggctccagggggcattgggtgctggagactaaaggcaagaaaggtctggctggacgactgagacctgcctggcctcggagagctggagccccagcccggtggggagggtgggctggccccgcttccctgtgggttgaggctggcagtggacggggcaggctgtgggctgcaggtcaaccagatgaagcctcttcagtggcccagtgttccttgcagtgcgaggcgcctggtggaacggaggcctgcaggtg

SEQ ID NO: 125757 - DNA, 2595 bp, Homo sapiens
aagccctcggaccccactggtcaccaacctgggccgagcccacctcgccccacccctgcttgccggtcctcagctgccatgccagggctgcccttactgtcggcttccacagcccgcctgtagggaagcctgggcggggctgtgtcagaccgtgtagtgtgcggtgaaagcacagcgggtgcgttagtgtgcaggggctcccccgcacctcccctagcagggtcctgcctctgatgaggacttcctgtctggttggaggccccagacttggccccagggccagggaggcatcagagagcataggccttgtttccagcaccagctggggcacctgttgccgcagagctggcccaaggtgtcaccccctcctgccgcagccacccatccccaggaggcggccgcctaccccaagtcctgcctgtctcttccctgcagaggagtccaacaagaagcacccattcccgtgccctacgtcctaccgcacggccctcacctactacctggacatcaccaacccgccgcgtaccaacgtgctgtacgagctggcgcagtacgcctcggagccctcggagcaggagctgctgcgcaagatggcctcctcctccggcgagggcaaggtgcgccccctcagcccccgcaacctccgccccgtcaccccgccgttttccgagctccgtgggccccaatcagccccatctcacccccgtgtctcttaggagctgtacctgagctgggtggtggaggcccggaggcacatcctggccatcctgcaggactgcccgtccctgcggccccccatcgaccacctgtgtgagctgctgccgcgcctgcaggcccgctactactccatcgcctcatcctccaaggtgagggccggcactgccctgccagccacacgctggaggcccagccctgctcacagcaggcagagtgcaaggcggcacaggagctccgagatctgagccctgagctccagttccagccccagcgcagctccaaatgcctccccaggctgtggactcagtcgggctggcttgtgagattctcagcatctgtccagccccggtccccagaaccagtccgggaagccgctggggagggggcctctgaggtttgggtgccaggtgggctggaagaggccctgggtgagtggggctggcctgcagaacgggacttggggccggggctgggcaagggcctcggtgtggcggtggagctcacacggccctccccacaggtccaccccaactctgtgcacatctgtgcggtggttgtggagtacgagaccaaggctggccgcatcaacaagggcgtggccaccaactggctgcgggccaaggagcctgccggggagaacggcggccgtgcgctggtgcccatgttcgtgcgcaagtcccagttccgcctgcccttcaaggccaccacgcctgtcatcatggtgggccccggcaccggggtggcacccttcataggcttcatccaggagcgggcctggctgcgacagcagggtgagtggggtcccatgggggagagggggtgacgactgggagccccgcgctcaccccggcccctgccacgcaggcaaggaggtgggggagacgctgctgtactacggctgccgccgctcggatgaggactacctgtaccgggaggagctggcgcagttccacagggacggtgcgctcacccagctcaacgtggccttctcccgggagcagtcccacaaggtgagacgggcgggcacccacgaaggtgggcatgaggctggcagggccacagccacagtgcccccctcacagcaccacccttggccccaggtctacgtccagcacctgctaaagcaagaccgagagcacctgtggaagttgatcgaaggcggtgcccacatctacgtctgtgggtgagtgagtggggtcactggaatagggggcagggaggacaaggccctgcctgccacagttggcccagcccccagcaccccctcttcctgcccagggatgcacggaacatggccagggatgtgcagaacaccttctacgacatcgtggctgagctcggggccatggagcacgcgcaggcggtggactacatcaagaaactgatgaccaagggccgctactccctggacgtgtggagctaggggcctgcctgccccacccaccccacagactccggcctgtaatcagctctcctggctccctcccgtagtctcctgggtgtgtttggcttggccttggcatgggcgcaggcccagtgacaaagactcctctgggcctggggtgcatcctcctcagcccccaggccaggtgaggtccaccggcccctggcagcacagcccagggcctgcatgggggcaccgggctccatgcctctggaggcctctggccctcggtggctgcacagaagggctctttctctctgctgagctgggcccagcccctccacgtgatttccagtgagtgtaaataattttaaataacctctggcccttggaataaagttctgttttctgtatttgcctggtattgtgtgagtagatctgggacctccacctgcatcaacttaactaactcagaccccaggaacccatgtggt

SEQ ID NO: 125758 - DNA, 1034 bp, Homo sapiens
ctctacaaaaatacaaaaattagccaggcatgatggcaggtgcctgtaatcctagctacttgggaggctgaggcagaagaatggtttgaacccgggaggcggaggttggagtgagctgagatcctgccattgcacttcagcctgggcaacagaacaagactgtctcaaaacaaaaacaaaaacaaaaacacctagtctgtttttggaggaggggtgctgtgggggtctctgggctcacaggaggacacccaggtccttgcctgccttggggagacagccacctcatccctgggcaggcacagttctacctcctttcccgctgagcgaaaccctcccagcagccctgggggagcctgagcgccacgtcctgcctgcaggctctggctcagtagctccccaactggcctgagcctctcccctccggcccccaggagacccatcggctctaccgcctgaagctggaggagctgaccaaactttagaacaattgcaccagctccatcacgcggcagaagaagcggctccaggagctggccctcgccctgaagaagttaggatcccctaccccacccgccatgggcagagtgtggggtgggagggctggcgctgtgagaccctgggcaccgcccctcccctctctgggccctgtttgcccttctgcccctgtgggagtcagggaggacacttgggagtcctcttgccctgactgtttctggccttacccgcagatgcaaaccctccctcccagcagaggccgagggggccgcacaggagctggagaaccagatgaaagagcgccaaggcctcttctttgacatggaggcctatttgcctaagaagaatgggtgagggcccccaccgccacccccagctcagttcacagccactcctgaagccgggtgctgcctcctcttggtcattatagtcagcaaatgttccctgggcccagtacaggctgagcaatgaggcacagtgctgacttcaggggagacacctggctgagagtgacatttcactgtgataggtgctttgta

SEQ ID NO: 125759 - DNA, 1230 bp, Homo sapiens
acctttccggagctcagagtcccctctggcctccaagggcagaaggaatgggtttggctgaggtcgggggctcgggtctgggacgcgctccacctccccggctgcgcgactatggccaggctccctgtcggagcctctgcctggggccccacctggaaaaatggctcctctaaggcgcttccagcctaaagcccgtcctcttccacctcttgggtgcagactggccctcccactccgaccgcaggtcccccaccggccacacagacggctacgctagaacccagccaaacaccggggttgccaggatggtcccacagctttcctttccgactcccggaagtggccgtgatctcacgagatcccggaggcgagcgcgaccggaagtccggtcactctcgcgaggccccagagagcaggcgctgggcagtgtggaggtcgttggagtcacttccccgtcaccagctcctgtgcctgccagtcggtgcccctcccgctccagccatgctctccgccctcgcccggcctgccagcgctgctctccgccgcagcttcagcacctcggcccaggtaggccagacgaggggcggcctgcaggcggaggccccccggcccgggccacgtgcgtccccggttcgcgggcagctctgaccctctccaggccagcctggaccgcagggatgcccggcactggctggagactgtggcgcccggggcaggccctgacactggcctggaggtgcgggggagaaagccggggaaaagggggcgaggtagtcccgctccagggccggtccatttgtcagggttcccccaggtctcccagatttcccagaggacctgctcttggcttgcacgccttcaaggttgggaaaccagggctctgcatctgaaagtaaacttacgtttttttctgcagcgttccattgctttgacgtagctaatctccttgcagcatccgtgtgagttgtgcgtgaataaaagaaatcgtatacttcctaattccatagtatggacaaaccgaggctagagaactgggccagggttacagtcatttggccagaggattagaattcagcgcttctgacctgaagacggcttcctcttaacctttttggaggatctctcctgctgtgggcggactgagcctgccgccaggtgtcttaacagtgcttgacttggcccgcgaccacttaagcctaggagcctaggctatttttagccatcttctag

SEQ ID NO: 125760 - DNA, 1448 bp, Homo sapiens
cccagggccagctgctactttgctgcctgttcttctgattagcctggtatgaaacagtgattctcaaactgtttggtatcaaaatcatctggggaaaatggcaaaaatgccaaggcctaagccccatcccgcttccaggagcctagtcctgagtgggcttcattagctcagcaggtggctctgatgcacacctaggctggagaaccagtgtgagatactggagcccgagatgacagatctgactcaccaggagggttggagtctttcgcaacgtacgtaaccccttccacctcttgttaggcagctccttgtcctgcctgaggctccagccacaagtttgctgcctggatgaatcttctctgattccccacccctgcagggagttgattgccgcaaccccatctgccctcttgcacaaggggcttctgtgacagtgttctccctgctcctaatgcatctcattacctgtctcctacagagccagcagggatcttcctgcaacctcagttaccgggagggcctgttgctaggcactcagtgtgtgtttatagtttataaagctgcaggttgaagggaaggctgctgttaccagtccagctgcctgatggagtccagcttgttcttcatctttcaggagggttttgaagtaccctgagtatcacagactctacagacataaattctccccatttgaaagtggacctttggaatgaaggtcctgaattcttccagaatgagactgttacaaatacaatgattgtatcttgctttggcaactgcagtaaaaagaggcccagtgcaacattataggataccatgtgaatccttttcatgctcatttcctcctaagagtcctttctctgtgcctctttttagaacaatgctaaagtagctgtgctaggggcctctggaggcatcgggcagccactttcacttctcctgaagaacagccccttggtgagccgcctgaccctctatgatatcgcgcacacacccggagtggccgcagatctgagccacatcgagaccaaagccgctgtgaaaggtactgggcgcgctgaccctggagacttgcttcctgtccccagtaggccaggattcgagttttgagtaagattcttagatgaaactaaatgtttagagacgggggtttctctgttttaaatttaaattttacaagtgattacacccttttagacttggcgtctataaaaattgaaacagcggtgtcttttagaaatgtgaggtagcctaatcatcccattttctactttttctaatttgaaaagtagtatgaggatggggaagagggaagtgtcagcaacctctggtgaggatttggggacagtaaggtggtggtctcagctgcgggccaccttccctccaccccagggttatcttgccagcttctcaaaaagcacggcctctttgggaaacctccccgtctg

SEQ ID NO: 125761 - DNA, 1052 bp, Homo sapiens
aaagccttgtctggtacctccccacgtgaagatgtggggattaaatccatttcctattaaaaatggatttaatctggttgctttgttgtaggaaaaatgtcaccagctcccctttcctgtggggtaaaggtcacatctctttgttggcctgggatcaaagtcgtcttgccgttcccctgtgcctctgtgcacggacgcccttccctcttctcagtcccactctaccttgggggttcttaataaacctcgacggtccttctcagatgttgtcctcccctgctccacccatgcagacctcgcttctggcactcatcatgctggatcatttaccctgcaagagggactgacttgaaacggggaccttgagtggctaaatttcctgtaacagctggcgctcagcacatgctgcctgtctggaaatttgtggtgttctctgttaacatctcatattggatcatttccaggcatgacccgggacgacctgttcaacaccaatgccacgattgtggccaccctgaccgctgcctgtgcccagcactgcccggaagccatgatctgcgtcattgccaatccggtgagtgtggcagcacccggctcttgcagctatggcaggtgtttaggtgctgacagtgcgtgaaaagctcacggtttgcagcaaaggctgctgatgtgctggggggatggggggatacacagatgaaggggctgaaatggagaggtcgggtgcactaagcagaggcccgtccgtgcacttcctaaggactccttccagcatgaactgaatgagggttgtcacagccagccttgtgctgtgggcagaccacgtctctctctgctttagtttccccacctgaagagaagtccattctcaaggctcctttcagccgtgattgtggtggtctcttgattccctttttgacacagtagctcctacttagccggaaaagtatgttccaagagcccagtaggtgcctgaaccctgaaccctgtatataccatgtgtatactgaaccctgtatataccatgtgttttcctaggcatgcacacctgt

SEQ ID NO: 125762 - DNA, 1027 bp, Homo sapiens
gagttagggtgacctgcccagggtcatagcacagagggactgagctgccagtggacctgcttccttggagcacacagccgctgtgcactgctgtcccatcaggagtggccctgcagctgtgagtcccggccgagcagaaggtgatccatggaggcatcatcacacatttcagttgatagctgaagggccaccaagggaagaagcatcctctacagcaaagggtttctttgttcacatggtgcggcctgtcctttctggcaggtggcttgccagtacagagttatcagacagggcagtttaatgtggcatctttggactagttagacctttgggaaggtctgacaaaaagcccttttcctgctgtggcttggccctgctctcggaacccagggcaagccatgcctgtctgttggatgtcctaggttaattccaccatccccatcacagcagaagttttcaagaagcatggagtgtacaaccccaacaaaatcttcggcgtgacgaccctggacatcgtcagagccaacacctttgttgcagagctgaaggtaagggcggcgtgggtgttgctcaggtgacctttctgaacttctcccgccacccgtgctcatttacgggcgtggaagacatgaaggcatgcccaggtcacgtgtcactttggggttttaaatgtttttagagctcgccctcttgatggaagcagcccctgtgtttcctgtgggttccaggcactcggcccaacaggcatctactctggccagtgtctgtctcccggctctcgctgtcttccttctcgccaagagcactgtgggttcacaccttctttgggcttctcagtggctggacttggacggggctcccccagtcctcccctttctccttgcccctgaaaactggtcctgggaggatttacctgttggccactagataaagggtgggaaaattagcaaacatgaagaactgaggaaagtgccagaagtcctgaggtatcagaattgttgttggccctggtccctggcactgactt

SEQ ID NO: 125763 - DNA, 1089 bp, Homo sapiens
aaacctggttcacagattcttgggggtgtggtacctccagtttaagaaatgaggcagccttgaactgtgctgtttggagccataggagtcagtttgttctttctgtcccaatcactgtttgaggtggcagacttctaactcatgggtatcctggaatggatttgaattttgttctgtggggcctgaagaaaagggaacttggattgttctgtgtagggaggagtctgggcttgtgcatggggagtggagccggctctgggaaagaggatgccaggcccggggggggcctccacaggaggcagcatcctcccatgcccatccacagtgggcacaaatgctcactatgaaggaaggacttgcgatggcctcgccagacggcggcaagccctcacggcacctgctggcgctcatgctcagccttttggggcaccgtggcaggagatccaagcgcagcaggggctggacagggcctcctcctagctggctctgttccaccctgagttctggggggcttttccagtgttggggctgtgggcagctgtgacatgttttacagtgaaagagcttgttaactcatccagcttcatactttggtcaccagggtttggatccagctcgagtcaacgtccctgtcattggtggccatgctgggaagaccatcatccccctgatctctcaggtacacgcatatgaccctgtgaggggcttcgaggtcaggattccctttaccaggccctgctttgaggtgatcccggtagactggagaaggcctggccacgtgccaggttttggaagggctcctgttgtaggcagccccgcccctctgctgcagggcggtgtcagtcctggagcgaatgtgggtggaagctgctcagggcccagctccagcacgcaaggagaaccactgttgggaacctcaccgggttactggttaggccggagcgggcgaggtgcttttttcaaaaatgagtccagggctggacacagtggctcatacctgtaatcccagcatttgggaggccaaagcgggaggattgcttgagcctgggaggttgaggctgcagcgagctatgatgcaccactgaagcc

SEQ ID NO: 125764 - DNA, 1071 bp, Homo sapiens
ttttttatctttttattattatttttttgctgctccttgtggagcagggctaccccataggcagtgtgcccagaatagcatgtcatttttctataaaggttttctttttcttctttatagaaaacctttcccatgccctggtgatgggagggagaggagaggtcgggaatagtgggggtgggaggcagtgggtctggggtcatgggccggaagccactcactgatcccatggcttggcttgcagtgcacccccaaggtggactttccccaggaccagctgacagcactcactgggcggatccaggaggccggcacggaggtggtcaaggctaaagccggagcaggtagagtctcaggcagccccggggctgggtgccagtgaggccctgcgagagctcagggttggggagaaatgctgcttgtccctgggcatggacgatccttttcagtgttgatttgcagttgcctggtggaaaatccctgtgtgagagggcagctcggcctgctttgtggggttgagagtcatttttgagggtggcagagtcaattctacaccattcatgtataagtaacaagaaatcggggtgctgactgaaattctccactgtcaggctggaaggtgtgcaggtgtcttggctggcggggccggctcacctgggcgtcacgtttgtggcaccagccaggctgacctgtctgtgcccccctaggctctgccaccctctccatggcgtatgccggcgcccgctttgtcttctcccttgtggatgcaatgaatggaaaggaaggtgttgtggaatgttccttcgttaagtcacaggaaacggaatgtacctacttctccacaccgctgctgcttggggtacgtatccaggcgtgggtccttctgactgtggaataagggggcgttccctttgcttaagcctcaggagctctccctggccctttatgcagtaagctcatgtgcctgcctggcgagtgctgttgttttcaagggtggacgcacacccgagaaaaaagagctgggaggatcacagactgtgaagggtgaacctcccagcaagtgggtctcct

SEQ ID NO: 125765 - DNA, 1040 bp, Homo sapiens
cccgagccgggggctgccagtcccggagcatcgcacacacggttccccgcgcctgccctgcctctgcctctcctgggtgtccaccttctggcctcaacagtgcagctcatgcagggttcttggcatgcaaaacacaagagggacggagcggtggggggcgggggccaaagggggaggggctccaggacaggcatcggggctggcattgcccccccgatgggacggacgattcccggcagagagaagagagagcggcaccgggagcggggccagggccagcccaccaggccggacccccagcgcttgggggtgggcgaggggatggagggggtgggggcgtcacacggcacacagatgggggagggggcgagggggacaactgaactcaaaactgaaccgaagaaagggaggaaaaacagaaataaaaaaacaaaatccacaaatgtcattagataccaaaaatcaaaaacaatatctgatcctggggaacctgacatttttctgttaatatttttctttgttttccggccctgcagagagctttggagctgtcagtagcacccgactgtctttctgtttctctcttttctttttctttttcttttttttttttttaagttctgatttttaagtccctcttggttaacgtccacttaccaataaagtggcacttcctcctttagtaggtaaggtgtgtaagagaagggaaaagtgtggtagtataagttcatcattagattcacaaaaatgcaagagagatagagagagagagagagaaacgcaaccaccccattctaggcctgagaagaggccacgccgcctctggaggaagggctggcagcgcccggctcctgagtgggcaactcttaggtgaccgctggatagaggtggcaaatgtttttccaaaagtggagttaggacacaaggattgggacacagaaaaccaggaagggcatctggcaccatcaaaagggccctggttgggattcaggagtctgagagcctgcctctatctcaccgagtgaccctggccacgtcac

SEQ ID NO: 125766 - DNA, 1051 bp, Homo sapiens
ttctgagagcccagaccggcgggcacgcccccatccccaaccccctctgttaatccctaccagcctgcagtcctggctgcttccaagcaggaggtggggcctctggcctagcggggccgaaaggcagtcccctcccccgcagtctgatttccctcttccccccaaaggcaagcacgaggagcggcaggacgagcatggctacatctcccggtgcttcacgcggaaatacacgtgagtcctggcgccaggtcggggtgggtgggtggcgtgggggtggggtcagggaagagggcacagggacccacccggtgtgtaatgtaacgcttgcctttcctctctgcacgtccaggctgccccccggtgtggaccccacccaagtttcctcctccctgtcccctgagggcacactgaccgtggaggcccccatgcccaagctagccacgcagtccaacgagatcaccatcccagtcaccttcgagtcgcgggcccagcttgggggcccagaagctgcaaaatccgatgagactgccgccaagtaaagccttagcccggatgcccacccctgctgccgccactggctgtgcctcccccgccacctgtgtgttcttttgatacatttatcttctgtttttctcaaataaagttcaaagcaaccacctgtcactggcccaggccctggtgtttgtggaaggaagcctcaggcacctgccatttgctggctttcaggagtcatctttgctcaggcccgtgctgggccatgtgggtacactggtgtaggttgctggacacaggctgactcacatccataaagacagaggtcttagggccgggcgcagtggctcatacctacaatcccagcactttggggggttgaagcaggaggagtgcttgaagccaagagttctagaccagcctggacaacatagtaagactgtctctaaaaaataaaaattaggcagggtggtactgcacgcctgtagtcccagctactcaggaggctgaggcaggaggatcgcttgagcccaggagttgtgaagggtacagtgagcta

SEQ ID NO: 125767 - DNA, 1028 bp, Homo sapiens
tgggaggctgaggcaggagaatcgcttgaaccagaagatagattgtagtgaaccaagatcctgccactgcactccagcctgggcaacagagcaagactccatctcaaaaacaaacaaaaactgatactttgtccgaaaggtgattaaaaataacagtgtgaaacatcagaggtctccattccaagaacttcaggtcaggggtagagtggagaggccataaatgtaattcagtgggaccttctagtacagcaaagcatgaaagcagttttcctccactctatttatgtgtgatgaccacatgcgttggcctctgctctggtcagctgaaactgcatgttgattcactgggtgatttgagtggctaagaatggcacctccctcctgggtgcacagttcccaaagcctactcagagaaacaaccttctgagcactagctgggtaaccctgttctaggagttgacaatcagtggtcaccagcctaatcagaacattaacatgtggcataccagcttgctaattagcccactggtttgaattttccaactctgatgtggataaacgtggttgaatctgaatggccacaagctgtacctctcattaaccacacagcgctgtggtcagtgaggagttagggtgagagtagctggatcacactggcaagacaatgagtcaagacatctcaggttatgtaagggactcacgtggcactctgttatcctgttatccagagtattggagaggaaaggccgtaggaatttgaggaacactatgacttggggccttttttttttttttttggaaagacagaatctcactcttgcacaggctggaatgcagtggcatgatcacaactcactgcagcttctacctcctgggctcaaatgatcctcctatctcagccttctgagtcgccgggaccataggtgcgtaccaccaccacacacacctggctaatttttggattgtttgtagaattgaggtcttgctatactgcccaggctggtcttgaactcctggcctcaggcaat

SEQ ID NO: 125768 - DNA, 1807 bp, Homo sapiens
tggcccgcatgtgcattcttttttttatatatataaagtcagtgacgaggaactcccgagacgtgtaatgacaccacacttgttttctttgtttctttgttttatttaggcaagaagaggtgtgagtaattgaggaaaaactgacagatgcttttgctaataccaaaattgagcttacaattaggaactgagtatgtgtaacaggatacaggtgacagtgaagatagaagaaccacgatgaccacagactcaatgtgctctgtaacatcgcacagtttacccagcatgactttccttaggaggccccctcctcacgctagagtaaaagtcccagttaagtgaagcctaccagaagaactagtagaagaagctttgccgcttttgtgcctctcacaggcgcctaaagtcattgccatgggaggaagacgatttggggggggaggggggggggggcagggtaggtggggctttccctaatttatcttcatgtccagtgagcagtgttgcgtttttccttgtagcatttggaaatgatttactggaattacaaaacctatttttcctttaaatttcagctttggctctggctgctttttagaataatgcaagataaaaatcacacctgagggctgaaaacggagagggaatgggagacttgatatttaagcagcttgaatggtttttcttttctttatttttaaagaaatgcacttgcctatgatactgtctctccagtgaaatgattactcctccattactctattgatacaatattgtgcatgctagtgttgtatttctatacagtagcttgaaattgattaacttatactgtaggtgttatgtattcctatgacaaaaaaaattaagtcttcaaattttttaaaggttttttttttttaatttaatttttccttttgggggtaaagtttgctctaccaaatagtgattgtaacaaattgatctgttttggatgttgctatagtgacatgcagttatatattttgtttttaaaagggggggagcaaaagaaacaccagtgttagcttaatcttaatgtctggtgtttgtcatggtgaaattataactattacagtgttggagaacaacaaatatgttctctgaatgagcctttgtgctttttgtcatgttatgcagtgaactatttttaaggtctaatcagtgattatttttccagctccgtgtttctctaaggaattatttcacacacggaccatctttagcagtttcctcagtgatggaatatcatgaatgtgagtcattatgtagctgtcgtacattgagcaaataaacttacagatctgacgccagtgctccttagcttcattgtgtgagttttactgtcctttgcttttgaaggttggatcagatgttggtgttctcttccctccccagcccaagcaatgaagttggattggcaggaaaaaggggaaagacagtagatactggaaagcgcctccaaccaggaatcagatttgggtttggggacttaaaaaaaccattgcaccaggccaggcgcagtggttcatgcctgtaatctcagcactttgggaggctgaggcgggcggattacctgaggtcaggagttcaaggccagcttggccaacatggtgaaaccccatctctactaaaaatacaaaaattagcagggcatggtgctgggtgtctgtaggaccagctactcgggaggctgaggcaggagaatcacttgagcccaagaggtggaggttgcagtgagccaagattgcaccactgccttccagcctgggcaacagagtgagactccgtc

SEQ ID NO: 125769 - DNA, 2537 bp, Homo sapiens
tttggactccctgaggtttagaattcacatggtgttggcatatgagcagaaaggcctccatgtttctcagaagtcagcttgaagttgactcagtattttcttatccagaagagatgggactgaagtttagtagacagggcaggattaggaggaatttgtcagtccgttttcctaaaaaaccactgagttagaccatctgtactcatagtctctcatctaaggcctagacttgacagtgttttgtggaacacacgtgataagcctgtgtccttttctggggaggaagccagggttcagacaccgttgatccattgatccagccgcacttttccctcccttgtgtgtgctccacctccagcccccttcccccagcccacacaaagtaatttccttctgttcatcatgttactcaacagagctctgttctagtgtctcaaagatacagttaacccagtggacaccatctgtaccataacaactctgttctttcctcctggcaggtgacagagctgaatgagccactgtcgaatgaggaacgaaaccttctgtctgtggcctacaagaacgttgtgggggcacgccgctcttcctggagggtcatcagtagcattgagcagaagacatctgcagacggcaatgagaagaagattgagatggtccgtgcgtaccgggagaagatagagaaggagttggaggctgtgtgccaggatgtgctgagcctgctggataactacctgatcaagaattgcagcgagacccagtacgagagcaaagtgttctacctgaagatgaaaggggactactaccgctacctggctgaagtggccaccggagagaaaagggcgacggtggtggagtcctccgagaaggcctacagcgaagcccacgagatcagcaaagagcacatgcagcccacccaccccatccgattaggcctggctcttaactactccgtcttctactatgagatccagaacgccccagagcaagcgtgccacttggccaagaccgcgttcgacgacgccatcgccgagcttgacaccctcaacgaggactcctacaaggactccacgctcatcatgcagctcctccgcgacaacctcacgctctggacgagcgaccagcaggacgacgatggcggcgaaggcaacaattaaggccccaggggaactggcagcgcacgcggatgctactactgcagtctttatttttttcccatgagttgggggtcgggtgggggagggaaagggagggatgaccttcccagggagaaacccacgacctgtcctgtctttgatcgcctctttgacatttttgccaaaataccactagtggaaagtcaggctagctgtgctggtattggaatagcagcctcacactggcgtctggactgttctgtagattcatgcaagtggagctgtctgtctctaatttaacttattgctagataatagggttttcagatgaaaagaaaacttaaagaggaatggccctcattcagtaagttctgtggttccagtaaggatttttatgtacatacgctctcgtctctcgttttgggtactttctatctcatctgtctcggctctgcatgttttccagggtgtagcctacagacatggaacagtgtaaatcccagactgacagacttagaacctgaggtctcattcatccttatggtttaggccttgccagttttccgaagtctctgattagttgacagtattaacactaaattgcagtttacagtatttctacattacagccatatgtaacatcaagccatcgattgtgtacttttcctttgctagttgtttgggctttaacatccttattcagccttatccaggttggttttgctgttgatcggtctcctaggctaaatgagaatgaaagcgacttcaggtcaggtggctgtgggattttttttttttggtccttctttcctcttaacgtaaatccaccaccaaaattattaatcctcttgagagaaacgtgaaacgccacaaaaatagagaaaattcaggtctgtatgtcatggatcgtgttggtattttcagagaacatcccgcttctgaagctgctgcagctccctcctcagggatcacactgccgtcacccactctgcactggggcgtttcctactgcgcctcgtgctggcggacgcagctgggtgcagaagctgtggggtcggagaggcgtttggagaaggtctgtggtgcagtgtgtgaaaattcaggtgctagaagcctactggtagaaaaacccaaaaggaagagctatatccttaaccattctgtccaatttcgggagccttgtcagtgtgtcagtttttcctccccgaagacactccttccccaagtaattgtaggaagataaaaaaactgttaccagataacaaacactgaactcctatttgaccagaactttttcctctcgagatagttttttctttttaatgaaaaaagcataggaattggagattggcttgtctcacgcagccagtgcacatttggaattgacggaaacaacgttgc

SEQ ID NO: 125770 - DNA, 1056 bp, Homo sapiens
cctcattgcagtcctggattaactgcaaacctaagagtaggatttcatctcttgtactcagggaagccttatttattaagccaatctttaaattattgaaaagagtggagaaaacgatgtgtttttatcgaggtaaaagttgcgtaacataactgtcacatagtcacatcagatttcaagtgcaattgagtggcattgggtacattccgtgttgtgcagccatcacctatgttgaagaagagagaaagtggttatttttaaaaagtgatgccggtctggactacagctggctggaattcagcacctattcaggaatgtgtcgataatggagtgcccacaacagctcacagccagcgataattgtctatccctttgtcttcatttccaagcgtctgaactgaaaaaagggaattagctttagctacgtttgtactgtatttccacttaaaaagttatggaacttgaacactgtataatgttcacccaaataaataagaacaatttacttgaaatctgagcaaatcgttaactctttggggattatggaaattttgctggtgttctagtgactcgttttcagccctaaggctggctttattatcagtgatttgccgcctgtgtggtagtggtttcctaatgagtaggatgcagggttgagactggggagctcctgcagcatgaggctcttaactgatgggacgccagcacaagacattcagtacattgtggctgtcaggagctggatgggaaaagtagttacttttcccttctttgcccattcccaatatcagcagtcctaaccttattttattttattgtattttattttaatttttttgagacggagtcttgctctgtcacccaggctggagtgcagtgggcagtggtgtggtatctcggctcaccgcaacctctgcctcccaggttcaagtgattctcctgcctcagcctcccaagtagctgggattacaggcacccaccaccacgcccagtgaatttttgtagttttgatagagacagggtttcaccatgttggccaggctgagctcgaactcc

SEQ ID NO: 125771 - DNA, 2598 bp, Homo sapiens
gaaaacctgagctccgtggtgcaaaatcgaaaccaccttgctcacgtttttcttaacaaaaggctcttctttctccattcgcccaaagcaagtcctccggcttttaggaagggagaacgtttgtctcgctagcgttttcattgatcattctcaacatgtcatctccattttattccctaatgtttttgtattgaaaagggtaggtattgcctgtaaaattaaaaggtggtgaatgtagctgactggttcgattcgtgtgacatatgccgtttcttttttgaatacaggcacgcgtctgttgaaattcctataagttgggggaaaaaatattctgtctgatctgatagtgcaaacaaagccgtggtgagaggcagtatcaagtcattccagaagattctgcatttgtcatattgcagagagcctagactgggtggaggctgggaggagttattttaaaggggaaaaagtctttttaaaaatttttggttgttagatgcatctgaggcttttttttgtttaagcgagtacatcttcatgctgatgaaaagagaataccgatcgccagttgtcgcattttgtctgggttgcagattcatccctgtattgcaccattttgtcagtaacaccacatttatctaatgggctgtcaaccagtttgatattagaggagggggaagtattgagcattatgaaatgaaaggtagaaaattaatctaatgatttcgggcccccactatcttaatatttaatttcctgccttatgtaacaaagattttcaaattcatctccattgtgaagtggatgctggagtgtaccttgcgtgttacatcttttaaatgaagcattattgatattacagatcaattcttgaataaatttactggttctcaaaagaggacaatgctgatacctttatatttaaagcagctatgttaacaaagaaaggtttttgtcttattgaagagaactgattctgaaattcggaatactgctgtggccacagttgctgtcttacaaggttttaatgcttaaatgatgtaagttgcacttctaataggtatcagtattggaaatatcttcagttcgtgttatttagactcttataatttttccatatttcttttccatatttctagttccacaggaaagcgagtgacctcgcacctatatccatagcaaccaagtgatgtcacacacaatgacacagaggctgcaatgcacctaagggctggtagggagtgtgcaaatggcatttatccaaggtaatgcagaaattagccgataagccaggtggaatcgagcacttcatattccactagatgagaattagtccaaaaaataaggatatcatttacccttagacatgcaaatctgtgacctctagctaggccttgttcaccctattgctagctttctcacaaaagtttataagatgcttttttatatttttaaacattcatctcatttatttaaaatactgggcaatgatggaataaaagtagaaattttaaacgataatttatggaataaaagaaattttaaacaagaatatagtttatgacactagtgcacagatgggatgtatacttgtgtttattgcagataattaatttggcaggttttaataaaaaccttaaaaaaatgatgacttcctactgagtcattttcagttactagtagggaatgaaaacccgttccaaaaccttttaagttgagatttgggaagtttgttttttactagatttgtgcttctgctccttcacagtatagaggaaagaacagtttgtaaaataaaaaccttttttcaaatctgtttcctgtgactttaaggaaataggctctgtccctcattttcctcatctgtaaaatgggacaatacttgaaaaagttgtgcggattcaataagaaatgtagtaggtgttccaaaatggcaactacctaagaaattttcttcctgtttataaaagtcatcgtggagaatttggaaactgcagagaaagaaaccaatcttaccactcaagtgagctctcttttaaggccgaaatcatcctgttgataaagggattaaaatttatttgagtttaatgaaattatcctagtgctaacactattgggatctgtgcagaatgatagttctttgtgggtaaccaggacagaagtactgtattgtgcagtattttgaaaagaaggaaagaggaatgttaggtcttttaagacagatgtttagtcttgtattgaaggagagtgaacacctagatgtatcctacgtattagacaatactgtcttgtcctttgacttttactagtctcttgagaagttaatattttaaataggctactggtacttgccttggggagaaaaggttcagggttactaattttgttgaagttactgagttaagcagtttaactcaatgaggggtgggagggcaaaggtggcaaaaggctatcataatttttctaaatattcctagtgggatcaatagactttcaaattctttctatcttaaatattccattccccctcccccccaggctcttccaggagatcaatagctattatcactaatggagtaatggtacctctgtagactcttc

SEQ ID NO: 125772 - DNA, 1004 bp, Homo sapiens
aagtgaaaaaaggggagagtgggggcgcagtgggaaaggacggggtgcccggaagacgcgcagtgagcccagctggggagcggggagttctagccgcggccgggctcgggcggggcatgggcggggcttgcggacgggtgggcggggcctgccttcgtcatgcggcgtgggcggggccgcagggggttgtccgtcagtggcacgcacagcagccgcagccgcctcgcgcccggtcccgcggtcgcagctccagccgcctcctccgcgcagccgccgcctcagctgctcgctctgtgggtcggtcctctccggcacttgggctccagtcgcgccctccaagcccttcaggccgccccagtgtcctcctccttctccggccagacccagccccgcgaagatggtggaccgcgagcaactggtgcagaaagcccggctggccgagcaggcggagcgctacgacgacatggccgcggccatgaagaacgtgagtgtctcctcccctcccccgccgctccctgcccctccgaagacgcggtccttggcgtggaaggcccggggcttcgtcgccctgtcgcgatggcgggttgaccgccccgtctcgctcactgaggggggctggggagggtcccgagaggcgacgggaacccgggctgtgacgcggcctcttttcggagtccccgtggccccgcggcgctgccattcaggcccggcgcgggcgcgggccggggcgaggtcccgcggggctggacttgggagcggggtctccggcccccgcggctctaggggtgcaggggacccgagcggggaggcgtgcgcatcctttgtgccccacttcccccctcctcctagcctgggcgtgggggcgggggaccgcatggatgcggttcctctttctctccctggtgtctgggcggcgcctttcccattcactcagcaggtctcccggttttccacctccccagcccccccagaatcttccccactgtctgtcccgacacatccct

SEQ ID NO: 125773 - DNA, 1050 bp, Homo sapiens
tagcactttggaataccgaggcaggaggatcacttgaggccaggagttctaggctgcagtgagctatgatcgcaccactgcactccagcctgggcgacagagcaagaccctgtctcgaaattaaaaaaacttttttttcaatgggatgatgctgagattgggaattgagagaccttatgagggggtcgattgagatgaaggttgagtcaaggttagcagtgcaattggaattaggataggaactatccctgggcctgaagttaggataatacctagaattagctttcggttcattcaaccaagtttcccggagatcccaacccgcgccagacaacgtggtgactctggggttgcagctgagtgggggtacgggtgtggtagggttgggggtcttggtaggcgtccccgtgccctgctgcaggacagaaggcctcctcgtccccttcgaacgccctagatgccctgtctccacagctacaggagttggcccccagccttcccgggagacagcactgctcaccaccgccgcctgggccgcggggaagaaaagtaagtggcggtgcctgggtctgcgggggatggggaagggtagggctggggctctgccgggagccggcagccccagcccagcccctctggccgcgggcctgtgcgccccgcaggtggacggctgcgactggtgggcggcccgggtccgtgccgcggccgcgtggaggtgttgcacgccgggggctggggcaccgtgtgcgacgatgactgggactttgcggacgcgcgcgtggcctgccgcgaagcgggctgcgggcctgcgctgggcgctacgggactgggccacttcggctacggccgcggccccgtgctgctggacaacgtgggctgcgccggcaccgaggctcgcctgagcgactgcttccacctgggctggggccagcacaactgcggccaccacgaggacgcgggagcgctctgcgcaggtgaggctgacagcgaaggtgaggctgacagcggggccgcgcactgcggcgtgggaggggcggggcggcgccacgc

SEQ ID NO: 125774 - DNA, 1045 bp, Homo sapiens
tctccaggcagcatccaaaattacttctatctcagtcctgttctagaagtgcctccgaatatcccagaactccttgtggtacactccatggctatgaaacaatattgcactaatccagtctggccaacatggcaaaaattagccgggcgtggtggtgcatgcttgtaatcccagagactcgggaggctgaggcaggagaatcgcttgaacccaggaggtggaggttgcagtgagccgagctgacgccactgcactccagccagggtgacagagacagactccatctcaaaacaaacaaacaaaaaaactgtactattgcttcaccaatactcgagaattctatagcaatatcccaagaatgcctccagaatgttccagcaagtactgttcctggaccactttagagtaacactctaggataacactcggagtaacactctagaattgccccagagatattccagcattctctgatgctcacagcattacctagcacacccctctgtcatcctgatgctctaataatagtattttctccccacctaggccctctccaatttgggagggtttctcagcaaagaggaataatagggccaataatgctatttcacagatggactctgctctgtaagagataaagtggttgcccacaactcataactcatagcaaactaagggctatcattcccagtgtataggtgggaaagctgaggcccagagagtcagagccttgcccatggtcacacagttaatgcaaggcaggcaagcccccaaatcgaggcttagtccaggagggtttttggcttccctcagcaaagaatttaagggccagctggtgttagcagctttcattgacgcggcaatgcacagcagcagcagaggtcctgctccttgctgagcagggctaccccataggcagtgtgcccagagtagcagctgagaggcaggtctgcagtcgtaattctatttactttcaagtatatgcaaattagggggtggattatgcagatattttaagaactagaatagtaatttttgggttgtc

SEQ ID NO: 125775 - DNA, 1048 bp, Homo sapiens
tttaaatttaaaaaggttgtgctcgatggctcacacttgcaaccccagtgctttgggaggctgaatgaagcaagaggatcgcttgaggccaggagtttgagatcggcctgagcaacgttgcagcattgcaaaacccccatctgtacaaaaaagaaaaataaaattaattttaaaaacaaaaaaagagaaacagtagcacatgtatgtactggcaccatgtatgtactagtaaaaactagttaaaattaagtcagtaattaatgaaggaataagtcaatgagtgagcaggcgaaggaagaaaacatagaccggagcaggtgcgccttgggttgagcccttccccgctgagccccgccttctgcccgcccctgggccctaccgggactacatttcccagaaggccgcacgccccgggcatgcgcagcggctcgctcggaagctgcgacgccgagtttcactctggctgccttctcctgagagtcggagccacagccagagccctgcccaggccgagccggagctgcagcccgagcgcggtggtgccctcagccccgtcctcttgtcctcctcagcctcggtgagagggcgggaaggccacctgcgcgtcgctagggctgcggtcccaggggcgcggggtggcgcggggagccggagcctagctgggaccggaagggggcgggcgtgggtgtgagggggaccgacggccggggcggcggggacacccgggggtcccgggagatcgggggtgtcggggggatcggtctccgggatcaaggtcctgagggcgagagttgggggacttgggaggcgccggcagctttggacgggacagggtgccgggtgcgaaaggggacgttcggatgaaggctgaggggctcgcaggcggaggggcgcggttccgggtcgctcggaaggcgcgcaccccttcccaaagtacccagaggagggggtgacgagattgccaccggctccctgacgaggggttggtcctgctggggtctacccccaggtgaagggactcactgggccgggggttgtactttggagg

SEQ ID NO: 125776 - DNA, 1059 bp, Homo sapiens
tgtatttctggactcaagcgatccgcccgcctcggcctcccaaagtgctgggattacaagcatgagccaccgcgcctggccctttctttcattttttaagactgatttgtattccatcattagaatgttccataattggtgcaagaattcctttattgtaaagtgtttaggctgcctccaaattgaggctttttcccatggccaattataatactaataattttcataatgaagaaccggcatcattaggagctggaacaaattaggtttttaagctgcagctaagtgatggttaagccgaggctgctgcagagactggtgcaccgacacgccactgtattgtgcataattgctgggttcaaggggaacgcagtgggcgtttctgggcagtgactcaaaggtgcctgtgcccctggagcagaaggctcacccctcctttggtgtttcagagcctctgggatattgggcacctgaagagctgcagccccagctctgccctcagggagtttctgttttggtggggagaaggccactgaaaccagggagtgcggttgtgtttgcgtaagtgccctgcgccgtgcacacaagggtaggtggagccagccgtctctggcaagctgtgggtcagggggcccaggagaaggggataccatggttgggtctggaaggatgggcgtgtttgcttgggggctggtatagagggaggatcaattgctagaaggtggtaagtggcttggaatgttctggaactttctagaattagatgtaggtatcaaaggtggcgggcttggtgtgagtaggaacagtggctggtcatggaggggcttgtgtgccttgtcatcctctggagtctccagtaccctcctagggcctgggccatggtgcgccctccattggggaggctgcgtgccttcgtggaaagttttagctgatgtcctcgcctgtatttcccaggctgtttttgcagagttgtgagagttggttcatccgggccatgaggacatgttgggacataccccgtgtgccgatgatggaggcggccgtggctgcccgagagat

SEQ ID NO: 125777 - DNA, 1021 bp, Homo sapiens
tcatttgaacttgggaggcggaggttgcagtaagccgagatcgcaccactgcactccagcctgagtgacacagcgagactccatctcaaaaaacaaacaaaaaagaacgttgacaaaattaaaatattttgttatggaattgtatgtggtgttaaaggtattgtttgtgaaatgtatgtgttaaaaataataaaatttcagagtaattactttcatgttgtttcatagtgtatgatttattttcctagtgagttggtaagctttgtgagagcactggtgtgtcttttcacatcttttgaacctccctaatatacttagcatggcacttcctatagtgggcggcccaaagtgtttgtagtataaaagagaatcctccaaccctgaggcactgaagtttaatctgctattattaataataaggcagcagcagaagtatccctctgaaccaaatgtacataaacaaagaatgttacagggttagaagtgggagtggggagggaggcaggaaaaagctcaccttaccaagaagcttgttaatcctatttttaaacaagacaattctgcaagttacttcctggagccctgtctttgttgttgatatttagtgcagaatagatcaggtatattttgggttaaataaaaagaacatagagattcatatatttgggtacattggggcagcagtttcgagagcaaattacagagttaaacacatgtcctaggaagcctttcctcccacttagtggaagccacagtgtatagggatagagtagtcattttcccatttcttggtcaaagaaacagtgtgtgattttaattggcaaagagaagtaaataaggaggaaggcttttgaaaccccagattccaatatatgttgaaaaacttttgtaggaaggaatttataaactttacaaattattaatagaatagagtctccacagattcaggtcaaagtacaaagaagtttcagtaaattacttattggcaagatagagaaagctattttcaagcaacctagat

SEQ ID NO: 125778 - DNA, 1042 bp, Homo sapiens
ataattatgcagtgtgtgactgggtatcaaatatagtgagaatcaacttgtgatctaatgcttgaatttgataaggagccaagagagttacctatttttggtcccaataatctaaaacaataatacaagtttgtttaactgtgctctgaatcatagcataaccaaaattattggcatatgtaagcatgtttgaattataagctaaagctattttgtcatatttttattcatttattcatggaatcatatgcctttctaaaatttagattgttttaaaactattctcacaacttcagtcattatttctatgtacataacttccaagtcaatacatgcagacctgatctctattgttcttgtgcatttctattccactaaaccagtgccacctaaaacttaatgtttaaaaacaaaattatcttcccctagcctacctcttccttctcctgtcttttctatttttctttatttgctcagttactcaacaaatgtttgagtcaacactgccggaaactaggagtgcaagggtaatataaagcatggtctcactgccttctgaggagcttacattctagtgaggaaaggcaaaccagagaatacagtacagtgggatcaatgttataaacgtatgtacattgtactgtgagaacacaggggtgaggaagtgagaggagtcaaatatggccaaactatagagagtaaaggggaaagtggcataaaagtaggctggagagtttgggagaggtcagatcatatgggacagtttggattttatattaagagcattgggaagcccttggaaggttttaacttggggttcacataatcagatttttgtgttagaaagatcactctgaatgttgagtggggatagatgagaaagaacaatggtggatgaaggagaaaaaaacaacttttgctttttaggaggttactgcagtaattcagcagaaggagtacaggggcctggactccatagtgagctatcttaaactcagcaaataaataggccttcagtaacttttgcttgaatataaagatg

SEQ ID NO: 125779 - DNA, 1051 bp, Homo sapiens
caatccacctaccttggcctcccaaagtgctgggattacagccacaagccactgtgcctggctgcaatttatttcttaataaaataaactagttctagtaatatgcattgttccctaattttttttagaatagaacagttcatcatgtttatctcaaacttctagctccagttaggaagaccaagaaattacttaaggaagcttaagctgatgttagccagattggaaggaaaaccacgacccataagtaaatgcattctaaaccccatcctaactatctttgtccacagaggtggggttaatgctttatggcaggggccttttacctactttatttaatgaaaaacaggaagaaaaacttctgaaataggagtgtgttggtgaatttacgctgcaacccacataattcgaaaaatgattccatacctaacagagtacttttcctgatttactcctttagaagcttgaattacagccaggttgtatggaaatacaggttgagtgtcttaccttaggtatccaaaagcctgtaatctactcaaaagaaacattagtgagttggaattcaaataatccttttctattgttattttttgttacacacaaggcacatctgaaagcacaagagctcagtgttctagttgtgttataataatgaggtcacaagtcctgtactacgatgaggtaggagtgtgtgaaataccatggtggttaaaagcatgggctttggggtggagccaagatggccgaatacgaacagctccagtctacagctgccagtgtgagcgacgcagaagacgggtgatttctgcatttcccactgaggtaccgggttcatctcactggggagtgtcagaaagtgggtgcaggacagtgggcgcagcacaccgagcgtgagccgaagaagggcgaggcatcgcctcacccgggaagcgcaaggggtcagggagtaccctttcctagtcaaagaaagggggtgacagacagcacttggaaaatcgggtcactcccaccctaatactgctcatttccaatggtcttagcaaacggc

SEQ ID NO: 125780 - DNA, 1050 bp, Homo sapiens
aaaaaatagagacaaggtctcactttgttacccatactggtctcaaatgcctggcttcaagcagttctcctacctcagcctcctaaagtgctggaattacaggcataagccaccacacctggccctttctttaaaatatctatcatttactcagtgcccatgtgccaagcactgagctaatcacgttacaatgtagatttattttggtttcttttgtggtgtggttttttttttggcttttgctgactttattgagacataattgacaaaaccgtatatatttaaggcatacatgcaatataatgatttgatatacatatatactgtggaatgatttccacagtccgtttagttaacatatctgtcacttcacctcattaccattttatgtgtatgatgaaaatgtttaagatttactctcttagcaaatatcaagtttacaatacagtattgttaattacagtcactgtgctatatattagatctacaggactttctcccagatccatagaatttctccattatgtaaactccaaaagaatgaaattctgtggatgaagccttaattttactcttgataattaattttagttctgataatttgtgttaaacaaaaaaaataggagggcttgttttgctgcatagttttaaaatatcacctttgccttctttcttgaaaacatcttgcgttttcatttttttattttttaacagcctccaagggatgagccatcattagagatcaatacagataacacgaggatataattactttgtggcctaggatataattatttagctgtcatttatttctcatttggagggaaaaataaatgaaagtattatttatgagccacataaaaattctgtgttttttttccctccttgagaaagcgagaaatcacactaatgtttcagctattttactttgttcaaactggaataatacacaccttgtgtattacgcttttcttttttttagcataatgtaatttttacttggcttcttttaggatgcggtaagaggtttaaaaaggagtttctgttggt

SEQ ID NO: 125781 - DNA, 1059 bp, Homo sapiens
aggcctagaagtgcatatattacttctgcccatagatctttggacaaaatattttcaaatggctttacctaactgcaaaggctgagatatgtagtttagcagtacttttatggaagaagagaggcacaccaatattaatggacactggcagtctctatcatatatttataattgctctttcacaaatgtctctatattccttctctttccacctctgtgataattggtattctccaggatttcatccttgtcctattgttctttctctacatattttcctagggcatcttatatacttttgagtctgaactacccttacaagggtgtttcaaatctgattattcaaatctatgtctctagccctgactaatttatacatcccatctggcaggtagacatagccatttggatcttcacagacatcttgaactcaacatttcttgcttttttcccttcttccccagtccctgaacgtcatctgtaatgtgtcctctttccttgtttttatttgctgtttctgatattgccatgttcccaattcccatgctataaatctggcagtggtcttaacttcctgtttctctctcatctcctgcatctaatcaactaccaagtttaggcaggttttatctcctaaatattttttcaatctatctcacctttttcctgctaatttctacacctctgttttagaccctcttgacctcttgccttgatactagcaataactttgcctccagccttgccttcttcagatccatttctcctcactgcagctaaagcagtttattagtaatgcacattgaacatgtcattctcttattcggaccgttttctactgccttagtgacgtgcccaacttccctcttccctcttctgactgtatgctttgtcttccagaattagtcttttttcctatatacatttttacctgttttatacctctgagttcttgatcagagcctttgatcatactgatcatactgtttatattctgcctgaaatgcttttcctagctttttaaaaatcttggtgacttttttaatctttcagtactca

SEQ ID NO: 125782 - DNA, 1054 bp, Homo sapiens
tttccctgaaagcagacactctgaaatggaaatctgagcacagcaaatttactagggaggcctcttgggaccaatgccatgtaaaggaagaaagccagatttccatgggagaagttggactgtgatacagtttcagtaacccacacggagagctctgaagctgggatggtccctcagagttgtctcaagttggggtgagaggagctggacgtttatatccccaatcattagatgcaagctgccccaggaaggagtatgatcttgggccgaagtgactcctttttgctaggtaattcccaaagagggctgacagctgagggctgtctgccagcagtactccaatagctaggaaaataagcccttcagttatgatgtgggatctggataaggaatatagcatctactacagttatatttattcattcatttgacatatttattgaccacctactgtgtgccagatttccaggcaccaaaggtgcaaagttgggcaggaggtgaaacctgtcgttaaagaactcagagtagagtagaaggattaaatatactttcttattttctcagttattaccatcccctttgggatgttacttcccacctcatttccagtggtccattatcaccctgcctcaatgcaaagaactcttttagatgtttctcacagcttctttttgtaatactagtacagcaatgagaaggagaaggggaagggaaaatttaatccagtttcaaattatagttactttcacagaagtaactgtagaaaagcttccatgttcagccttgctttctccacctagtccttgttcctcactctgctttggtttttcagcatatacaagagagaactaagacaggaaacccctcttaattccatggacacaccccagtgcctcgacttttaaaaaatcacccttcagacacttctaagtttcttgccttcctctcccctgtcacctctatttccatccttgtcctaagggattgtatgaacatgcttttggagtttgtagtctggggtttgggatgggaggggtacaggagagcgggcagt

SEQ ID NO: 125783 - DNA, 1119 bp, Homo sapiens
aaaagtattaatataaggattggaagggaggaaatgaagccatcacttgtagacagtataataacacatacataatttttaaaagtacagataaattattaggattagtgagtttagtgaagttgctggattaagattaaatacaaagtcaattaggataaaatgaaatttcaaaagataccttgtacaatagcacttaaaaatatctaaaaggaataaatctaataaaagattaagaattttatatagggcatataaaacattaagagaaattaaaggagacctaagtcaatgggggaatgtattggatctgttccatattctgcagagaatgcactattgctcagaatctcgtaattagaggtagggaatcagagtcaataaagtgattgtgtactaggtagtaacattttatgtagttatccactgattccacaggtagcattttggctttttaccagtctttgttttataatgaactgattagtctttctcttactaggctgtgaccatagataaactgcagggaagttctgttactgtatctaccgaagatgggttgctgaaagccaagtatctttatacagaatcatcatttctgtcttctgctgctggggatattacattaggaagtgttcatggtaagctgacaaaggcgtaatacatctgagactttccacgtagcataaattttaagagatgactctgtagttgaaaaaaggatcaggaaactggccttttaaataatgaaatgcagactaaccatctttttaaaaaaaaaaccataaaaataaaatgactcataaagctaattttattttatttgtgcaagagattaaagattatgctgttatatatggaactaatagtaagtctaatttttaatgcatttcttttttctttttttttgagacagagtcttgctctgctgcctaggctggagtgcagtggcgtgatactggctcactgcaccctccacctttcacgttcaggtgattctcccaccccaacctcccgagaagctgggactacaggtgtgcgctaccacgctaggctaatttttgtatttttagtggagatggggtttcaccatgttgcccaggctgatctcaaactcct

SEQ ID NO: 125784 - DNA, 1022 bp, Homo sapiens
tgggaaaaatgtaatacttacctctctggtttgttgtgaggattaaatgatagttcatgtgaagtagctaacatggtatctggtgcagagaaaatgccaaataagtgataactattattgttattaatgatgaatagtaactgattattattgtcatcttcatcactgtggatatttagttagctgatcacagtgatttttgattcccaagtccttcatcagtgaagctaccagaatacccaagtatctcttgtttttccctttgagtccaagtggcttatttaatccctttaacagcagttgacatttttttccagttgatgtcattattcgaagcagtgagtttctgtttcattccttattgttcttttgttgctttgtcagtattaatacagaaatattgaaaatgtttcactagtataagtcacacttactctctttttcactatatgtatttttaaatttgtctttcagggtcaaaaattgcatgttcaaacaaaaggaggcaaagtgatctgtctgggaacagtttatggaaatatagatattcatgcatcagataaaagtgtaagattgaaactttctttttttttagtaattgcaactttgcttccatttggctcactaagttggtaggttctacaaagttcgtagcataacattccctttttaatgcattttagttcataagtaaattcaaatttgaaattgaagtgatgaaataatatacaacttaagttttagtttgtggtttaatacttttgacagttacttagttcctagtctggaatcaataaaaacttaaatgcttactatttaactcaagttctgaaaagatttttatttttatgatcatagattaaaatagatgattaagtaatatcaccagtaactggattggatttttcttgtgttaggtttatttgagtattttctaagacctttttacttcgcccttaggcaaattgaaggatgtttcaaaactcagctttcttcagtattttccacaaggtggcaccatt

SEQ ID NO: 125785 - DNA, 1036 bp, Homo sapiens
atgccattgtaggcataaaattaaaaatggtttcttagccttggcaatacaaaccttttcagtcaggtgatttgttgtgggggcctgtcttgtgcagtataggatatttagcaccatctttgccctctaccttttagatgccagtagcatgctcctcagttgtgacaagggaaaatgtctccagacattgccaaatatcttctagagacaaaatcatctccagttgagaatgattgctttatgcaagtccatcattcttctgttttcttatttagtttttttaaaaaacatagttgggaataatttatgaataatgatgaaataactcctaggatgatgaattagcaaaaaaaaattaaaaataagaacactattatcccataatgtatttcaggtttataaaagtccagtggaccaattaatggtaattacaggatagaatgagttttgttctatttttttaaaagtaagtacattttctatttattccttgaaagacctcccaagaaataacagaaatcatgaaatatcagttcttacaaataaaatagctcaaaacaagaaattcatgaaaaattatgcctgtggatactaatggtataccaagggttaagagaattatccttgagatcataggatttaactaacttcaattcacaaatgagaacactttggtaaaatatctggtttaagttttaagtatcgtacaataatatcattaccttgaattagtggtcacctgttgatatgtttctctttcattaacttaaggacttgaaatatagttgacctgcatattaaaaaaaaaatttttttttttgaggcggagtctcactctgttgcccaggctggagtgcaatgacacgatcttggctcactgcaacctccgcctcctgggttcaagtgattctcccacctcagcctcccgagtagctgggattacaggcacccaccatcatgctcggctaattttggccaagcatgttggccaggcttgtcttgaactcctttcctcacatgatccgccccaccttgg

SEQ ID NO: 125786 - DNA, 1671 bp, Homo sapiens
tcgctcttgtttcagcaaaccctgacttacgtctcctatttgacttgaggcggcacagtggccaagtcgattggccgtggcaagtgaccctccctgtggctgaagtgttctgaggactggcgagagaggcgcgccatgcttgccccctgttcaggttgggagcttggctgcttccgtctctgtctccgtcaggtccgactgtgggctggcgctgggcgctggtcttgctgggcttgccaagccaggccgtacagctcaggtaggggcgagcgctggcccggatcggagactgaggtccctccgcctggcccggcgcgccgaactctgaaggagtggacactgcaggtgagcccgttcggtcggctgcgggcgcggctcccgtgccacctggccgtgaggcccctggaccccctcacctacccggatggcgaccgcgtgctggtcgcggtgtgcggcgtggagggcggcgtgcggggcctggacggcctgcaggtgaagtacgacgaggatctggaggagatggccattgtgtctgatactatccacccccaggcgtccgtggaggtgaacgcgcccctgaagtttggcaagtgaagtgaagtgaaaacgggtttgggtcccagggaacgcacagtgaacttaataaatttggtcgacgtgcacttttaattggtcctggctttctaaacctaatttacagttggccccttcggaaatgcaacttttcctctgttctattcttgagtatccgagtagtatttaaaaaattaggttcccaattatagaaattttatacatcgaatggaaacacgatttggtataatccaggtcaaattctatttctggagccgcttgtgttcttctttatcccgttgtcattagcaaactggcttatttttcaaggttgaagtttcttgacaattcattcaatggtatggcagtccatctacatttccccttgctcacagcctgggggtgtgtcccaaaacagccctgtcaataggatgttccaggtaccacctggtttgagtatttggttttagacgggcgcccagcttcttactgttatgtttccattctttttggcctaagttttccatgagtagcaagctttgaagaaaaacacatggtaagcctgcctaggaagcttcaataataatgcctgcaagatacctttcttaggttttcctaaatggcaagccactgtgtacacacacttttctaggaagggctccccagactgtcattcttcctgggactgaaggaagatattgatgatgatgatgatggtaataataatagcatttagcatttttaagatcatcttttataatgcttacagttgcccaaatagtagatgccgtagtcctcccttatccaccgtttggctgtctgagtttgttacctgcctcaactgttgtaggaaaatattaagatattttgacagatcacagtaatataacttttattacagtatattgttataattgctgtatttattattattgttgttcatctcttactatgcctagtttataaattaaacttgatcattgatatgtatacaggaaaaaacatagaatatataggatttggtactatttgtggtttcaggaatcaagtcgggggggcgggtcttgcctactttaagagaaatcatcaatatttatg

SEQ ID NO: 125787 - DNA, 1099 bp, Homo sapiens
cgcactcatttccactgataggaattgcatctgtcctttgaagctccccgcaaatgccatcacttccaagagagctgttttgattctctcctggtctgataccttctcccatgcatgatgtttttatctgttgtcagtagtagtatacttagagatctgggtttctgtgggtagctctacccgtgagacaggcttgagaatgcctgcctctcaattgaattcctataaatttactatctggccatattgtcttaattctttcttttctatactttagtccaagtagactctaaaagcctttctctagggcatacccagagataagccatataaactattgccttctggtccaaatttgtttcccttcagcaaaatggtcctcatcccaacaaccttttagtctggacatacgaaatctgaaatgcttctgtactcttttgctatcttactgtagaatcacaaacatatcaaaccgtaaaaccattgagcaggcccttgctctgtttctgtgcaggaagagacccaaggagcaaggaatgtatacttaccggaaacttactatagacccagcgtgatatttagttacgaataatacagagaaggaaacttggaccttgttttcaagaaattcagttggttccaggcaccaagcactgaactaagtgctttattaacatgatctaatccattccccgggggctgctggagatgttggctgactgtgtttaccctccagatctctcatcctaggttttcatactctgcacaccatcctcggggtccagtgtctccctttgcataacctgctgcattgcattgacagtggagtgttgcttctcactgaaacagctgtcataaggctcatgaaaggtaagaagccctgagtttgccagagtgctagttccagcctgagcaccaccaaggctagcttcttgggtgtgcaacctgtgcagtcaccaagagcctggctgcactcagaagagtgccctgctcagtttaatgctgcattacatcttgaaattcttagtagtatttgaacgagggcttgctcgtgttcattttgtgctgagccccacaaattatacagctggtcctgtga

SEQ ID NO: 125788 - DNA, 1049 bp, Homo sapiens
taaaagattccacccattcattttatttattgtttattgtttctgccttttctactagtcttaccaaatccataatgtgtttttatttatttatttttagagatggggtctctctttgttgcccaggctggagtgcagtggcatgatcatagctcactataatctctaattcctgggctcaagcaatcctcccgtctcagcctcctgagtggttggtactacagtcatgagccaccatacccatccagtttcttattttttcttatttttttttttttttgtagagatggggtcttgctatgttgccaggatgatctcaatctactggcctcaagtcatcctcctgccttagcctcttagagtgctaggattataggtgtgaaccaccatgatggaccataattttttaatggacaacaaaccagtgaagaaaaattttgaaagaaatatcatccataattctacagttcctaatgtaccaactgtctcttctcccccatttcctcttggcctttgttataggtatgcatattttacccagtagtaattgtgatctacagatattagataaattttagaaattatgttattgtaaacattttttcatgttgctatgtaaacttataatttctaatgactccataggattccactggatggcagtgtctttttctttttattattttaaattagtaagtgtgtgaggaaaaactctgtccaaactgtgttttccctctctctcacactgcaacaataatcatcaacacagaaaaacacttctgttaccaaatgtgtgggaattcttcatgtaccaagcagcagacaccagctgggtgtcctttaattcagttctgacactatctacctagagacagtgtcagatcccacaggttgggggacatagtccccaagactaccctccacacccccagataacaggtgcaagtccagacctctggaacttctgaccaactgtctttaagttggggttcccacggtacctctttaggtttgattaatttgctggggtggctcacagaactcaggga

SEQ ID NO: 125789 - DNA, 1083 bp, Homo sapiens
gagggaaagcagtaaattgatagtgaatgcctcaacctgtccaaatgctactttggagcacattaaaaaaaaaaaacaaaactctatcggagtcagcagctaattaaatttcattctcttgtggttttctaagaaactatggctgtacagagattgatgagatacaagataggatcttgattctataaccttattagtgatttttttttccagtaagatgtaactttcttagcccagttttgtgttggctggtttcgtatgaaatgatataatgtcatttgggtagatatggtactaagttattcttctcattgtaaaaagcagaacctgaacattttagtcagtagataaaatcatgatggttaccgttttgaggatgagggataagacaatgaaaactttgttggtttgcgtgttttggttgcattacaatgctgtcatcatcttattaaaccacatcttttttccccctgtttcaaaaaaaatctactcagcttcttcatactggagtgtatattcagagacaagtaacatggacaaactattgccacattcctcagtgctcacttggaatacagtaagttaacactgtgtatgctgtatgcaaataaaatcaattcacagttgtgggtcagttgttggacacctctcttatagccatcaaggtcgtgatttcactactgttttgactgataaagaactcagttgaattttttttggcagaaaagtaatagcaaatccctgctattggccaaaagtatttgtataaaaacagtaaaaccaaaggagcaggtacacagggtatttattattcttcctattaccaggcagaactaaacctctatcatggtatttttattttctaagtgactagagtggattaaaatatgtactgagtttttataagtgaggaatgggtggattgctgctatcatacttggtagataaggaccttcacgacccctttttccagccccattaaaaagtctgtaataactctagagcttcaggatcagtaaaagtcagcaatcttaggcacattcaccccaaatgactttttctccctgtcggttctgactccct

SEQ ID NO: 125790 - DNA, 2087 bp, Homo sapiens
ggtgggggtggggaacttgggaacaatagtcctggtggggcggaggcgacgctacgggccgaagccctgaactgggagataaccttcccagcgcccccccgcctccgccaccccctactttccgccctctgcttgtgcaggcagtcttgagaggaggtgaaggttaaaagtcttgttcatgaaattgctctagatacactattgctttagcacactgtgagggggtcagatccgaaggcgtgagaccagaagtcgacttcctacgttacccacccccccaacccccgccctttttatttttctgctggacaatgttccctctagggttgtttcccggcttaggaggcggtggttgcggctgctgctcctacggatattgcgcaagactggggcgttggaaaccctgtaggtctggggaatgaaaaaggaagtgggactttgggaagtggttgctccttagtcttggcgggggttgggaatgggaaataagctggggaaaatttttatcttgggtaaggtacacctcgaagaataatcacttaattctgaaatctgattatgagaaggatacacagttaatgcctgtaaaatgaatgggcagcaaacattggctagtttttattttttgtttaaaaagtacagtagtttttatggtggaggtgatatgacttagtagtgaatactttttcacgttttaaagagactggtctagtaaagctttagcgttaaatttttaacagcttataaaataggcccttgaccatacacagtattatactagcatcgttgagctttgtgattcccgcctccccagaccaataatagaggacggaagtaaagttttctcagtatcttttgaagattgaaaatataagttaaataatctaacttattccttattaaaaataaaaatattgcttatatttaaacatttgctcttgatatttagcctatgtatttttgaaaaattactttttgatctgaaagggttaaggaaaacggcattttccctttttactattgagagtttttattgtcttggtatcttttgaatggtgtcatttacagcaattggatggagtcccttttttactactttctagcaaaagtagaagaaaatactttgaatatttaagatgtttaaaactagtttttttgggttttgttgtttggttggttggttggttggttttttttttgagacggagtctcgctctacgctctgtcgccccggctggagtgcagcggcgcaatctcagctcactgcaacctctgcctcccagattcaagcgatgctcctgcctcagcctcctgagtagctgagattataggcacgtgccaccacgcccggctaatttttgtccgaagtagccgggactacaggcgcaagctaccacgccctgctaattttgtatttttagtagagatggggtttcgccatatttgcaggctgctctcgaactcctcatctcaagtgatccatctgctttggcctcccaaagtgctgggattacaggcgtgagccaccatgcccggcctaaaactagttttttaccgtcttactttggttatggaagaagagatggtgtggtccctggtcatttcttgtttgcatgctagtcaccttgttatccctaggcatataccgtcaggaaggagcattgtttggtgatgcgggccatcaggacaggttgcccagcctctgaactcctgtactggagaagtggccttagggttcatgctttggggatgagtcagggattcctattggagagttcatttctttctttctttctttctttcttttttttttgagatgtaacacctcgctgtgtcgcccaggttggagtgcagtggctcaatctcggctcactgcatcctccacctcccaggttcaagcgattctcctgcctcagcctcctgagtagctgagattacaggcgcatgccaccacgcctggctaatttttgtatttttagtagagatgggatttcaccatattggccagactggtcttgaactttcatctgactgactttgtgatctgcccgcctcagcctcccaaagtgctaggattacaggcatga

SEQ ID NO: 125791 - DNA, 1704 bp, Homo sapiens
tataaacatttaatacatgttcataaacttgaaaaagttttgtcagtttatacaactgtcataatgtatgagtgttcatattataattttcttgatctttatttgatggttgaaaactgatatcttgttttaacttgaatttcttgattactattgaggatagaaattttccacctgtcattactattctatgagtgtctattcctggccttggttgtgccccatactgttaaagaggagacagctaaggtacccagactgtgcagaactatgttgcctagatggttatttgcatgttgaaaacatgctaattttgctaataaattagcaaatagctaatttgtggctgatccagaatttgatctcaattatctctacttttaatatttacaaaatgagagataaatgtataaagtagggtggtgcacattcatgtttgacagacctaggttttaactccacacagactccctctgatggctgggggttggggaggtggtcctggaccatactttgagaaccagtgagctaatacatggtaaatgataaaggtaatgctgggaaagttaggtagaggtctttttgtgaaggatcttacatctatgctatacttagattttattctacagaccgataatagcaattctggacagtctgcattgtaactcctagagacatggagaaagtagggaggtgttaagaaaatagacatgctggtccactccagcgtcattcccccatctcaccttctccagcctgctccttgagttgtactctgaaccttcacttacttagataggttctggtagaaaaggtgagaatcattagtctgggtttctggagcactactgagtcttttaagaaaggtaaacagtcatttgtgttttacaaagttgaatctgatagcagtatgaagggtggcattttggaagctgttgaaatataagaagtgagatgtgagggcctgaagtgaactgagatggggaaatagagtgtatacaacacatctgataagaattaagaaaggagtctcaatgattcattagatgtaggtagtaaagaagaaaagagtatagtgttatgactcgcaaaatatctagcttggtatctgtcacccaagctagagaataccatttggtagagtaaggagtgagggaggagaaacaagtagaggagaccaaacaacattgtaggaggaagtttcagggggagaagaggataaatttaattttcaacatgttaaaactgcggtgcctctgagacatccagtagaaatgtagagctcaagatttctgacaggacggagttaaagatgtaggcatcataatataagcatgtaggagatagtcgacagcatgggagtgaatgagcttattccaacaaacttatagagtgaccagctttaggttgaagaacatcagtcttaaaataacagccaaaagaaggatatactagtgattgttcctgagaaggtgtggtcaaggaggagggaggagaaccagagatgtcagaaaagccagggagagtttcaagaaaggagttattaccagagtcaaataatgctgggaggaccggtaaggtgaggttgagaaagtacctattccatttggcacataggagtgctttggtgactagaaaaaacagtttgggttggggtatgggaagaagctagattatagggtgaagggtgggtttagtgtcttt

SEQ ID NO: 125792 - DNA, 1011 bp, Homo sapiens
gcttataggtttaaaaaaactaataatagctttattgagatataagtacctaccataagatttattcatttaaagtctatgattcactagttttttattacattgatgaagttatgcaacaataaccataatcaattttaggacattttcttcactttctgtacccattagcagtcactccccgccttcccataagccccaggcaaccacaaatctaccttctgtttccatagatttaagtattctggacattttatataaatggaatcatacaatatgtggtgttttgtgactgactccacctaacatgatgatttcaagtttcatccatgttatagtattgatccgtagtacttttggcctttttatggctgaataatattctattgtatagataccacattttgtttatccattcatcgtgttgatgggtatttgaattgtttccactttttggctaatgtgaataatgcagctatgaacatttgtgtacaagtttctgtgtggacacattttcaggtctcttgggtatatatctaagtgtggaattgctcagtcacgtggtaacactatgtttaacattttgcggaactgccagactgttatccaaagctgctgcacatattacattccaatcaggaatatatgagggttccagttcctctacatcttcaccgatacttgttgctgtctttttgattataggcatcctactgggtgtgaagtggtatcttcttgtggttagcttgtaagattttgtgtgtcttaatttgtctttcaaagctagagtgataggaaatattttccagtccttgcatttgagctaatcttagtgcttacccagtgccactggtttagttatggttttcttatccatcctttgatgagtattcacctaaacatatttacatcaactaacttcagaagtggaagtgaacttttaagtaactctccagacatggttcactgagacagtaaactaaaaatttactttaagcattctcaagaatg

SEQ ID NO: 125793 - DNA, 1045 bp, Homo sapiens
tcttagcctggcattccagaaccttcttaacataatgtcacagtacctttccagtgttaaacttctatactctggtatgtatcctctcttctttttgaaggaagctattcctggtccttgagcatacctactaaatgaatgaaatcttgcttatctgtggttgtactgttgaacatactttttccctcagaaagcttcccttttattttattttattttatttttttgagacaaagtcttgctttgttgccaggctggagtgcagtggcaccatctcagctcactgcaacctccgcctcctgggttcaagcaattctgctgcctcggtctcctgagtagctgggattacgggcgcccgtgaccacacacagctactttttttatttttagtagagatggggtttcaccatgttggccaggatggtctccccttttattttataaaccagtacttggaagatgagaaagctaaaaatttaaaatgacttcaccatgttcaccaaaaactcagaagcaaaaatgtgattaattctcaccttctagaataaatattttagcacagttaatcttaaagcactttttctcctttgtaaagtttgatctttaatatcacaagaaaaaaagcctttcattagatttgagttgaaaacttgataaggtaaatcaggtgatatgcaatttctaaaccactagtcttttccaaatatgagttgaactcctcttccagcattttatatttcctgtagtatttaagtttctttagattcatgcagtcaaaccttgacaattatctccttccttctgaaatcacacaaaaatcttgtttgcatttgtacagtattgtagggtctgtagctggcctatggcagatataagaagcaaacagtagttgctccctaaaagttttttttggagaaagtggagtgtggactgtattagtccattttcacactgctatgaagaactgcccgagactgggtaatttataaaggaaagaggtttaattgactcacagttcagcatggctggggaggcctcaggaaac

SEQ ID NO: 125794 - DNA, 1052 bp, Homo sapiens
aactgttgggggagtagctaccaaatttgataaaaactcaaaaattcgtaataattcagaaattgagaatagcggccgggcgtggtggctcacacctgtaattctagcactttgggaggctgaggcgggcagatcacgtgagctcagaagttcgagaccagcctggccaacatggcgaaaccccatctctactaaaaatagaaaaattagctgggcctggtggtgggcgcgtgtaatcccagctattcgggaggctgaggcaggagaatcgcttgaacccatgaggtggaggttgcagtcagccaagatcacgccactgcactccagcctgggcaatagagcaagactccatctcaaaaaaaaaaaaaaaaagaaaaagaaaaaagaaagaaaaagaaaatggtaaggatatagaaaactagtgtttctaggtccattaaggggagggtaaactggtgaagcctgttttggaaggcagtttggccacttctaatagaattgataaatgtacatactctttgatccagcatgtcaactttagggatctttccgtaaaaatacttgcatatgtgcataaaatagtatgtccaagtatgcaacaatttttgtgaaacaacctaaaatagctattagtaaggagactttgcataactggttacctaaaaggaaacagatgtggaggggagagagtttggctttttcattttatacctgtatgcagaaaagagtaacatagcaggcctaagactactatccttagaaaggcctgcttacaatgttatcccttggctggtgtctgggaacttagacttttgggagaatttccattatcccctgataagagtggttcactgtgcccaaactgtacaaacaatgtggtttatgagctgggcccagtggctcaattgtgtaatctcagtgctttgggaggccgaggcaggaggattccttgaggccagcttgggccacatagtaagacctcatctctacaaaacatttttaaaaattagccagatgtcatggtgtgcacctgtgtagtcttagctactttg

SEQ ID NO: 125795 - DNA, 1637 bp, Homo sapiens
gtggcacgtgcctgtaattccagctactcaggaggctgaggcaggagaattgcctgaacccaggaggtggaggttgccatgagccgagattgcgccattgcattccagcctgggcgacagagtaagactctatctcaaaaaaaaaaaaaacaaaaaaacaaaaaaaaccagtgtacctagcacatagtaaccaatcattaagcttttgcaaaataaccagtatacctagcacatagtaaccaatcattaagcttttgcaaaatacactccacttttctcacctgttgtcttagtctgttcaggctattacagaaataccataaacagggttgcttattaataacagacatttgtatcttcaaattctagagactgggaagtccaagatgaaggcaccagcagatatgctgtctagtgaagggtcactctggctcatagatggtgccttctcactgcacttcacatggtggaaggggcaaacaagctctctcgggcctctttagtaaaagctggtaatcccattcacaaggcataatctaatcatctcctaaaggccctaccacttaatactgttgcattggaatttatgttttaacttatgaatttgggaaggacacaaatattcagaccatagcaccagtctgcctcagaataggggatgacatggctttctggatacttcgtattaagcaagataattttaaggtgatcctacattgctctggaattattcatgcacacattcaaagagttagcctgtccactttctttttctgtcgtctagccgtaggtttctcttttcatatgatgtttcattttcttctttgtttttgaaacggtgtcttgctctgttgcccaggctggagtgcagtggtgcgatctccgcacactataacctctgcctaccagcttcaagctattttcctgcctcagcctcccaagtagctgggattacaggcacccgctgccacatccggctaatttttgtattgttagtagagacgtggtttcaccatgttggccaggctgctctcgaactcctaacgtcaggtcatccgcctcccttggcatttactcattttacagaaagcttctgagggtgtactgtatgctgggaatgcaacaaaaaacaaactggcaaaaatccctgcccttgtggagcttatatgttagtcaaggtgatggacgatacatattaacatatatggtctgtcatgtggtggtaattagtgttattgagagtgtggttcgaatgagggatagggagaaagcagagaatagaagggtaagtttacagttttggctggggtagtgggaaaggttagtggtgtagtgttaaactggtcctctgaaagttctgatttgtattgtttgctgatttctgtgataaatggattatttaccataatcatcacagcaaaactctgaggtaagtactgttatgtgccattttgcaaacaggaaactgagacagagaggttaaaaagcttgtcacacagttaaatattgtggggtaagaatttaaacacaggcggttttaaagccttcactagggtgattttgcctctcaagggacacttagcaatgtctggagagatttggttgtcacaactggggtatgggagtggacaggctgc

SEQ ID NO: 125796 - DNA, 1024 bp, Homo sapiens
tataggtgatggctatacaatgtttactgtaaaattctcaactatgctgtgtgttggaaagtttacattataaaatgggaaaaagcaggtgtgatcaacttttaaaatggtgttaaacgcattcaatatttaaataattataaatatatttttaattaatagtgctatttataattaggtaaatatcctaaaagtgatattttaatataatttcagaagtcacaaagtaaatctgtaagatttacatgatttaattcaaaccaaaaacatcatgttaattggaaccaatttaatttgttgctgtatagttagcccttgtttggaaagtctaattttgataatttctttaacttacacatttaatattgaaactacttttttaggcaagccaattatacttctcggtgcaaaattcttgaaatctgtattttattaaaaagtaaaattgtgtttaactgatacgttctttatctcactccccaccatcactttttagatcattgtaatggcctgccgagaatttgagatgggaagggtatgtataatctattcctcttactatttcatttttacggataaatattcttagtcttttattattatagtcttaacataagcggttaatgtagatacttcttttattttggggtactgctgttgcttttatttcatacaagggacaaaataatctctcaagcatgttgttttcttttatattttgtaagtatgttttatcacacacaggcatacctcagagatattataggttcagttccagaccaccacaatagcgcaattcaaacaaattttttgttttcttagtgcatataaaagtcatatttatactgtattatagtctgttaaatgttcagtagcattatacctataaaacacttcatgccttattttatttttttattttttctagacagagtctcgctctgttgcccaggctggagtgcagtggtacaatcttggctcactgcaacctccgcctcccaggttcaagcgactctcctgcctt

SEQ ID NO: 125797 - DNA, 1034 bp, Homo sapiens
tatcttctctcctcctttgagtaccttctccttcttttagtcttaggctttgtttacatcaaacttctcaattccccacatagattatacattgaatctgctgtgcttatgtatatttccttcactttttatgggataaccttcttttgatatccaactatgttgtagctgcacacactcaacagttagccatagcctctttattccctgtatactgcagtcatactttggctggacataactgtctccccatcttgaatgctgagggtcaagaacagttttgtttccacagtgccaagcacagtgtctgagatgcattaagtggtgttcaataaatgtttgcagtaaaccagcaggtatttaagttttatgtgaaaagctgaagaagattttactattttctgaatagatacacaaagttgatgtattaaattttctgttttagaaaataccagaggaatttaatgtatttaatttaatacaagaaatgagaacacaaaggcattctgcagtacaaacaaaggtatagttgtttgtttccctttataaactgctattttataaatgctttcttcttttttaaaatgttgttttcattttgttttttaatcatttttctccttcataggagcaatatgaacttgttcatagagctattgcccaactgtttgaaaaacagctacaactatatgaaattcatggagctcagaaaattgctgatggagtggtaggtgttcttggtctattaattttaggaaacttttactctttgttaagatgtaatatttagccttttttttgttgtcttgtgttttgtctaacatgagaagaatatccaggacacttaacatttttacttaaactcatttccttcttattcgtatctgtattatgatggctatttaatgactccgatataaggtaaattatgttctaaatgaaataaagttaggaaagatctcatgtcaaaaatcatataattcgttaatgttttacttttttaaaaaataattgcattgttctctttactcttc

SEQ ID NO: 125798 - DNA, 1617 bp, Homo sapiens
aaattttagaagcagctataaaaaaatgttgaaagttgatgcctctggctaacaggagggctgcggggcagagactatgtttttcattcaaagtcttgtatttgactttttaaacagtatatgtgtattaccttgatgaacattaaattttcttagtctgaaaaactgcagtttttattcgcaaccagattgtaatggctcttaatatgctactcttagctacataattctcaggtatcaacttgtttaacagtcttaaaatgccctttttaaatgtttgtttttcagttgccttgttgaaggggatgctaaagaagaaatactgcagccaccggaacctcatccagtgccacccatcttgacaccttctcccccttcagcttttccaacagtcactactgtgtggcaggacaatgatagataccatccaaagccagtgttgcatatggtttcatcagaacaacattcagcagacctcaacagaaactatagtaaatcaacagaacttccagggaaaaatgaatcaacaattgaacagatagataaaaaattggaacgaaatttaagttttgagattaagaaggtccctctccaagagggaccaaaaagttttgatgggaacacacttttgaataggggacatgcaattaaaattaaatctgcttcaccttgtatagctgataaaatctctaagccacaggaattaagttcagatctaaatgtcggtgatacttcccagaattcttgtgtggactgcagtgtaacacaatcaaacaaagtttcagttactccaccagaagaatcccagaattcagacacacctccaaggccagaccgcttgcctcttgatgagaaaggacatgtaacgtggtcatttcatggacctgaaaatgccatacccatacctgatttatctgaaggcaattcctcagatatcaactatcaaactaggaaaactgtgagtttaacaccaagtcctacaacacaagttgaaacacctgatcttgtggatcatgataacacttcaccactcttcagaacacccctcagttttactaatccacttcactctgatgactcagactcagatgaaagaaactctgatggtgctgtgacccagaataaaactaatatttcaacagcaagtgccacagtttctgctgccactagtactgaaagcatttctactaggaaagtattgccaatgtccattgctagacataatatagcaggaacaacacattcaggtgctgaaaaaggtaataatatagtgtcaaatacttaaatgtctttcctatgtgctagtcactgttttaagcactttagctgtattgatttattatgttttattccacactctaccatagaacctacagcaaaatctgtcttagatactaattttttaatataagcttttaatgtattgttaacaatttggtcacattatattactgggttttgtgtttctaaattattttagtagttataactggataacttattttctttttcttctgtattatagatcttagtgtttttgtatcggtcaaaaatttatctgactgaataattagaaataatttagggaagaatcacttaaaataacagtggcaaaaa

SEQ ID NO: 125799 - DNA, 1027 bp, Homo sapiens
ttgtgataaaattggttttatttccagcataagatttttaaaagaagcaatcattttcagttattccaaataaatttacaattgttttgcatttaccaagttttgtttggcttaaattctaaattcccttgtggaaatttatttgttccagaaaatgagaatgtctgtggacatggtttttagtagtttgaaagtatttctgaacactgactagttattgtggtgttttcactgtaggttttggtaatcgatgtggaaaacccaaaggaccaagagatccaccttcagaatggacatgattcagggagctagaagacactttaagttatactggaaaattcaggtgccactgaaagccagatttatagtattccatctttaatatgtgggactaacagcagtgtagattgttaccttaatattttttgctgggaccatctacctgccttatactacacttaggaaaaagtattacatatggtttattttgaaacttcaagtattattgccttaatgtctcttaaccctgttacacgctgcttgtagacatgttaatatagtaatacctttatgatatattgagtttaaggactactctttttctgttttatcatgtatgcattattttgtatatgtacagggcaagtaggtatataatttgataaagttgcaattgaaatattattaacagaagatgtaagaaatttctgcatggtctaaatctttgtgtactttatttgtaaattatttgccctggagttttagaaaatagtttctgaattttaaacttgctggattcatgcagccagctttgcaggttatcagagatcaaagattgtaataataattttgtaaattgtaagcaaaaagttatttttatattatatacagtctaattgttcatcctaattgttcctgttttcatctagtcagagattcagtaagtgccttggaacaatattgaattctcttagcttgtgtgtgtttctttaatatttgaactcaagtgggattagaagactatcaa

SEQ ID NO: 125800 - DNA, 1050 bp, Homo sapiens
agaggaaacccctttctctctttcctgaaatttggagaaggcgatgtggggcagtaattatgaagattgtaagctttcagctcatattttgcttattcaacatttcaggtaattcaggtaaattgaattctcaactctttatttttctgagaccaagtctcactctgttgcccaggctagaatgcagtggcgtgatttcagctcactgcagcctctgccttctgggttcaagcaattctcccacctcagcctcccaagtagctgggattacaggcatgcaccaccacgcccagctaatttttgtatttttagtacagacggggtttcaccatgttggccagtctggtctcaaactcctggcctcaagtgaggcctccacccacttcagcctcccagagtactggaattacaggcgtcagccaccatgcccagccaaattctcacctcttaaccagaaaattgtctcactacaaatatagcctaaccacttgctcaaccacagtcttctttccagtttgaatgtgtacttaaggagagcaaactgggggaaaataaagttgaaaattgtagtacaggcatcagccactgcttaaaggcttcactgaagagccattagcagccacacagcaggaagcaaaaggtagagagagtaaaaggggccaaatagagtaaatagaaactatccataaatgtctctcctggggttaattatgctgccagaattttcatatggaagaacatcagctcattttgatacttattttaagaaagggataggaggcctataaaatgtgtatcaggagccttattcaataatataaatctctgaaaagaaaagcttaagttttgtggttgtttaaaaaaaaaaaaaaggtttgtggttccagtcaattctccaggaagaggaagctattttaggtaagaactggtaggtagagagtaaagtgtatttatccacaccttgaagcctaggtctggcaaagaaatgtaaggaaaaatgatagactcatagaatgtctgaattgcaaatgcagccctgtacgtaatttg

SEQ ID NO: 125801 - DNA, 1474 bp, Homo sapiens
ggttttgtaaaagatgcttgattgattgttagaccacttagacgtggtcgcgggaattcgtatttgtgacacagcgttcaaccccggataatcctgtcaaaaaaggggtgtggagagagcactggcgtcagctggaagctaccagaggcctgagcttttcatccctattagggaaatgaggtagcgtgcagggcccgaagtgcgctgtttcgtaaggtaccctccctgcaccctactctccgctgcgtattcttaagtgttttgggtggtcctgtttgaaataccacccttctgaaagaattttcagccatattctttttttccctgcagcaaatgataaaaccaggagctttgacgatttttcgccagatcaagcggctgcagaatgtttgagcattagaaaaaggcgaattcttaagggttcttgtcagacagggtcagttttgtttttaaatgtaggctagtcgtataatttttcaggtgtttccaccacttcagctacggatacacaatgatctgacaatagtgcaacatacggactagttgaaaatcaaatctttatgtgatcgcaagcttaaagcgcataatctttattataaatgtgcactgctacacagtgttgtcaaataactctttttgttttttagaaaaagaaatgtcaagcagtttcagcattgctgatctaacagtagctcagatcatgaaaaattctgtttggattataatggtttgttttcacaacttaaaacatgctgcatgtgcatgtagcaatagtgtcacttcttccttgatattttttgcctgtagcaaagctttaacatctaagcatagccatcagggactctggtgcaatgtaaatatctttcagcttctgggagtgttgtttctaggaaagtggttttgaggatgggattttggtacttttagtcaggaattccaggtgattagtattttaaagctattttgttttaacaatttatatgtaaaatttaggagataagtgcctggaagtttgtccatatgcagcttggtatcatcactagtgtttgtggtgtgtaaactgcacatttgctgtaagttctctgaaagaggaagtgaatatgagtattacatagttggagtaatggaatatttgagaagaaataagtaagcattctttaacaattctaacttaaaatgtggagtacacaaatggtccttaaagtgaaatggctgttaaagaggaatttttatagtcttttcaattacatttagaatccttcttcttttgagggttaacactaatattattaatcctgaatataaacagtgataggttttacattaagatgtgggaatgatcttttcccatgacctatgtgggttttttggagtagtgacaagatattaacactactgtaagattttcattttttcagacacaaatgctatcttgttgaggaaaaactatcagagaaaaagattcctttccagt

SEQ ID NO: 125802 - DNA, 1045 bp, Homo sapiens
tatttaataataatagctacatttgtccagtgcttaaaattaggtattgtgcatagtgttggaaataatgcatatgttgccttgttataaaaattgtaaaaggctgggcgtggtggctcgtgcctataatcttagcactttgggaggccaaggtgggtggatcacctgaggttgggagttcaagaccagactgaccaacatggagaaaccccgggtctactaaaaatacaaaattagctgggcgtggtgctgcatgcccgtaatcccagctactcgggaggctgaggcagagaatcgcttgaacccgggaggcagaggttgcggtgagctgagatcgtgccattgcactccagcctgggcaacaagagcgaaactccgttaaaaaaaaaattgcagaagacaagtgttattatctatacagatgagattactgaggcacaacacggttaagtaacttgcttcatgtcacttgatcagttattggcagagctagaatttgagcttaatatgtataattacaaagcctgaattatttctattatatcacaatacatttggggtttctttctttttcattttctttttcttttttttttttttttttttgagacagagtctcactctgtcacccaggctcgagtgcagtggtgtgatcctggctcactgcagcatcagcctcccaggttctcatccctcagcctcctgagtagctggaattacaggcgtgggcgaccttgcccggctacattttgtatttttagtagagatggggtttcaccattttggtcatatgacctcaagtgatctgcctgcctcggcatgccaaagtgctgggattacagcggtgagccaccgtgcccagcctactgctttttttcttatgtggatttaacacttatttatggcccgctttgtgcttgggtggtggtggaagaaagggagatacaaagaggagaactttctgtttcttgccttgagataatttttaatttaattggagagataaatagctgcaatgtaaaagacactgctcattgttggtaat

SEQ ID NO: 125803 - DNA, 1048 bp, Homo sapiens
attatggagatgaagatgtggagtttggcagaggggttgggttgggagattaatttggagattagtttgccacagggttatagtttacatcatgtgagtgcatttttagaggcaatatagagaagagagaggaatgcctaggagagatcctaggtaaatgtgcaggtttggatggtgggattatgagaatgagggaggagtcaggtaggatagtacagtttcagtgaaacttagggagaaattttgagaaggaattgatactgttatgttgcagtgaggtccacggaaaaaagggctgagaagccactggattttttagctttgattagctgtgttagcgaggggctgtgataaatcacttctttcccatttactgtttgtgaagtcctttctcttctttttactgtatccttcatctccttcaatttttattttagtgtatgtaattgtaatcattttgtaatgtaactgcttttccttctgcttcaaattctttacatttctcttcttctgccgctgcttgttctctcatctatttctagccatacattattcctggaaggaataatgtaagagagggaaggtggggaatgtcattgttgtcgttcagttcagttgatttcatggactgcgttattatggtgtgaattatggctcatggctcatattcagggcaggcaaaactgtgatggtgtgaagcttgtttgatgtttgtgcagcaacaatatattgtgactgaaagctgtagtatgaaattctaacatttctttctctcttctttttttttttttttttgagacagagtttcgctttgttacccaggctggagtacagtggtgcaatctcggctcaccacaacctccgcctcctggttcaatcggttcttgtgtctcagccttccgagtagctgggattacaggcatgcgccacctcgcctggctaattttgtatttttagtagagatggggtttcactatgttggccaggctgggctcaaactcctgacctcaagtgatccacgtgccttggcctcccaaagtgctgggat

SEQ ID NO: 125804 - DNA, 1065 bp, Homo sapiens
tttgtgtttccttgatgacatcaggtgtggagtatcttgtcctatgcttatttgctatctgtatatcttctttggtgaggtgtctcttaaggtctttagtgttttttttggtttgtttgttttttttgaggcagggtctcactcgttcatccaggcttgagtgcagtggcacgatctctgctccctgcaacctctgtctcctggactcaagtgatccatctcaacctctcacctaaaactcccacctcaacctcccgagtagctgggactacaggcacgcaccaccgtgcccagctaatttttgtacttttagtagagacagggtttcatcatgttgcccaggctggtcttgaactcctgggctctagcagtccgcctgcctcagccttccaaaatgctggtattacaggcttgagctactgtgcccagcctggtccatttttaattgtttgttttcttattattgagtttaaagagttacctttttttggataataaccctttattggatacatctttaccaagtattttcttatagtctgtggcttctttttagtcccttgactgtgtcttctgcagaacagaaaattttaattttaatgaaatccagctttatcagttcttttttttaatctattgtgcctttggtgctgaatctaaaaagtcattgccaaaatccctggtcatctagattttcttctgtgttattttctagcacataccacttctcctagtttagacttttttttttttggtatgtggatatccagttgttccagtaccgtttgttggaaagacttctatctccatcaagataagttgattgtatttaagtggatctgtttctggactccctattttgttccattgatctgtttgtgtattcttttgcctataatacattgtcatgatttctctttttatttttaaataaaatgtgtaatccttatatttagtttgacttttcagagaatttcttgcttttatggtgttagaattcttacttttattctgagaattatgatgagaagatcagttacgaatttttcccaagcctgagattaa

SEQ ID NO: 125805 - DNA, 2464 bp, Homo sapiens
ggacctgggttatggtagtgtttatagaaaggaaagtaaggagtgatttttaagagattatgcagtatgcatgtatactatataatctctactatattccaggacatttcacagttcttgtatacttccatcatggttttgtaatcagtcgtaagctttttgagggcaaaggtttatgtcactatttgtatatccttctctgtattttgtcttttgctgggtgcataggaagtcatttgaacaaagaagaatttaataggctatcaaatattttgtttgaagttttagaatgcaaatgaatgatccctagagttattatgccctttatttaaatatcacagtatcaccaagtagtcagattgagtcatactatttttaaaaggagccaagggtaagggaaccaacatctagtcttatgtatgccaggctctatgtagtcattttatatattttttcatttagtccttatagtaaccataatgaggaaggtatcaattaccatttacagattaggaaactgagatcaagtaatttttctgttatgctgctaatccatagatgctcaatttcaacactggcacttttccatcgtagcttttgcttcacctaaagttagttattttaagtgatttgaaataaatttaatattttggttgacacgaagtgaagaatacttagaataaaatgtataatgatacattttgacaatatgtatttcatattcaataaaaagggaaatttagaaatattccccaaaacctgagaggaaaaagaaaaggcattatttgttcctcattctgattttctttgtgtattgtaattccagaaatttacctatagtttgtgcagataaatgaagttgtaattttttcattttaaatatttcctttgttttgtcttccagataaaatcaaagacaaaattaaagagagagacaaagaaaaagaaagagaaaaaaagaaacataaagtaatgaatgagatcaagaaagagaatggagaagtaaagattttgctgaaaagtaagttttattcagtgattttagttctactttattatactgttcagtatctttattggctaagtgaataaaataagaaatgttatttggtgctgaattttgcggagaatgaacaatgatgaggaaatgaaaagtaaatgtaacaacggagagttctaatctgtatggtaacatgtcttatagtatatttagtgagccattaaaaagttaaaaggttaagcttcgttaaacttaatttcttaaattattttaaaataagttaattctatgtttgcattactagtcttactcatatttagataatctaaaaggaagaaattaagaaaaattgccaaagcaagttttagtatgatagggatggtgaagtaagtgatcttcttaaaaatatttgactgtcatcaccataccatagtctagcatttagagggaacattttactctgagctaaatcagaagcggtatgtttcttgtatgtttaagaatatccttgttttattcttttttttctctgttacagttgcattcatttgctgtttatatatgagggtggggtggagagaagaatttggggggtaggtggttgggtaataagtatactgcaaatcctgtcaataagtctgaacttgtaaagagagaatttgtggtagaatagacgtaaggatagtcttaaattcactcagatgtcaaggtaagaagaatccgtggcattcggttgctagacaactagcgaattcactagctagcaaatttactagtgctatcatgttgatagttgatgatgagaatatgttgaccttgattaacttcatattgaatttaattgttgataaggctttatatttgcttgagggggaaagaccacgacactgcatatgtagcaaaataactggtagtttatattatctaagataaagagtattagattctgtattttcattgcattctttgtcatgttttcagatattcgttttctattatctacatgtcagaacttcattttctacgatattctttcaaccttgaagaaatacgtcagagcttaagttgatggctgcttattagttaatgctcatgatccttttgttctgtttcttttgcctgcatattctatctgtgttgtctaattagattgtaagcctttgaggcaggaattgaatataaccacactagttatttatagcagctagtgatgaatgcttgaaaagtctgcttaaggccaggttcggtcgctcatgcctgtaatcccagcaatttgggaggccgaggcgggtggatcacttgaggtcaggagtttgagaccagcctggccgatgtggtgaaacctcgtctctactaaaaatgaaaaattagtggggcatgatggtggacatctgtaatcccagctactggggaggctgaggcatgagaattgcctgaacccgggagacaagaggttgcagtgag

SEQ ID NO: 125806 - DNA, 1128 bp, Homo sapiens
ggcgacagagcaagactctgtctcaaaaaaggctgactaaatattgattatcaattctgtaaaaaatgagtcctaaatatataattctgagtaaattttcagaagtaaacttcttacttagacaaaactgttcctaaagcatggtttttaaagtaattaaaatatggagtttcaaaaaacattttttccaacaggtgggaaggagaaaccaaaaacaaatatagaagacttacaaattaaaaaggtaaagaagaaaaagaaaaagaaacacaaagagaatgaaaaacggaagcgtccgaaaatgtatagcaaatctattcagaccatctgctcaggattgctaactgatgttgaagatcaagcagccaaaggcatcctaaatgataacataaaagattacgttgggaagaatttggataccaagaactatgattccaaaattccagagaacagtgagtttccatttgtctcattaaaggagccacgagttcagaataacctcaaaaggttggacactttggaatttaaacaactcattcatatagagcaccagcctaatggaggtgcatcggttatccatgcctacagtaacgaactctcccacctgtctcctatggagatggagaggtttgcagaagagtttgtgggtctagtgttcagtgaaaatgaaaactctgcagctttctacgtgatgggtattgttcatggggcagctacttatttacctgactttttagactatttttcatttaattttcccaattcaccagtgaaaatggagatattgggaaagaaagatatagagacaacgactatgtccaattttcatgctcaggtaagaggtttttagttttataaaataacttttaattatatatttttagatgagtttctgttttttgttcctaattatagggctgaaataaaaaggtaagaatataatgaaaccatttgggagtattaagagtaaattactttcttgatgtgagcatcagaatttaaaattcaattttcacttatgtatgtttttttttaaagacaattaatgaaataattaagattctgtgtttttttttttttttttttttttttgcaaggagtggtcttgaacctaaggaaatgaattta

SEQ ID NO: 125807 - DNA, 1056 bp, Homo sapiens
ggctatttttttagttaatggaaacgtagttttaagtattaagattttataaaaatatcttcattgctgaacatatgcaacataatgtcactttattttcagtattggtttgtcattatgatacaatactgatgccttagggcagctgcagctgtgcttaccctttttccttccttccccttctaaatatgtggtttcttgtcctttatgattttagagagtagttacgattgtgcctaatataggaactgataggtaagaagaagaacttttatgagccatggtctttgtgacatttactgtgattatttagagattcttttaatccttatctgttacctcttccacctcaccgcccttgagttcttcgcagtctggcatagtctggataggtgatttttagagaaatgaggcttgatttttttgtaataggtgaattctgcatatttggtatatagttttgcaacaaaagaggtgtcaccaaaatcaagaagtatttacatttttgtgaaaagcgtgtggattttattcttacattttattttaacaacttaagtaccatcatgtattttatcaagcagtatatactttttaaattggaaacattgttgtgtgtaacttgccatgtttataacatttaagttaatggttacaactgatggatttgaaatattgtgttattaaactagaaatttgtatgaaatgatatatagttaaaggttatattacaatatattttaaaatttaatacttttacagattaagattttgatgacttcaatttaattttttaaatttggtctaagtttaaatatgtttattcaggtgggtgatcatcattttatctttactgttggagaataaaggttttggaagatcattgccgttttgttttaaacatgtgagagctaagcagtttttataaaggccaatttcctaataggatttatttttggttttattagtgggcaaatggcatctacctgtacattctggttacaagggagagacttatacttttgttataataagttatgtgtgaaagtgaattttaca

SEQ ID NO: 125808 - DNA, 2388 bp, Homo sapiens
aatttgacttttttttttttttttttttggtctcgctgtgttgctcaggcagatcttgaactcctgggctcaagtgatcctcttgcctctgccttctgggtagctgggattacagtttcgtgtcaccacccctaactctaatttgactttttagatatatttcaaagcacttggaaaatttgtgttttacaatatcagttgtttgatttcactttctaaatggttatcgtctctcaaaaccccttatggtcatttgcagacacaaaactcagaatctcagaatcacttaacagacttgatgtgttctattctggtaaatgtgctagagttgagattgatacccttagcttctttgatagactgcattacagaggtgcatagactgaatttcttactgtgctgctattaatgcatctagagcctgaagactgttgtagagttaggctttaactgttagctctcttgatattggagatgataggaatttttaggcgacaggaaaaagatgagacaatgagcatacaatgggggcataagccccagctgttcttatatttgtttgtttttttgagacaggatctcgctctgttgcccaggctggagtgcagtggcctgatgacagctcactgcagcctggacctgccaggctggagatatcctcccacttctcaaagtgctgggcttacaggcccttaattttctaacttgtaggaatggtttgtggttctgagaagtcaatttgtaacagtttaggaaaatttaggcttagaaatctggtgaatttattaaagaattaatgtcattattaaactgctttgctgattataataacaaatgagattctcttccttaaatgattttgtatgaaaacatgtgggttggggtttactttgttacgttgtgatactcttaccagctatgattgtaaggattcaacttttgatgtgactatcttttataatctgtgtctgtgatgtgataaaagttgaccatccatgtttgcctgaaatacaagactttcagttttaagactgatagtcctgggcaaactgggacaaattggtctcctaaatttgttgtccacaaaggctaatccagagaaagagacaattacagttttgcttataatttggttatcaaaacgagttgtttcgcttgaagacagactcagcttgtttactagtgttagtatatgaaaacacataggtttctttgtcaggatttaaatatgctggcaagaaatgtagttaccaatcaatcttgaggtgcacatggctttgttttggctctttgaatgccacccatttgctagcattatggcaggtgagtttatatcattatcaaattttcttcagcaatctgctgtaaaacattccagttaaggaaaccacagctcaaggaacgcaaatgatttctgaaggtcatgtaactggtagatagcaaaggcagatttggattttaggattcctgattcttaatttctttctttctttttttttttttgagacatagtctcgctctgtcgcccaggctggagtgcagtggcacaatctcggctcattgcaagctccgccacccaggttcacgccattctcctgcctcagcctcccaagtagctgggactacaggcgcgcgccggccaccacactcggctgatttttttgtattattagtagagacggggtttcaccatgttggccaggatggtcttgatctcctgacctcatgatccgcctgccttggcctcccaaagtgctgggattacaggtgtgagccactgcgcccggctgtgattcttaatttctagtagtttctcatgagagttaataataggtatataaactggtttctagttaatatggtaagatcaaaaaagaagagcatccctggtggccttttagtcatataagccactgttgatggttaaatgttttcagagggtctaattttgaaaatgttgatgaaaagatatgaacttcatttcactttagaaaaatgcaggtacaccaacttttgaatactcagataatgagttcctctgttctaaggagatgttagttgtctagaattaatgcttatttgtcttaactctgttttcataagcagtgtgtaggaatagttagagaaagtaaaatagcttgatttagtgcaagttttatttttaaaatgccttatctgttactgttagtaaagttttgttttgcttgcctcattatgatataatattctgagataataatttattgctacaaaatgatagcaagcattatcttatgtgtaacttttaattaaatccatattcttcaggtaaaaagaacgtatttaacttttaattaaatccatgtttcttcaggtaaaaagaacgtattctcatggtacttacagagc

SEQ ID NO: 125809 - DNA, 1013 bp, Homo sapiens
gcccctctatttaatttatttttttgagacagcctcactctctgcccaggctggagtgtagtggtgtaatgtggagccctgacctccgtgggcttggatgatcctcccacgtcagcctcccaagtacctcggattacaggcacatgccatcatgcccagctaacttttgtattttttgtggaaatggggtttcaccatgttgctcaggctggtcttgaactcttggactcaagtgatcctcctgtcttggccttccaaagtgctgggattacaggtgtgagccactgtgcccaccaccacaggcccctttaaatagtttgtagccagattccttttttttttttttaaagcctcttgattttcaaaaagtatttcttattgtgaggtgctagggctatcccactgagagaggaatctctgagctgtgtggttaggttaattatttaatcagtaactcaaaggtcaatgctgcaaacctacactgaaattcagggtccaggtaagctgtggaatgtgacaagatttctgataccacataatctataggacatctcttcttttattacttctgtttgcttggtgtttttaccctatatgtacatatatctttttcttccctttctctttaaccttgttccattcctttttctcttttccttttaaactttttgttccttttctacttctctctagtagttacatcatggaattaggttgcatttattattggactatatttaaaaattaccaaatattacttaaatggttgcttcaagtttaattttcaaagcacatgaactaaatgcattatttctcctttcctttccttccccttccccttccctttccccttcccttccccttccccttccctttccccttcccttccccttccccttccctttccctttcccttcctttctttcgatggggtcctgctatgttgcccaggctagctttgaagtcctgggctcaagcagtcctcctgcttcagcctcccaaagtgctgtgat

SEQ ID NO: 125810 - DNA, 1032 bp, Homo sapiens
gtccgttaacatcatatgatctatatggtagaaggaagaataacaaatgatgaatatagtgaatcatacctctagcagggtatagggacagaaccatccaagcataattattttcttggtgtgtttgaaacagttttttgaagcaaagtatatcaatatatagggatatattcaatattatgtatttcagatgcttaagtataaagctgtgtatgaaagtgtgtttgtcaggggaacaatattattattaacatacacttgaagatacattttgaaaataattgcaatctgcataattatttatctccagtgtacactgccatgggggacgctatctagtctaaaattacagagtcgaaaagatagtgatgatggtcccatcatgtgggttcgtccaggagaacaaatgatccctgtggctgatatgccaaagtcacctttcaaaaggaaaaggtatgttgtatacacatttttattggaggggatgagtgtttgtatgttggggtgtgtatgttagttgaaaattggaggaaggaggaatgcaaagtttagagcataattggaatataaatttaaaaatagcgatacatgctaatacaatttgttataaaacctaaaatgtaaataaagcatgagaaatgtaggcaaatgacaagaaattgtaatgatggatggaaaaaatgtcataagatataaactattttagaataaatgtaatattcagaacctatactaagaagactaaaatgttttgtggaggatataaagtaagatcagaacaaatggaaagccctgctgtgttctggattggataaaaatgatagttctttaaaattttctgcatttcaattggactaacacttccagtcctggataaaattattttaaaattcataaggaagtaaacttttcagtgaaagagaagattagtgagaggcagcttatgatacaggatattaaaaattactataaagttcaaatagatcattggaataagagtccagaaatagatctaagtatattgggaactta

SEQ ID NO: 125811 - DNA, 1141 bp, Homo sapiens
ttccctcactagacagactataaactcccacgagagtggggtcctcttctgtcttatttgctattgtctcattcactggccccagttcttagatagtacctagcacatagtatgtgtcctatcaatattgaattaatgcatttttaaaagttacccatttgtttcagatatatatctatcttgtgttacccaagagatctgagtgggggcatggtacccaaaccccaggtaaagattctgtgtatagggaaacttgggtaaacaacaccatttgtaatttaattttttatccatgtgtttccttacaactgttcctgttgtgaaggtatattagaaaaatgagggtatcgtatttgtgtttttgtttgttcgtgttcattttaaagatagaatttgatttgagagcaaatttcatatatttttgtctgaattatgtgattattgaatgtttgatagcaattaagtgtcactatataaatgtaattttctttttttaaaaaacagaactaccaatgaaataaaaaatcttcagtacctacctcgaacaagtgagccccgtgagatgctctttgaagacaggacaagagctcatgcagatcatataggacaaggttttgaacgacagactacagctgctgttggagtgctgaaggctgtgcactgtggagagtggtatatataactaccgctattttaatgaaagaatttcttggcttctacaatttttcttggaaaatcttagtaattcctccttactgtgggaaaaaagtttcattttttacccgtatttggatatcttaattgtataattgtactaaagattttaaattgctagaatctggctgggtggggtggctcacacctgtaatcgcagcactttgggaggccgaggtgggtggatcacaaggtcaggagatcaagaccagcctagccaatatggggaaaccccgtctgtactaaaaatacaaaagttagccgggcgtggtggcgcacgcctgtagtcctagctattcaggagcctgaggcaggagaattgcttgaacccgggaggctgagggtgcagtgagccgagatcgcgccactgcactccagcctgggtgacagagcaagactccatctcgaacaaaaacaaaaacaaata

SEQ ID NO: 125812 - DNA, 1096 bp, Homo sapiens
atctaccttcaaataatatgagacttctttatgtaatgtgtaagaacctttcaatagtatacttccatttattccctcccccctcacatttctggcctttgtgctaattgtcatgtattttactttacatatgccataaaccccatgatgtatgttattttgctttaaagaatcatttctaaagagatttctttaaatttaaagagaataaaacctctttcatatttatcattaggtgtgctgtacattccttttcatagatctacattttcatttaagtatcattttccttcagcctgaagaaattcctttagcagtctttgttatgctgttttctcggtgacagattcagcttttgtttatttgaacatgtttttatttcacattttttggaggatattttttggtggatatagaattctagattgactttttcttctaatactttaaaagtagtccattctcttcaggcttgcattgtctttgataagtctatggtcagtcttatccttctttctctgtatataatgtattacatgattctcagattttctcttttatcactggtttttagaaatttagttatgatttgccttcatatgattttctttatgttgtttggaattttattccaaaatccattttttagcatctctttaaaaatgtatttatatattcctaattaattgaagaatttgagagttttttagaattatatttaaaggcatgagtaacctcagcaaataccaagtttattgtattagtacttttccaatgaagtctcttaatttataaagttatttaagagttttatgcatcagtatagttatatgtatcttctatggaaataaaatactcccttttcctcatatttacttctaatttttatgtagtgttttcaactttagcacttaaatttatgaagcattgatcttattcttcaaatagaacacttaattttcttggtttgtataatttaccaattcagatcatttcaattttccaaactcttgtgacaaatgtttatataaaaacgaagtcagtttttaatctgtgtctaggttgaaagtcatggtgttggccctttctttaaata

SEQ ID NO: 125813 - DNA, 2408 bp, Homo sapiens
aagatttcttagaagtagttcaacgaatgcagttagatttacatgaacctccactgtcccaggtatttttaatacacttactgtctttggtttagtttttattatgaagagagttatttgtatttcttgttttattattttttagtgtgtccaatgggttgatgatgcaaaactgaatcaactgaggagggaaggcattcgctatgccaggattcagctatatgataatgacatttattttattccaaggaatgttgttcatcagttcaagacagtttcagctgtatgcagtttagcatggcatattcggctcaaattatatcactcagaggaggacacttctcagaatacagctactcatgaaacaggcacatcatcagattccacatcatctgttcttggacctcacactgacaacatgatttgtgctgtaagcaaagcctccttggattctgttttttcagataaacttcattctaaatatgaattacagcagattaaacatgaacctattgcatctgtaagaatcaaggaagaacctgtgaatgttaatattcctgaaaagactacagcactgaataatatggatggcaagaatgttaaagcaaaattggatcatgttcaatttgcagaatttaagattgacatggattctaaatttgaaaatagcaacaaagatttaaaggaagaattgtgccctggaaatctaagtctagttgatacaaggcaacacagttcagcacattcaaatcaagataaaaaagacgatgacattttgtgctaaatttgcatataccatctaaaatccttttttaaaaaaatttaatgtaataaagattcatgaattctgaaagcaagccaaggacttgctcctatgtctgttacaaaacatagtttatgtagctttgtaacattcctcagtgcctgtccataactgtgaagtattaagcacttagggccagatgcactgtaaacattgcaggtttaaacataaaggagtctttaaaaaaaaatcatttacgttggaattttaggttttagaatagagctgacattaacatatatatatatatataaatatatatatatattttgtaatatgagccagaattctttttcaacaatttaaagcttttccatagagcttatttatatccttttttttcattttaaatgtgtcagcactgtagtgtaaatagcttttaaatatctttttagtgtgatttatactgaaatgtgagccacttaataaaggttcatatgttcatattaataaatatgttttctgttgagtctgtaaagacaaactgacaattcatttaagtcatttgataatgattctctgctggtatatctatttagtgtggtattgtagtgcaaatgtacgtaattcaaatctagtaaatatttaagttcctcacactgtgcaggcttttttttttttttctttttttcttttttttgatacggagtttcattctgtcaccaggctggagttcagtggtgcgatctcggctcactgcaacctctgcctctcgggttcaagtgattattctcctgcctcagcctcctgagtagctgggactacaggcacgcaccacaacacccagctaatttttgtatttttagtagagatggggtttcatcatgttggccaggatggtcttgatctcttgaccttgtgatccgcccaccttggcctcccaaagtgctgggattgcaggggtgagccacagcgcccagcctatgcaggcatttttaacaaccaagactcagttaagaaagtgtgcatctgcgtgtgtgtgaatgtgtatatatatgtatatatatatcatattttgcataattttcttaaattgctgaataagatcaatatgtgaaattccttagcccttctccccaaaatacattgaaaaaagttttatattaaactattaagaaagcagtttaggtaatagaaacagttttagaaagttgggagaaacaaggtatgttaatgataacaaaggcttctaactaatagttacgtggccagattacatagcctaccatagattttttttattgtgtatgggatgataagaagtttagagaattttcttactagtaagtacctttactaagtaatagctaagtataaaatctttagttacagaaagcttgtgagcaattaaaatccttttacatttttcttgcagaatgggagaaaaatatggcaaatacaaaactgtaaaataagggcaatgacaatgactcaactgccatatagagatataattaacaaaatactttgtggtacctcttatctctcaggatctcctccctaccctagcaaggcaaacaacttggagtacttccttttcgaaagaagttctagaaattaaattgaggtaggagacggattgaca

SEQ ID NO: 125814 - DNA, 1056 bp, Homo sapiens
gaagacaaaagtgccattcttttcaaaatacttttaggctgctaaaacatgatgggttttaggtgtggtagaatagatctcactctttctcttacttgatgtaactacatttatatgtaaacaaaattttactggttttagaatgcattgcctgttttatcaaagagttatgtttgaggtttggcactgacagtacacttcagatatgataattaagaggacaactcaggagagcttgtaagtccttttgtcttctgtcctggcttttcttttctttctgtaacccagtacatactacagatggaaatgattgctttttagaacatcaagcacacacagcctaaaaacaaaaatgtcttttccttgtagctttataggcgttgtatagcagtcatatctctgttgagagagcagggaaaggaggggaaaacatcctgcatttcaggttatcttcacttccagctcttcttggacttcagacccaatcagagaatatgaatgagctgagaacaaaatatggtctgggcgagtagaatttatgttaactagaaattaaaatttataacttgtgtgttttattactatgatctgcctactaagaactgcactgtgaacatgtgagaactcgatccttctgtacattttgaaattcagaacttacgcatctatgttgttagaatgttaaatctacacttttctgtaaagttcattgctgttgtactacttaagactacttggccgggcgcagtggtcacgcctgtaatcccagcactttgggaggccaaggcgggtggatcacgaggtcaggagatcgagaccatcctggctaacatggtgaaaccccgtctctactaaaaaatacaaaaaattagccgggtgtggtggcgggtgcctgtagtcccagctactcgggagactgaggcaggagaacggcctgaacccaggaggcagagcttgcaatgagcagatatcgtgccactgcactccagcctgggtgacagagactctgtctcaaaaaaaaaaaaaaaaaaaaaaaaaaaggactactaagtgtgc

SEQ ID NO: 125815 - DNA, 1048 bp, Homo sapiens
ctttcctcttaacgtctcatacagaattccattatgcttttattgcctagcacaggggtcagcaaattacctcctgtaggccatatctaacctaccaccagtttttctattgtgtgtgaggcaagaatggtttttatgccattaaatggttgaaacaaaagtaaaaatattttgtgatgtgaaaatcatttgaaatttaaatttcatgtccataaataaggttttattgggatatagccatggtctgtggctgctttctctgccataaggactgagttcagtagttgcaaaagaaaccacatcacctaaaagcctaaatatttactgagaagccctttacagagaaattttgctgactcctggcctagctgattgtttgctgtggtgccatcccttcttttccttttccctgtactccaaaatcctcttggctggtttcttagagagatgtaagctttcttctactttgaatttatttaacgatagatcccataaaccaaagtatgcatctctcaattgagttagaggtatctgatcaagcctggaacattccgttcccagtactaactgttctcaatcctatttttacatactgaaaatcctaattattgtcaattataagatgaaaactttgcagttgattagtttttatttatttagcctagctctctagtttcaaatgcctaatgagttaagctgtattaatctgttgtattgtgaaacttatgttatctgtcattacaagggagaactagaccttctgtatcagtagccagaaatcacttttttgtttgatttttttaaaacggagaaaaaatcacttgaggtttctcttaaagctaaaagtgagggttgcatagggtaagaacaatcatcgtgcttcagggttataagacacttcaacctctttggaatttttataagtactgtcacctctgcttcattggaattgattagtaccttgggagggtgataatatgctttctcaattcaagacacttctaattgtgagggggcactaattccttgagaccccaggacaataggt

SEQ ID NO: 125816 - DNA, 1034 bp, Homo sapiens
cccgtacctgagggccggggtcagccgcgaccccttctcatcagtcggccggtggcggaggctcagccgccttcctcccgagctcgcgcggtcctcaagtcttgatggtgacgggccgaagcccagcgcgccacccgcccctcgggccccgcttccaggcccctgtcctttgcttccttcccttggcgctgtgctgaggggtcgtcgggtcctggaagggcgttcaggggtctcgggtggctagcccggctggcggggagatgtcagctagcggccggaggagcgggctcgggagggggcggcggctcgcgcgctggaggaggtggaaggagggtcgctgccctgccccctctgagcaggcggcagtcgagttttctgatcccaacacggcggagtgggtgcttaaggcatgggccttaagggatagttcccgtctggaaacaataccgtgctccatcagcatgcttcagcttttcttatttttatctgcccagtgttgacagccagcattctggtattgtccttcgagtcatggctttctaactcagcacctccttgtgtaacttcagggatcattctgtcactaatctgtcacccttcttatttttagcgtggcgaaaacaaggaactgccttatactaacctgggcagtgcagaatctggaacaatttattaatctcagtgtgtactttacatgccaagtaattttgaaattcatggtgaatattaaatattttgtagttttcggttgctttctttgttaatagtatatcctccttgctttgagactacttttcaggtgtgatactttaatcttaaggtttttggttagcttttgccatttttaaacgtttctttcattttttttttctccaagactttggcaagagacttagtatttgatcttgttttcaggtatttttgtaaagtttattttctttcaaactgggcttttttcaccatatttttaatattggaaggggaattctgaaagtctggaaactgcacactttagcctaaagagtcacaaaaca

SEQ ID NO: 125817 - DNA, 1044 bp, Homo sapiens
gaattttgtgtttagacttgagtcccatctctaagatatctctttatgtatatgcaaatattacaaaatccaaaatccaaaatgcttgtggtcccaataattcttgagacaagaattcagttaaagtatagacagtctggatttgaattcctatcaggctttgtgactttgaacataacaccaaacctcttttagcatcagtttccttatctgtttaatggaaagggcaatacttcaaagaagacattaagccttaaataaaatatataaagtacgggcacatagaaagcagtgaatacaaaagaaacaataaataattttaagagagaactagttgggtttcaggggagctaccactgaagccttaaaggtctgaaggtggtgtttgtaggtggagaaagagggcattccatgcagaacaggaagaggcagagtctcagaacagaaatatggattgtttagggaatggtaagtaattgtagctttgtataaaatgtatgtgtgaaggccagctttaaatgataatggtatgtaaatgtggttgggcaaagtgagtactacccaattttgataattggaaattgcatacttagatactaaaattataggaaaacctcagcagtttgtccattattacatgtttatttaatattcaccttccaatacttactttcccagttcaaattaagactcaaagaagaattccaaaatgatggttgccatcccttaacccctttacctagcctgtagccacatggagtcattattgtgaactcccctttgcatatattttgactgtcttttcttaatccctacttgatacatgatagtgggacagagtttttttattttgagacagggtctcattctgtcttccaggttggagtacagtagtgtaattactgtaaccttgaactcccaggctcaggcaatcctgttgccttagcctcctgagtagctagacctgcaggcatgcaccactgtgtccagctaatgttttaatttttatttttttgtacatacagggtcttgctatgttggcca

SEQ ID NO: 125818 - DNA, 1021 bp, Homo sapiens
tcttggcctaccaaagtcctgggattacagatataagccaccactcctggccagtgtgttttaaattgggactgcccttgaaaatctgagaaagtctcgtgcttctatcttcttctcagattaataccaaaccataaatacgttaaatttacaaatctgaaacatcacttgatgaccagaatcatatgactaagtggaaaatattaagtgacatttaggaaaactgcatttttagtccactttgttattctcatgaaaattgctaatgtgacacaaaatatagaagtgagttttcagatgagaacaactgattgcttcctggaacaggtagttttagagcactaggaatgaaaatatgctggattttattctgggtactgaacaggaactggggcaggaaatagctgtggctgaaccactacctgataataatcataacatgattaaatttgacatttaatgagaggaagtaaagggaaaagtgcatagtatgcagctttccagttgcaaaaacagtacaagaaaggggctgttaaaagtatatctacagaaattttaaagacatgtaggcattcatatttgttgcatgaatgaaagtacttttgtaagaccttttgtataggatttgttacagataccagaaaatttatgaaaattaggtggcacaagttttggtgctctgtagacctaggttcaagtcctgatactgccatcactggttgtgtgacattggactcattatgtaatatttttgaggttcagttttatttattctttaaatggagttacctactttgcgagattttaagaattaaatgagataatgtatgtaaagcacttgacatattcttgatttctaagactagctcaaaaagtggttgttgcagttatttgactgagttgaacaggcgtgtgtgtgtgtgtgtgtgtgtgtgtgtgtgtgtgtgtaggttttaaaataacaatttccagatagaataagagaagccagaaaatggcaaacaagcaaataaaaccttaa

SEQ ID NO: 125819 - DNA, 1047 bp, Homo sapiens
aagggattcttctgcctcagcctcccgagtagttgggactacaggcacacgccaccacacccagctaatttttgtatttttagtagagatagggtttcaccatgttggccaggatggtctcgatgtcttgacctcgtgatccacccatcttggcctaccaaagtgttgggattacaggcctgagccaccgtgcctggcctgaatcttaaattactctttaagtagtggagttatttgaacaccatggcttatatgttctcacaatttaatttccttagaaggaattgaggtaacttttcaaatagatcagaacaaggagaaagttattttagacaaggaatattacctggagtagaaggcaggcatgaaagtatatggtatatttgtgaacctgtgtagctagaatgtaaggtatgtgtagctagaatgtatggatgggaggttggggagggcgggtaattgaaactgtgtgaaacaaagtagagacgatagatgctactgactggagaaataataaatctatggtcaaattgtaaaagaagggttttgaatacagtgttgattaaactcttttctttggcagtgggagactagagatttttaagtgatgaggtcagtattttaaaaagataagtagtgaaagtaaagcaacaataatagattgttagtgtagtcctggtattagatatcagcttgtaccaggtgtatggtagtggggctggagagggatcatatgagagaagtttggaggtatgacaaatacgttatattaatttattccttcataattattgagtggtttctgtgtgccaggtatagaattgatagtggtgggaggtgggaaaggggaggaaacaagaaagattctagggttctttgttggaaaattgagcagatagtaaaagataagatttgaggagggaaaatacatcctggtttgttttttttttttttcttggaggtagttgtaacaaattcacggaagagcttagtttatgatcttgtgttttttgcttagtatcttgagtttataaaaagaattgaaac

SEQ ID NO: 125820 - DNA, 1087 bp, Homo sapiens
agaccaggagttcaaggccagcctggacaacatagcaagaccccacctctaccaaaaaaaaaaaaacgttagccgagtgtggtggcacacacctgtagtcttagctacttgggaggctgagaaagggaggaacacttgagaccccaggagtttgaggttgaagtgagccatgattgtgccactgcattccagcctgggtgacagagcgagcctctgtctctaaataacaacaacaacaataatataaatgagagatttctgagtaaaaatgaagtggggtcacagattttttcttcactaaaaccaaattaaggaaagagtagatggtgggttgaagaaagagggcagaaatggaaagaagcagacaaaaaaggggtatctgtagctttataccaaatacttcaaaaagtggaaggtaaagaaagaatgagaagatactagttgtatatgacaaggcttctaatcccagccccgtatcccagaaacaagacaaaggaaagaggaagcctacaaaatattgcgatatctcattcatacttttagagaagtagacctaggaggtgaataggaagcaaaaagtcaaggaaaaatccttgagaagaccctacataccagcgctgagcctcagcagaggcaacaagcactggcattttgaatggtactctgagttaagggcaagagccaaagcccatgaaggtaggctagatccctaactagggagatcagtcttggtacaggacatttaaggacacctcagcaatgcctgtgctcagtccaattttagctcttccttttctgtgtcgttggattatagaaaagtagattaagagtagttcctgattctcaaactgaagtttgtgtgtgtatgcataaagacgtgtacacaaaaataaaaatggccccaactaagatgagaaaggtgttaggggtggccgagcagaatcttggatatcagagtgaataggagctgaggatagcagtttctgtattaaacgtgataaaaaaaatagcatggcaactctacaaatataggagaaaaataaacgaaagaagtaactctgaaaagactgtcctaggtaagaatagc

SEQ ID NO: 125821 - DNA, 3989 bp, Homo sapiens
cagttttcaaggtctaaaaatttcttgttttggttgtggtgaaggcaactgagttatatttaactttagcatttaggaatggtgttagactagactttaacttattttcattagaccttttagatctgcaatatgtaaaaccttttaaatcttaatgtattggtgactgagtgacatgtcagtaaataaatgaaccatgtttattatacttcatgatatctttgtaccctttaatgttatgaaaaagtatgtttgtttatgtgcatgttgggggagtacaggagttggacaggtagagttttcaattctagccctcaaattcatctgtggtggtactttggcaactttttaatatggtgtgtaaacatttgtgtttaatataggcgaaaagttttaggaaaattcagagataataaagacattggactgctctcaaagaacgtgtgggtgggaggtgggggcacatacagataagtacactaaagtctatataaaacaatatagtaagtacacagcagtcccccttatctgtgagggttatattccaagatccccaatggaaacctgaagccacagatagtaccaaacctatatttgctgtgtttttttcctgtatatacatacttatgataaagtttatattataaattaggtacagtaagacagggtccccaaccagttggtctgcggcctggtaggaaccgtgggctgcactacgggaggtgagccagtgggcaagtgagcgaagcttcatctgtatttacagctgcctcccatcacttccattaccatctgagctctgcctcctgtcagatcagcagcggcattagattctcataagagtgcgaaccctattctcagctgtgtatgtgagagatctcggttgcatgcttcttatgagagtctaatgcctgattgtctgaggtggagttgaggcagtgatgcttgcgctggggagcagctgcgaatacagattaacgttagcagagaggtttgactgcacagagatcataataaataaattgcttgcagacccatatcaaaaccctgtcagtgagttgagtgcttcatttgtacagctgcatctggtgacaggctttaagtcagaatccaacacttaattttagtccatgcatgacccgcccattattttacttaccttatccgtccacatttctttgtcacactgggcacttacctcagtcacagatttggttaagcccacaagctaaccttagccaaaatgagtaaataacaaaacattactagagagcttctttgtaaagggggaagacccaatgatgagacagcagaagactcttaagactgccaacaaaaagaaagctgcatttaaaagaaaacaccaagagtcccacttaaattatgggttcattgcaacaggtgattcacattctctaggcctgctttgtgtatgtggtgactggctatccaacaagccatgaaaccttcaaaagtgctttgtcacgtggagaccacttatcctgcattgaaagacaaggctttggagtttttcaaaagaaaaaaacgtgaacatgaagaacagaagcaattatggaaggccaccacttcatcaagtgtgtctgcactgagagtattattcttagcggctaaagcattgctaaagctaagaagccgtttactattggtgaagagttgatcctgcctgcttgctgttaaggacatttgttacgaacttttaggagaggctgcagttcagaaggtggcacatgttcttttttcagctagtaccataactagattatttgatgaaatagaggatattgaggcacaattgttaggattaatgagtcaccatggtgtgtaatccaggttgacaagtctactgacgttgacaacaaggcagtaatgcttgtttttgtgtgatacacttctcaggaggacgtgcatgagggtatgttatgtgcccttttgttgccaaccaataccacagctgtagaactgatttggtaattttgtgttggtatatgcatgaacagagcacggctgccatgactggacagctttctggtttcactacttgggtcaaagaggttgcttctgaatgcgagtctacgcactgtgtcatccgtagagaaatgctggctaggcacaaaatgtcaccgaaacttaaccaacattttgcaggatgtgattaaaattatccacattaaagtacgtgcccttagtttatgtctgtctgtgcagctctgtgaggaaatggatgcagagcacacacagcttctcttatatgcagaagtaagatggctttctaaggtagatcactggccagaggttttgagttacaaggtctctccagagattttttttttttttttagaaaaatagttatcactggtagcacatttcagtgatgcagaatgggtcacaaaacttgcttacttgtgtgacatattcaacctgctcaaagaactcagcttgtcacttcaggggagaatgacaaatgtgttcgagtcagtagataaagtggctgcattcaaagccaaactggaattgagtgaacattgagggattttttttgacatgcttcaaacattaacagagatttttaaagagactcagccaggaccttctttctcccagctggtgcatgatcacctatctcagctttcaaaagagtttgagcattacttcccaaccacagaagacccccgaactgggaagtaatggatccacaagctgtttgtgaataagccagctgtatcgactttgtccgtgctagaagaggatcaactgcttaaggtcacaaatgatggtggccttaaaagtatgtttgagacaacttcaaatctccatacattctggattaaagtcaaggcggactatcctgagattgccacaaaacactgaaaagtctgtttccatttctaacatcgtatctttgtgaagcagggttttctgtagtatagttaacagcaaccaaaatgagattatggaatagactggacataaacaatacactttgggtgtcactgtcttccatcatccccagatgggaccatctagttgcaggaaaacaagctcagggctcccactgattctatgttatggtgagttgtataattatttcattatatattataatgtaataataatagaaataaagtatacaataaatgtaatgctctcgaatcatcccaaaaccatcccccctaccctggccatggaaaaattgtcttccacaaaaccagtccctggtgctaaaaaaggttggggactgctgcaagtaagagatagataataactaataataaaataggacaatcgtaacagtatactctaatgaaaagttatggaatttggtctctgtctccaaatattttactgtactgcagttactgcagtaactgaaatgtggaaagcaaagccttggataaagggagtgctactctaaggggaacacagaacaggatgagaaatattaaatggaagaatttgggagaaacttatggagaaagtggaattttggaagtcttgtcaaaatcttccttgttttagaaagagaagtgttaattttggcacagaggtagaaaaatgttgaaagtatgggatggttgaaacaagacatatgagaagatgatgagcaataatgttggacaattaaggtcagattgtagagagtctaaatacttgtggattttattttgtaagcagcagagaatgatacaaggttgttggaatggaataataatatgagagtctgaggagatttataaaaactacctttaaaaaattaaaagctctttagggccaagcgcagtggctcacacctgtaatcccagcacttggggaggctgaggtaagaagattgctgaagacagcagttcaagaccagcctgggcagcataatgagactccatctctctctacaaaagatttaaaaaatagcctagtttggtggcatgcaactttttgtgtgatatacttctcagcaggatgtgcatgaggat

SEQ ID NO: 125822 - DNA, 1003 bp, Homo sapiens
gagcatatgttggtgctagaagagagacattaagcttcagcattttttagtccaaaggaaagctggccgggtgcggtggctcatgcctgtaattccagcacttttggaggccgaggcgggcggatcacctgaggtcaggagttcgagaccagcctggccaacagggtgaaaccctgtctctactaaaaataccaaaaattagccaggcgtggtggtgggcgcctgtagtcctagctactgaggaggctgagacaggagaattgcttgaacctgggaggcggaggttgcagtgagccgagatcacaccattgcactccagcctgggcaacaagagcaaaactccgtctcaaaaaaaaaaaaaacaagaaaaaaaaaagaaagcttcatcttggaggaagtaggatttgagctgatttagaaggatgtatgagtggagaaaagaatggaataggaataataataacacacgcaaagtgtcaggggtggaaatacattgttttctgagcctagtgagagtcatgccagaacagacaaatttgtttcagaataatgagagatgtacatggtaacatttatgtagtatttgatagaatttctgtaacatggggattggttaaaaatctgacaatgtgggagaccatatttgtacaaagaatactcataggcattattatactgttgacccttgaacaattggggttagggatactgacccctgtgctgtggaaaatttggctgtaacttttgaatcccccaaaatttaactactaatagcctactgttgacaggaagtcttactaataacataaacagataacacatattttatatgttatatgtttatatactgtataattacaataaagtaagctagagaaaaagtgttattaaattgtaaagaagagaaaataggccgggcacagtggctcacacctgtaataccagcactttgggaggctgagacgggaggatcacctgaggtccggagtttgagaccaacctg

SEQ ID NO: 125823 - DNA, 1058 bp, Homo sapiens
tgcacgtgtatacctatgtaacaaacctgcacattctgcacatgtaccccaaaacttaaagtataataaaaaaagcaaaaaaaaaaaaaaaagaatttcagatattttgttaaggtgtgacaattaaatctatgtcaaggatagtgttagcttagagttaactgcctaatgttatgcctgcagttagccctatggttttaggattggattatttctaaataaataaagattatgcatcataatacccatccttgtatcagatcagttgatcaaaaaagattaagatcctctattaaaggtccccagtaggttttttatgcttttttctgtaaataaactttaatatgatcatttaacattaaacctgagctatcatgacaatacagtctatgaacctgtattcctggactgtcatagaatcaaagaagttggaaaggctttagaaataatcttcattattcctgaaataatttgacttgttaatccttgttgattatacccacgtgtaattgggtatctttgagtgctttgtcagatagctggttcagaaatctatcttagcatgctgtaaaacctgttttaaaaataggtatgagccattcagtgtgactgaaaggttgttgacacaatggaaaaactattaaatgagtttgcacagaaaatcaccattactgaagaaaggtttttttattttaaacagaaaattcgttgaatttttatttctatagacccaaataaatacagtttaaaatatttagaacactttatataactagaatactgttagatttttggtatttatctaagtgtagcttggtaaacaaatatataaagtctttgcgattattttcttgtgaggcaggcagtgtttttcaaactttcatttgagctttttcttttaaaaaatactattatttatatgtgaacatttaaatattccctaaatatattaaatatctgatatgtttaatagagtgataaaatcctttcacgttttgtgtatgaaatgtatattatttacattgttgggggttaggaaagaggatctttattttgtt

SEQ ID NO: 125824 - DNA, 1034 bp, Homo sapiens
atactttttggctcttgggttattttaattcagttttgtgtttactgagtgtcagggaaaattaaatatcattataaattctgtcatctctgttaagccatcctttagcaatggtaactgacactggtttttagaaacaaactacattactgattgaatgaattggtttcttgtatgtggatttttagatgaacaatttctggtataacctaggaaattctgaaatttctttaaaagattaaaaaaaattcaatctattttgtaagaaaacaagtgttatttattcatgcaaatagaactttctattattgtggcaactgatttttgtttacttaagagaacctgttgctaaaatagtaatgaggaagagtgtaatataagtctcgtcatacaccccttgctctgcaagtaaccagagtgctatgtctgcatgctgttcagtctccttttggaaggtgggaaataaagtcatttgtatgtttttctctcttgcacagcctaaaatgaccaatgtgtgatttcagtggaataaatggcgtccaaagtcacagatgctatagtctggtatcaaaagaaggtaagttgatagtcaaaacttttagctttctaaatgtttgaatttcaaaaatacatgtttatttcatgctatagatgttaggattttgagtgggaaaggaagattatttttatttttcttgtacttattttacttctaaataaattggaaagatgatgcttaaacatattttttctctactttttactctacaatagcaaagtagctagattaattataatagaaagcaaatctccaggagtggataaaattagcattttataaaaacattaacactttccttagtttaattttttaaaagaaagattagcagagctgttacataacttatatcaatagtttttaatttgtttcttgtaagttacaattcaatagctgaatgtttcagtaaaataaagttttgggaactctattttacaaactgaaatattaaagtgtttattttgatgttttagga

SEQ ID NO: 125825 - DNA, 1004 bp, Homo sapiens
atgttgttttgtgtaataccttagatcttttgtgtacatagtggattatatttgtgttcacattttaaaacatttttataccttattcttcaggtctctattaacaaaatataatgatacatttaaagcttttcttatataggagaaaaaacagacttttttttttttttttttttgagatggaatctctctctctgtcacccagactggagtgtagtggcgcgatctcggctcactgcaacctctgcctcctgggttcaagcgattctcttgtctcagcctcccaagtagctgggattacaggcatatgctaccatgcctggctaatttttgtatatttagtagagacagggtttcgccgtgttggtcaggctgatcttgaactcctaacctcaggtgatccgcccgcctcagcctcccaaagtgctaggattacaggcttgagccaccgcgcccagccaaacagatgatttttaagttttgttcaattgaaaataagtgataattaaaacactttaaaagttagacaaactaagaatatggcctttttaaaaatattttttgagacaggatctcactctgttgcccaggcttgagtgcagttgcacactcatggctcactgcaaccttaacctcttgggctcatgtggtcctcctacctaaacctcccttagtagatggcatgggattatggtctgtttttagatgtgttatttgttttctgggtagaacatgccataggtatacaattatatttttcatatgaggtactttattggaagtattgatattgatatactattaattgtcttttgtgtttgttagtgcctccttttaaacttttaaacttccaatcaagttaaaaatcagtctgcttagctaaagagctaaagaaaattgtaagttaaggaaaacaaaacaaaacaaactttaaaaattttcctgtctatatctttgaaagtttttctctttcctaatttctatctacgggagtaataaacatt

SEQ ID NO: 125826 - DNA, 1025 bp, Homo sapiens
ggcgtgagaaaccgtgctgggccaataacaggtaatatttattgaacacttcatgtgtgccacacaatgtctgaaagtactttatatacatttcatcatcacaaaaagcctattaaatatatattactgctattatcctgattttataactgaggcaactacggtttagagaagtctagtagttttcttaaggtcacacagtgcctgtgtgcctgagctagaattcaaatctagttggtctgggccatagtatctgcactctttacttaacagtgattccactccccactttacaaccaaatctagcctatttcttttacttttttcttacctggctttgggttcttaggtggttgagagaaatggcattaaatttgtcatctgtgtctcattccctgcctggactgccatcaaggaccagcaaatgcttaataaatggtagcagcagttactgattattaatacaactatcactttttaagtgtttttagtctattagaagtcttgtacatttactgactaggtcgattttggtcagtgttatttaactgagtaaattcaatttttataaatgcgtctgtggccaaaagaattatgaccagtgttgattaatgtcttagattaggtgggaagatgaagttcatgtcttttgaagtttttttctcttttaagtttgatatataaaatatgagcaacacttttattagtggtaaaatgaagataatgtttatatcccatctttcactgtgtttctttgatttagaagctaaagaagtcagctgggcttggtggcttacatctgtaatcgcagcactttgggagggcaaagaggaaggatcacttgcgcccaggagttcaagaccagcctgggcaacaaagtgagatcctgtctctacaaaataaataaaataaaataaaataaattatccaggcatggtggtacacacctgcagttgcagctacgcaggaggctgagatgggaggatcactgtgattgcaccactgcataatttaagagtgtgttt

SEQ ID NO: 125827 - DNA, 1019 bp, Homo sapiens
ctagcagggtcttcacagttcatcatccaaggttaggttaagtagaaaagcagaagttaaattatctttgctaaaatgactttttggaaaaggttattaatcacatagtagcttgataaataaatccactcagaacatactgccatgtaccagcaagttggaaaatgaacagtcttcataaattatgcagaatggtattggtttgcatgcattaacagcaatgttctcattaaacttgggccaggaaaaaccaccatggtgttctgcttctacttttcaccacatgcgtaaactgtgccaacatcagccagctaagacatgggaaggaaaggaaaccaaggctgtgtagggccccttagcatcaggatttctggaaacttctctcttaggatctgtagttaatgttaattttattcctctgtctcagccgtctgtctctgtttctcctattcatgtgatgtctagaatggaaagtctggctccacttgagttgtgtgtctggctttgaatcactgttgggggaaggggatgtgcaggatcaaataacacagatgtggaggttggtagtccctctcagagtatagcaagacttcagtactttatgcttagtgatgtagttgcccaattaattcatcttgcctactgcccggaaaaaccaatgcactgagaacagcaggtttttgcagcagagagttgaaaaatcgcagggccaggcaaacagaacaagagaggttattattattcaaattggtctatgaaattttggagactgggttttgttttgttttaggataatttggcaagcagtgggctagggaataggaaatgctgattggttggatcagggatgaaatcatagggtgttaaagctgtcttcttgcactgtcagtccctgggtgggattacaagaccagttgagccattttatgggtctgggtggcgccagcttgtccattagaatgcagggtccgaaaaatacctcaaacaccaattttagttttacaatagtgatgttatct

SEQ ID NO: 125828 - DNA, 1010 bp, Homo sapiens
ttgttttttttttttacttcttttttctttttttgtagagataggctttcgccatgttgcccacgttggtcttgaactcctagactcaaataatctgctcacctcggcctcccaaagtgctgggattatagatgtgagccactgcacccagccaaatggccttttttcaaacctgcttttattccaggatgtcatggttaatagtagcagtgcaatcccaggtacttaagccagaaactgtcatctttatttctttctcatgcatccatatccagtgagtttcctactcttgtacattttatcttacaaacattggtcctttcagaccatctttcagcggtatgcaacagtacttacttgattctgctttgaattatgactctttgaatatttttttctttggatttataacttctgagaggcagattctaccataatcacttctcttcattgaaataaaaaataccttcaagacttttttctaaacttgagtcagtgttttactatgtcattaactggctttccttggcaataggagcttgatcaggattcgtgatttgatgataggtatgtggtctgtagtatccttttttggggattcatgcagagaatcgtgtcattttagatgatgttgggaatattttaattagctttagcttttattactcataatgaatggaatctttgataactagctagcttttagtatctgcagatgagaatgtgtttggtgttttgatccaaatggctagctagatatataaattgaccgaattctagaaatctgttttcttccttgaaaagtcacattgtcccccaaccaaaagatttcaaatcttaaaaaaaaaaaaatttatttcttttaaaatttgccttctactcaagtagctttactttttttagtaacactttttaattatattccgataatgatttatagaaaaataaataaatgattggttaaagcaaagagatttgcaagtggttgcagagcaaactctttgcttata

SEQ ID NO: 125829 - DNA, 1029 bp, Homo sapiens
ctgttgtctttggtacttctcagaggtaatcattattaatgattttcatgtatccttctaaatatctggtgtatatatttacatatatttaatatagcatattagctatgttaatttcagtttttacagcatgtataaagtgttcattttcctgttagaacagtcttcagtaggtcagaaagcatctaaagaatattcatttagttgaattttcatctgtttgatattactaaattccagtatctcaatttctttttttttttccttttgactcttacccttcttactgctttcaggttgctgttccataattattgttgttgtttttttttaaatcagttttgacctctgtaatggctcaaactttagatgagaaaacatactagaagtggagatgacagaaaatgatgtttgtatcttaagacttcagtcttctcagggaagtagtaactggctagacattcttccaggaatggtgatggtcacagtaattaggaattaaagcttgtgggaagaaaatctttaattgaccttgttgtcattaagaagaaggagttattctaaggcattggtataggattgccagacatgttaccaaagatacaggatgagtttgtagatgacaaagtgcttggtcatctggaaccaggaatggaaaagctgactgtaggtcagctctgggaatgagtgcaccagaggcttaagctattcagggcgtctctgggagtaataacaagaaccttgataaagttgcttaccatagccaagcaccagagaaaggacttcacattctcacaatatacaaaactattggctacagaatataaatcaggatttcagagtctcctcttacatgatggaacaatgtttttccctccttgaaacagatcattacttatgaagaatatggttggatatctataccattacttgtacgttaattaccttggtatatctctctctgtgtatctatcaacaaaacattatttgagtatatatcctttcaaaatgttaggtactttttttttt

SEQ ID NO: 125830 - DNA, 1067 bp, Homo sapiens
actaacatttctcagagtgttccatctttcttcctaaataaatttctcttcttgcatatactgtctgattaatggttctaccaacttttccatcttctttcacctaatttatcccccttttcctctcccttctcagcccagtctgattttcatgaacctttataaatacctttccagtacattctctcttccttatctttgagtttctgacattttcaggatatcaagtaacaacttcacttggtctttttccacatctgcaggttgcacagtgttcaagggagaggtaaaggagacaattaataactaatgtttctatcactttctttcccagacagaggaagtaacaagtttcctctgcgtcttttattttctattttttgcccattttcctctatcctataattcatgttcctccctctctccatcctctttatcctatggcttattgttcccttggtctctccatgcttctgaggatcatacagaaagtaaaggatctggagatttggcttttcagtcttgcaactctgtggagatgtgctctgaatgactaaaaagcactggagctctgtagagcatatgggaaataatggtctttctgcccctttaggaaccttggagaagaaggacaaggaaggaaaggggcctgtttgcataagacagaaactttctaggttgatgagtgtgttaaaaaatcctaacaggcagtttcccagagagtaggcagtttgaggtagtatggagaatataattaacttaatagtcagaaggtctgtactctagtgcgagctttgcttctaactgactgcatgaccttaaataagtcacttagactggttcttcgtccttgtttccaaaatgagcatgtagaataggtgagttttaaggtcctgctcagttctaaaatacagattccaatagaactgagtaacttagtgttaaaactaatgtggggttttttggtatgtgtgcatttttaaaaaacttttggtttttgacctaactgaaggcaatatactatttttatttttccttacttgcaaaattgatacctctaacaaaaa

SEQ ID NO: 125831 - DNA, 1019 bp, Homo sapiens
tatattaaaatgagttgtatactaaaaggaatttatcaaactaagttaaaccatgaattgcaacttaacctgacaattagatcatttcttaaataaaacttcaaaatatatttttaaccataataaaatgggcaaaattttgtttctagattttgttcaaagaccagatgatttactaagaattttttgataagttagggcatgtctcctagaattgttatctgtaagacctcaaaacctttaagctgaaataggacattaatttacatgtttattttagctgttagatatatttctaaattattatacaaatagggtggtcattaaaatttagagaaatagctatctgatgtaattattaacagattataatttctatcagtaacctatccaaaataagctaagtccaaacattcttctgcatattttaatttttagatcaaagaaagcaaagaattcaattgataaatcaactgaaactgacaatggctatgtatcccttgatgggaagaagactgttaaaagcggtgaagatggaatacaaaaccatgaacctcagtgtgaaactattcgaccagaagagacagcctggaacacaggaacactgaggaatggtcctagcaaagtacgtgtgatttttaaaatagtttgcctatgtgattttatattagccaatgtaaagtgacttagatatagtagttgcccttgaactaagtattttctccagaattaattctgtgagcgtttataacactgatgaaactgtaaatgagataaagtgttgtgattaaacttgattgacaatataatctgacaccttctgaattgatggcttcagtttttccaaaatgctttttttgagacggggtcttactctgttatccaggctggagtgaggtggtgcgatcttggctcacagcatcctcagcctcccaggcacaaacgatcttcccacctcagcctcctgagtagctagaactacaggcatgcgccaccatgcccggctaattttttttttg

SEQ ID NO: 125832 - DNA, 2579 bp, Homo sapiens
ctgattttttatttttattttttaagagactgagttttgctatgttgcccaggctggtctcgaacccctggcctcaaacagtcttcccacttcagcctcccaaagtgctgagattacaggcttgagccactgtgcctggcatatttcttatttttggatgctgtttcaaatccttttctgaacagaaatattacaggataatatttgacaaatggctgttgaagtacttttaaaagtaaaaatgccttaaaagtatagtcactgatttaagatattttttcagaaaatcaggtaatactaattagttactttgtggtagttgaggatattttgaagttgtgtgtatatatgtatgtgtaatttcaaatttcatagtttaaaagctaaaaggttggttagaaattacctataatcctctttgtgtactcccaacttaggatacccaaaggacaataacaaatgtctctgatgaagtctccagtgaggaaggtcctgaaacaggatactcattacgtcgtcatgtggacaggacttctgaaggtgttcttcggaatagaaagtcacaccattataagaaacattaccctaatgaggtatatactttgtccttaagtgtatacatacgtatctattttatatgttactaatttataacttctttcaacaattaaaaattgttgaaataaatatttcacattattatcaatatttattattgttgtatgatctggatttataaaatagcagttttaggtttacgtattgcacatgtattgatagatagccacacatttgagctcattttatgcattatctttgaagactcatacattgtttgttgtttgcttttaaagaagaacattctggagagagaatctgcaaactcctgtgttcactttttccacaatttgaaaggctttatacatttgatcatagcaaagttattttaagtaacttccttcatattgctgtcaccagttattaagtccccatacttcaaaattcagttcttttttctttgtttctatttttccttattaatctttattttctctaaacccttttcaactatatcatatctcttgagcttcaaattgtttaaataaagaatttcattcaattgtattttcagtttctaatctaagggtagaacatttggctttaaggcaaataaattacactgtttatcacttttttataaacattaccttctactctttttgagctatgttagtaattttttccttgatggttttgggttaaacttgtaaaacaaacacatgttacgctgtgctggaatatgattgccttcagagtattaagattagaagagttactattctttgcacactcttctttgtggttgtgtctctggttaatctttctggtgattgtggttttgtttcttttcccagtggttgccatacagacactaatgccagtgtgtctgctctattgcctcttcacccatgtcatttgatgtagtgtttcttgttcctaagccagataaccaagcttgtaaaattttgtcttactgtatgtactgttagaagtcagttggtgctggaagggagacggagggctgtttgacccctctcccagaataaattatttagcagtagcagtatttttctcactccatgatcttggcttttgttggtttgcaactgtattttaaacgattgagtttcttgaagcgcagaacattattctacctattaacttttaaattaaaaggttgtttaaaatcttgatttccagctaagtaaggctgatagtaagcattgatttacatcttttttaatgatataagaaattacataaatataaaatatggctataaaattcttcgtctataaagtgaagaatgtagactaggtgatattttaaaagctgcattcagttctcaaaaatttttactcttaaaccagctttaaagggcgtttctaaaaaaaagcaaaataaagcctcctttgaataaataaaatggaaacagaagatttgtagtgctcttttgcgtttttatttataaatttaaatttattttataaattactgtactctctccaattgctagtaatgttttttctttaagagtgaggcatgaaaaaatcatttggacccactcaaacacaatgagcaagcatctctagtacctagattgtgccatttatcactaaataaccaaaaccaaaaaaaacaaaaacaaaacaacttcttgaagaagtggctgattcctgattgtcgtttgttgcaggaaatatacaaaatgactgtggaacctcttataatatgatagagggcaaggaagctatcaaagactaccaaggtcttttcagaaagacttgggagccaaagatagaatagtttgaactttaatttttcttgataaaagtattccaatgataaatgaaaaggaaaattctttggggaagtattttgtgcatggatgggattggtgggttttattgtaagataatgggtcaggaacctagccatttgttgtaagcttcccagatggcaatatctgtagataaactttttaggggcatctattttttagggaagacttatccagt

SEQ ID NO: 125833 - DNA, 1009 bp, Homo sapiens
ctttattttgtacattgcaaactcccaggataaagtaaactgattagaaattacttaacttgttttaattttttacttttataccacagattatctcaagaacatgagttggcagttaccttcttggtttaaatatcaattttatgttgatttcacttccatttgtgaaacaaaaacagtagataaatccactcttgcttaaaaaaaaaaagactagaataagaaaatacagtcattcctgggtatccacgtgagattggtagatatccggcccttctataaataccaaaatccaaggattctcaaatctcacagtcagccctgtggaacctgatgacacataagtcagccctcgccctccatttctccaaaactgtgggttctgcatctcaggaatattgtattttctatctgcagatgtggaatgcatggatatgggaggccaatggtattgccattaataacatcaattaaagtcagttaatgttcaccgtgcagaccgtatgaacttagactacttagactactctctctgcctacctgagttgtgaacttcatataaaatttaagagaaaatagatacaacctttgtatgcaaagtaatatctgagctgaaatatgaaatcaaataaattttgatgtgaaggtattttgttactgaataaaagctaatatattttgtaatgttttgctgtctcactatcttttgagggtgtatttgttgttttagcaaaaagtatcaatatatgggttctgatagtatcctttgagttggaaagagtacataaattgtattaatgtcaaagaatatcttgatttcaggacgcccctaaatcgggtactagttgcagctctcgctgttcaagttccagacaggattctgagagtgcaaggccagaatctgaaacagaagatgtgttatgggaagacttgttacattgtgcagaatgccattcatcttgtaccagtgagacagatgtggaaaatcatcagattaatccatgtgtga

SEQ ID NO: 125834 - DNA, 1058 bp, Homo sapiens
tccagcgattctcctgcctcagccttctgagtagtagggattacaggcgcccgccaccacacccggctaatttttatgttattagtagagacaggctttcaccatgttggccaggctggtctcgaactcctgacctcaagtgattctcccacctcagcctcccaaagtgctgggattacaggcataagccaccctgcccagtcggactagccacatttcaaatgctgaatagccacatgtgaggagggtactatattggacagcacgattttataggatatctttatttgaatgtcccaccaatacctcaaatttaaccagtcctccctcataaatctgtttttcttattccattcaaaattttggtgaatgacatctccattcatctactcactagtccagaaacttggtggtcatttaaaattcccctcttcttcaccttctctctcttatccaactccttatctaatcctgtcaaaccaagtaaagtcagaaaactcgagaaaaaaaagagaactttcaatctgataaaagggtgatgcatagctatcaaagaaccttctgctataacaatcccagaggctgggtggcttaaacaacaaacatttatttctcacagttctgaggcctggaagtccaagatcagggtgccagcatgattggttcttggtaaaggttctcttcctggtttacaacagctatcttatccttgtatccttacacggtggaaataagggagctctggtctctttacctctgtctggttttggttggagttaggctgatttaaagtccatattaaagagcaaaatatcaagaatagcaaaaacaattttgaagaacaacagggatctttccctactggatataaaaatttactttcaatttaatactcaagatagtatagtatagacatataaacatatataccgatggaacagaatagaaaactcagaaatagacatttgtttataatggatcactaatacatgacaataagtggcattacaagtcagtagaaaaagaacggactatatggttgtgagtcaaatgattat

SEQ ID NO: 125835 - DNA, 2975 bp, Homo sapiens
actaaaaatacaaaaaattagccgggcgtggtggcgggtgcctgtaatcccagttactcaggaggctgaggcaggagaatggcgtgaacccaggaggtagagcttgcagtgagccgagatggcaccactgcactccagcctgggcaacagagcgagactccgtctcaaaaaaataataataataaaataaataaataaatagttgctcttcaagggacaggagaggggatgattgaaatggtggatctggtggcagtctagtcattaaattgttagattgagaaggaaatgaaatcaggaagggactgataaatttaaggataggtgtgttcaagggaacaagtgtttcagaattgaagctttgagagaccaggtaagatgggaagttgtagtagattcctttcagaagtagagcagttccgtatggtgacaaggtctagggtgtggctgtgggagtagcgtccttgggattgaagaaatgaaaaagtgaacaatccatgaaagcatagggtgttgaatgagtcatctgcatattcatctaagtcactgagactaacaactggagttaagattgagggaaatgcctgtgagctattttcccagagataactataagcagcataaaagcagggaccatgtgttttttttttttttttttgctcagtgttgtatcacacagcgtgaggtacacagtaggtatttaataaatattgaatgcctgaaacaaaattaaattttttcaaaacatgccaattaggcctttcttaaatgatttaaaaaattgttttatgatgtctgtgcagagtaaattgctcctaagtctgtcacaccagtcggctacctttttggtaagataaaatttgttaatgctctactctgtatatctaattatggtatcctaggcttatattggttttgcttttagattaaagacttgatcttaaacagatttttaattctcaggtttcaaaaaataagctcatgcttttagttttactagtagctaagtaatggaaattagctcccttttactaaaaagctactagttttttttcttgtttaaccagtctgttaggtttggaagacctttttctgtctgctatacagatggaaaaatcccttctcatgaaaaaacactgagcatttgaattagtatgttctaatcagaatattcccaaatgtgtatctttatttcattgttttattttgtttgtaaatagtaattgaaacatttccacagaagaaaatttttctcctatagccctcctctatagctgaatatatactaaaatataaagctatattcagctgaaattcagtttttagtaagtgtaaagctttaaatggctgcattcccacagttggaaacacgagtatgtggttggcatggtgaatttatttgaaataaaacatgccaccatttaagcaataaggttttcaggtagttttgaatgaataaggagcaaagcagttgagattttaagtgaggataaagtataatcattttagaagttctaaatttttggatctgtgatgctgtcttcaaaggtaaaaaaaaattttaagttctaaattttagtttgaaaacatatatagcggccgggcatggtggctcacgcctctaatcccagcttgggaggccaaggcgggtggattacttgaggtcaggagttcgagaccagcctggcaacatggtgaaactccatctctattaaaaatacaaaaattagtcgggcatggtggtgggcacggtggcaggcacctgtaatcccagctgctcaggaggctgaggcatgagcattgcttgaacccgggaggcgaaggtttcagttagccaagaaccacactccagcctgggcagtggagcccaacacagtctcaaaaaaaaaaagaaaaaagaaaatgtatttagagtaacctatgtgataaaattataaaatgaaattatttgctctgatgttttccctgaaccttttaaaaaaaatttcatgtgatgctgttctccacactgcagacatgattcaacaagactgtttttcagtgtacattccccccccccacacacacacacagaggaatatagcagtcttttttatttattttttcaagtttctacacacaacattgaacatgtaatttacccttttttttttttttttttttttttttcagacggagtcccactctgtcgcccaggctggagtgcagtggcgcgatctcggctcacttcaagctctgcctcccgggttcacgccattctcttgcctcagcctccccagtacctgggactacaggcaccagccaccatgcctggctgatttctttttgtatttttagtagagacggggtttcaccgtgttagccaggatggctactatctcctgacctcgtgatccgcccacctcagcctcccaaagtgctgggattacaggcgtgagccaccgcgcccggcgtaattaactcttttaaaattcaccagtttctagttgctgtcttctcttttgccttttggcattctagaaataatgtaatatcagatgctggatagagtaattggcaaggtagctagatgtaaaaggagtgcttttgggaggacaatgagaatgtcctgatttcctatttctgtctctagatgggctttcttggtattgatattcctttcttcatgtaattaggaagaccttaattcactattccagactgagagtttaaaaatgtctgtaaatcagtggttgaaatctgttggctctcaagcttaaacttctttccttttagcttcttgcacttcctgtttctggctttttggtttccttacgcttaacaattgtaaaatttctagtgaaagtttgatacatattttggtacagattatttctttcccaaaacagaatattttgtttggagataaatgaggaaataacatttgagaaattaagttggtagttaataactagtatcttagcactcttcaggac

SEQ ID NO: 125836 - DNA, 1543 bp, Homo sapiens
aaaagaaaacagaaagaaaacctcaagttacaaatgtacaaacgtatgaaataagtgtaatgctgagttttttcttcaatgaactgaatttcagtggatatgagatctcattctctttaatattgcagtatttatgaatatttctaacttgaaataatgaaatacataaatttttttcaagatctggatgacagtccttttgccatctacttagtaaattagcgatctgataattgtttttaagatctgaagaattaatgacattttatatgtagtaggctctcaaacttgaatgggattcaaattactcagaatgagtatattttaacaaatgatttcatattgctataaataattctactgtagataaaatttatggtataattttatttttcttttctctctcttcccctggctccctcaaggtgaacagccatataccaggaataggataccagatttttggaaatgcagtctctctcatactgggtttaactccatttgttttccgactttctcaagctacagacttggaacaactcacagcacattctgcttcagaactttatgtgattgcatttggttctaatgaagatgtcatagttctttctatggttataataagttttgtggttcgcgtgtctcttgtgtggattttcttttttttgctctgtgtagcagaaagaacttataaacaggtgggtataatgtagacttccgaataagaatattttatcgttttcataatattaaaagtattcctgaagtactttattatttcattatatcatttttacctaattattttttattttgcttttatagtacctaaccaaataaaatcttaacaattcatattttgttaattttgtttttctgtggtaatctacttgaaaattaatcctcatcttaatcttttttagcgattactttttgcaaaactctttggacatttaacatctgcaaggagggctcgaaaatctgaggttcctcatttccggttgaagaaagtacagaatataaaaatgtggctatctctccgttcctatcttaaggtagaatgggagtgataaaagtagctttaacatgctggccctttctgatagttccagtttctttatcaatatatatttgtctctagatgtatagtaaccagcttttactcattcaaaaactggattagggattttgtttctactagcctggttgtcacaagccagcagagggagcccactacttaaaaaagaatttaaaaaaaataaccaatgagtttcctcacagaagtgacctattactattttaaaatattagtttgcaattcagtgtcattcttttcatgtcattattttcctttaatcttttgagtaattttcctaattatggaagtatgatataaaaactctggagggaagagggaaacatctaaattggttttaggaaaacactttttttctgaggattacttcttgttattgcattaagtagcagtagaatgtcattatatatggagtaatcatgcaaattccaatgatatttattcaca

SEQ ID NO: 125837 - DNA, 1039 bp, Homo sapiens
ctgacctcaagtgatacacccaccttggcctcccagagtgctgggattgcaggtgtgagccaccgcgcctagcaagaagtatttatttttactaataaagctttaatttaggtgataaaaaagaaaaaagccttatttctatttttggccaaaagttgtattatttatctgtatagcaatgcatacatcttccaatatatgcacaactaactgttaggaaggtgtaagataatcatattaaacaagtactgtgtatatatatatatatatatatatatatatatatagccacttctcaagagaaagcaatagaaatctgattttcacatttttgtttgtgtttaaggtgagttcttcttaaaaggataaaggagttaaaatattagaaactgcacttgtttgtgaatgaaatttgaatttaaaaatggtgttatatgatataatttaagctttgatattaaaactggcttgtcaccacttctatttttttttttctagctatggaagattaagtcatgacaattcaaagaaaagaagatgtagcctcttttccagaataagagtactgactaagctgcctgaaagcttgtcactgattctttgcttcaggagtctcagctagggagttgaagtgtttacatcagactgtcttgtgcaattcttatatttattttactggttcacttttttttacatttattttagtctttatatttttatttttaagcattgatgtacttagttgttgaaagggtgatgaaactgatatccagatacttgagatcctggtaattggtcataaataattggcaaaataacaaattgtgaaaatagaagccattgctcagcaccgtttctccatcaatgccgtgaacttgccttacttgaggaaaaattctttaactttggaatattgcattgaactcagctatacacataaaacattttctttggtaaatcaagatccagtcagggtttctcttgaattattttggaacaatgccaggatccaaactgattaagttacagtttaagcacc

SEQ ID NO: 125838 - DNA, 1858 bp, Homo sapiens
gaacaactgaagaataaggctaagaaccaataaaatatttctctaattgctagttgtaaaactgtatccaaattttcagaaaagacagcttcagcttgcaaattctatcctctaaacttatctggtgcattctccccaccccacccccattatataagggctattttagatgcttttaacctccccaacaaataatttgccaagtgtccaatgagaacttatcatgttggtgtgttaggtaaatcgggcaaatatgatagtgtcttacattgggccttgattttaagttgttatatttgtacaatcgagtattttagaaattacatgaaacatgaaacagtttttgcaattttttttaaactgggcatctggtttctaaaaatttatttgaaacaatctagaattttcttggtgcaaagtgtatcatgtggaatatcctcatatttttaccatattttaagaactttaagacgattaattgtaaataatttatttgattggtgcagttctaatccctaaatcataatcttaaaatcaggaatgtgtggagaacagagccatgtcatatcactttgctcttaccattccttttgatcagcctcaattcagcctcattgtgtagtatgttttttctttctatgaaaaacaacagaaagcatttcattttatttgcctatgttcaaatatgtttaataatgaccaaagtgcattctgagttttttcaaggaatgtaatactggagctttaagaacatacttagtttctcatgtgaaaacttaggctttgtctgatgtttttccttcctctattgtctaatgttgaggttgtttttaggaattatgttttataaactttttcaatataaggtacatgcctatacagaacttaacattttgcacagaatatatcaaatatattttgagaaaaaaagtacggcatgagttctgttaggaataaaagatgaaactattgtatctcacaaaaaatcttatttcagaatggaaatatttttgagaaaagtagctgagtatactggtttaagaaaatgcttgttttagattgaggttaacttagagttgggagttgatttattaagtacagtatacctctcaacagtttataaataatatgttgaattatgtcagtgtgggcagcagtagaatactaaaaggaaaatgtcatgttaagcaatttcagaacattaactgaactattttcaaagcagaaaaattgacattgctgcctttaagaataccatgaatgtaagaaattgaaagaaattgtaaaatatcacataatatagaaatggcagttcaaagagaattgtggcagatgttgtgtgtgaactgttgtttctttgccacatgtgttgtatttgaaagttttacagtaagtttaaaataaaacattctgtgactgacggtgtttttttttttaattttcaggtcatatacatttctatggtaattttgtgtttacttaacataaaatttagttagatttggggggagtgaaaataaattttttataactttccaacattttagattttgttatgattcttagaacatgaaagaataatacacaggtttttcatcaccaaaatgatattatatcattaatgtttgtttgcttctttgtttttgaatacagcaaactggctgtggcctgaaatattaaagctcattgtgaaaagatagtggtttttttggtttgtttgtttgttttgagacggagtctcacactgtcacctgggctggagtgcaatggcacaatcttggcttactgcaacctctgcctcccaggttcacaccattctcctgcctcagcctcctgagtagctgggattacaggcgcc

SEQ ID NO: 125839 - DNA, 1038 bp, Homo sapiens
acttctaaatttcatttcagtaacttgccacagtggtcatgtaaaattccatctaggaagaggatcatgagatgctttgttccataatgcctgaggatccgaggacccaacttctaagaagcaacactagccacagctggccactgaacactaatatccaaagaatgctttgtgtcctcttagtccatttctttacaaccactgcctcctcttgagctgcattaagcgacacctgagagtgtctctgacagttctgcaaaaagtgctgaggaaaaagaagatttttttaaaaagagcacagaaaaaataaagaagggaacagaagagtaaaaggatggggcacagttaaacaacatgcaaagcaactcaggtccaaataggtgtctaccagacaccctcatctaacaacctccctggtgcatagtttcttgaaacaagagaaaggaatagtgattgttaactctgttgcagtgaggtaaagagatggcccttggatttcttcactttaagttcttgcattaataaggaaagagacaaaacctgatacagtaattgaaacatgtcgtcgggccagaagagcaactaggggaaagtcagaaacatcacaatctgcgaagagagctaacaaagcaggaaggaaaaagaatgatgtctcccagctttgtacatataattttagttattttgtaaagccagactccaaggaaaaaaagaaaccaaagaaaaattatcttcctaaaatgttcttattttccctaaaaaaaaaaaaaaaaaaaaaaaaaatactgctgcctcaaggcacaatctatcatatgaactttttttccagttgactatttctgtaaaatagtccagaccctgcagcctctgaatctgtgttcaaaattaacaaagaaataaaaaataaatcacatctaccagcattcttctctaaggggtctctctttgcctctgtttcctgctcatgaaccatgaagctggccacccctgctgggaagaatggaagagtgaagatgaaataaatggctggcacatacc

SEQ ID NO: 125840 - DNA, 1058 bp, Homo sapiens
ccagtcccaggtgggcagggcaggcccctggtgtctctggtgttacacagcacatgtgcacagtttaaaaaacactggagtatatggcacctcacatcccttccagcttgaaaatattgatgatggacagaccagaggtggaatcagagccccgacaaaaatatagctagtgtgaaaactaaagcaggacggtgccataggggacagaaagttacaatcctgccaagttcaatgtagtgtatatcaaaactgttttttttaagtggccatattttattcactcactaaatgtactttttctgagtactaactatgcactggtaatacaacaagtagaaagacgcagccctgtttgcgtctgatctgtttgagacatggctgggtagactcgtggtaatcacagttggatgtgaggaagtggtgcgaggggcaggagggacagggcggtcagcaagagccctctaggaaaggagacacctcctctgaatctagtagctaggtgaaatgagagaggggaaggaagagtggaaaatacatgtagaaagagaaatgaagtatgcaaagtttcagaagcagaagagaactgggtgggtcctcgggaatgagaagccagcccatcagccaatatgaggaaggtgagcagacccaggctcaaaaggagcccgccatgaccctctaggaagtttggcctttgtcctgaggaccatgcatactcagagcagagtttcagcaggagggcaaactagtctaaatcttacatacgctgccggtcaattcaaagcaggaaggaaaaattgagtttgaatgaggcatcagttgatgaatgaaggtgaagttggcagtgccaataggtggtctcagggagtctggcttcctccttgataaaaaatggtattaatctctgccttctctatcttatggtgctatggtgaggatccaagaagatcacgtatgtgaaagaacatgataaactgggaagtactctgcaggtctttaaattatagcagtagcaacatcagtagcagcattctgggggaggaaccaccagatccacagta

SEQ ID NO: 125841 - DNA, 1030 bp, Homo sapiens
gaaaaaaacacttggcaaagctcaaagattcatggtttatcagctcatgggccagaatccctgattgctcatctgctgtcctatatagtttataaaatctgtaaggattgaacagtatttactcactctagggttataatttaagtgcttctcaagtgcttaataaagagtttcacattttcttcaccttagttgactctctcttggtttgtaaccaagtttaccatggctttttctagaactttattgattttaattgacagtttctactgaaacaaaaggaaagaaaacaaaattatctactttgtaataggtggattctgtaagactgcattgataagttaatagtagattattttatcaactctgttttatcacatacaaataaaggcttacagagtactttttcttgtcagctaagtaaagcatcttttctgaaaatgtcattaacaccacttggagttcatgtagaaatcaacttaaagatctcagaatgtttaaagagcttcatttataatcccttcaatataaaggagaggaaagggcaggaactcactgtatctgtatcagcactaaaatgcagtgtaaataatgaattcttatttatatacacccagttttattactgggctaaaatttgatgaaagagaaaagaatacacacatctttattcattgtttgcaatgcaccttgaaaaatattgagtgacacctttacatctgaaagcactttcatttaaagtagtagctgcaggggataaaaggacactttgtaaaagagacagcaaagtatcatagatcattctctgtcactcacagacggacagctaagacacttcccagtggactctgggatatatttgaagaagtgcccaaacccagagactcccgatggattgagaaaatggcaaatcttccatcatgaaaaggtttaaaggaagaatatgttttggagtaagccagagaaagtataggaaattgttgaagcaaagcaaatcaatactgagaaagaaaatgaccgagagacaaag

SEQ ID NO: 125842 - DNA, 1024 bp, Homo sapiens
tatttttatacctcttccacctccccttctgtcgttctgaaacaaacagaagccagagaagaagaaatgagtgggatcgagtccattttcctcagtaaacaggttgcatgtgcattgagtacccaccatgcatcaggcatcctttcaggtcctggggatctgtggatgtgtaataccagtctctgccataaaggaatgtacagtctggtaaagccacagaggaatgtgagtaatttaaaagggcacctggagataagtgctaaaagagatgtgtacagactgcagagcaaggacagaggaatgagtctctcataagaggagatgtcatgtggagagatcagggtggatttcacagaagtatgattcagagacggaagggaaattaagaatttattaggcaatccaggttcagagaatattgtgtgcaaaagtgcagacatccctttattcagcaggcacatgtggagcatttactatgagcctggggctacgtcaggtacaatctcttcttataagatgaaagcagtgtggtccttgggagtctctaaatctgggagacatggagaaccatcagcttgtctgttatgcctgaagcctaggagacaacagagaaggaaagtggaaacagaacttaaggtgaaaggctgccaggaggttgatcaggaggaaactataaagtctgcttaagaggaatggaaagattataaaagtaggggagcaacatgatcaaacatgtaacattcaaaatgattttgatcaaaagatacctctggagagagagagaaacagaagtcagaaaagaagttaagaaatgtgtggaatcaagttcatcttcctctccagactcatcccttctagttctctttattcactgcaccaatgggctcccttgccctgtggcttccacttgggttgggtcagtgggaagaagtagcaggtgatcacagggcaggatgagagtggggtcctggttcttaatgcattggtttctttgctgctagtttgctgtatcctggtcatctac

SEQ ID NO: 125843 - DNA, 1192 bp, Homo sapiens
gagggaataaaagctactaagagtctacgtatgttccaaaagcaatgtaactaaacctttaatggttttgctcatagtttttactaaaacattttctttaatccacatgtgcttttctgacgtctgtgttagggcaatcaagggttaggaaattagctttatagaatatagccaatgtcaactttttcttctctcctctaccccaaaccagcacactttggaaaatacctgaaatgcggggcaaacagcaaacactctcaccataagaatacctaactgaattaattattaaagagcataaaatcacaacaaaggtattaatatcacaggaagccaaaattccgtgtgctacccaaatatctgtctagggttgctcttctgagaaaggtacaacattttatctctcccagtgccacagcggacacatcatctcattcattccgttaacacttgtccgtgttgagcacctaacagtaggttccaggaacacaaagatgagtaagatatgctccctatcttcaagtttctcaccacgaagaagacagaaaacagatggtcataatatattcttcagaactcaatagcagtcccctttctccatggaatagtacattctttgtgtccctcgttgttttctctttttctttgcctcccatggagcgccttccagtctgtcttgtggcatctggtcctactgagtttttcaactctcgcttctcactgcagaaccataaatcacagcagttttagaactaatttgtgtctctattaagttgctgagtacatgttaattttattaacactgataaagtagctttcatgttcttcatcttttatttattttccaactggaaaatatcctttgtctagcactgtaattctaaaacacagattttatctttcactttcaagtattatctctgagtaacaataactgattgatctttgagcagaaatagattttttaattacttaaaatttttcttgaaaaagtcacctgatcaaggagaatgttctaatgaaaatatcactattatcttaattatagttgttatttcacggactatatttgtagtaccgacgtgattctgatttgtgaactaatgaaataattgtcttgcttgttactctatttttctttaaaaaggccatatctttaaaaatagtcatttatgtgtatattaaatagaaa

SEQ ID NO: 125844 - DNA, 1048 bp, Homo sapiens
agtctcactctgttgccaggtgggagtgcagtggtgcgatctcagctcactgtagccccaaactcggagattcaagcaattctcccacctcagcctcccgagtggctgggactacaggcacccactaccacgcctggctaatttttgtgtcttttagtagaggcggggtttcactatgttggccaggctggtctcaaactcctgacctcaagtgatctaccctccctggcctcccaaagtgttgggattactggtatgagccaccacgcccatcctctctcaggtactttaaacttgactgtcaaattcatctttctccccctacatatacttttatatgttttctatgtgtttttatgtatttgtttgttgatacctgtttcctagccaagaagctaggcatcaggtctgttttctttgtccttattccatatagcaaactggccaatgggatgtgttaattttgccttcacggtgtctcttcagttcatcctttcttttccaacccaccacctttcatttagcccagaccctcatggtttctcataggaattactacagtgtaacatgtgggtgtatgtcagattgcccgagttcaaattctacagcacacttcatcagccatatgacctctattcacttcagtttccttgtttgtaaaatgtggaaaatgaaagcacctaccttaaatgaataaatgaatgcatgcctgaattataggaggaagaagaaaaattacatgatcaagccttagctttatcgaggtatgaatccagatagtcagaatctatggcagggctgtctgatagaaatataatgggagtcattacatttaaatgtaactttaaatataaatatatttatatttaaatgtgactttaaatataatgggagccattatatatatatgtgtatataactttaaattttctagtaaaaaaataaaaatacgttaaattaataatatttatttagtccaatatagccaaaatattctcttgtggcactagacacgttttaagtgctcactaggcacatgtggctggtg

SEQ ID NO: 125845 - DNA, 1040 bp, Homo sapiens
tgtatccattttgctgttgagataactcataactatttgcctcagtggtatatatggacaagtcctttttatgagaaactagtgaaatgtttaatcagttcagatccttctgttcacacctctctctctcatttttatatgtccttccaggatatgttgattaccattgaaagtcccacatcatatttatgccagtttaagttgatcacttccatcacagaaaactttaaaaattttaaaaattaagtcttgagaacatctactgaagtatggccgagtaaaaaggtttttattccactctccttccttgtatctcattaaaaattgccataaataaatacatgcgaaggagaaaagtaccatcataaaaaataagttaaacatatagtatttcaaattcaaaaaattcagagaaacataatttctttaaaaaaaaatctttaaaaagtacctactagattttaaagacgaaattacaagacaaaagaaacacaaaatagaaactggcagagcttggaaaagcaagagaagaggaaaaagcacaatcattctaaaagcaatagtaaaggcaataaaagtagcattaaaatatttttaaaaataaaaaagacaatataggcttaaggaaacaaatatatgaaagaaatacaaaaagaaaaaaattgtatgaagaagatacatgtaagaaacatggtatacctcacacatgtataattgatgttttcaaggaagaaaatgcattaataaatgaaatagaaaactgtcctgaaattgtcacatttaagcttacaaataaaaagagatggatctaaaaaatctgatataaaataaacattaaggtgaatcccagtaaattattataattttccagaacatgaaattatatgtgcgtttcaggaggaataagtgccaggtgaacctaaacttttgtggtagcaacagtcaatattggaccatagaataatgtctactaaagtttgaggtaaagtaaatttgacccaagtattttgtattcatccaaattattttgcaagggtata

SEQ ID NO: 125846 - DNA, 1051 bp, Homo sapiens
aaaggtacaaaatgtagcatattacttacaaagatagtgacaatatctctaagttcagttgtgtttgggtcaacagttatttctccaccagtgtcatgctaggcactgtgctagagacttgggtgtgaaaaatgagaaatgatccttaaggtggtttttcaacttgacagtgagaaagatgcatgactggagtctttcaaagaaaatgcaggggctgatttccacagcaggcttagggaacacagaggaggaagactgcatgtgtctacggcatttagcgaagccacattttatatattctgcatgagatttattgactattccttggtttaaaagcaccgtgctaggcactgggtagacatggaagaaaaacatgcacgcaaaaataaagaaaggatttcctttcgttttattatcccatcctgcgatgattacaggaaagatgaggggaaggaaaatcaggagtatttgagagtgggctgagatccagtattctcaggattctaaattggaatatcaggaatctcatcccagaggtaaagttaatataatgcagtttttcccacataaggccaaaatagtaggctccagacctgcactactattcaaggtagtctgcctctaaaaagataattgggagaaacaaaattaactatttcataaagagaagtcttcaaatttgcatgtggcataaccagtctttttttttacctgggctaatcccaaagagagaaaagcaatactgtctcattagtatggactaaggatagcttttcacttaggcgactttgtgtacagttgtgtagcacatgttcttcaattcttcttgactaaagaaacatgatgttaagtggaggttatttcatatggcacagcatcaaggaccttgtctcatctttgagactctctctgctctctagagtttaggaaggtgtccacacagaataagtaaataaaaataaaatgatgcagtgctttacttcccatttgctccatatggctaatgattctagttctaggctatttcatgaatagtagtcagttacgttag

SEQ ID NO: 125847 - DNA, 1051 bp, Homo sapiens
cttttcaagcataattctgactttctcagatactgtccacattcctatgttataaggtaactgttcacaggctagggactgagttaaattaaaaattagagattgtaatttatatgaacatatataaatgtacaaatatccagttttagtctatatttaattttgtattcatagccatatctgtacctttctgtataatagtacaactgtatgcagttgaatcccataaaattattgtatgatcagaactttaaagcatgatttggttatatttcattgacaccaatgaaacgtgttacaaaatgtgatagtctgaaaattaacatgacctgttctaactgggagttatgatttacttatgccacagttgtaaaaccttaatatatcctaattaaagtgaatttaacaattttgcagttctgtgacatatggaacttctcagctgtcttgcacctttgagttgttctttttattataaaaagctattaaagtcaattttaaaatcctgagagagacgcaagcataacatattgcataattataatatttcaatgttatttgtttttcccacatctctgcttatcagacttaacaggatggtaggtgcctaaaatatgatgctggtgtcctctgaaccaaatgtcattgagaaacaagttctagaattcagtttatagatcaggatgatttgtaacttggtcaactgctatttgttttcattcactacaaaataaataattcctagactctattctttatattatcggaccgtttttacagtggaaactaacatctagtttgttagaatgttattattctggacacctattttaagttttcttgccaagaaaagtgcttttaggtaatattgttacctgtgttttacttttctttaaatgacatagattagtattacttatttacaacactggatgttaatggattgctattgaacttgccagttaagtcatgattcttcatatgtgccacacttcggctcagacaaaagttagtacagtaattttctgaatgcaggaatacatataaaatg

SEQ ID NO: 125848 - DNA, 1046 bp, Homo sapiens
gaaatgaccacaagcagcaaaataaagacatttattttccccatcgatgatttgctattgcctcttatttagttttagaattctttttttaatttgttgtattagaaaccatttgttataatgctttcatcttttaaatttgcaatctatatacacttccaaatgttttgaaaacaagtagacaaatagtggtaagtcctgcgtgccaggactttgccatatcagaaattgaatgttagaaatatctggaaagagcccatgtctacaaaatgaaaattttaagttactatgaaaaatattctattcttagaaaaatttccaggtcttgcttttgataccagatgtttgaggctagaaactaactcattagacaaagcacaaattgtaattttaatatcaacaattatcattgctttctcatactcatttttcttccactttttctttttcttcctcctatttttctttctctttattattgctgttatttccatgatcaaacctaacatttcaagataatttaattttccataaaatctgttgaatgtcagttgtctcactgagttgtccttgtcacctgaaattataaccatccatccaacatgactattaaaaatgactgaaagtactttgcagatataagatgttctataaacacttttccccagtagcctacaacccattgaaatggtatttgatctggcataaattgctatttcaagcatctttgagccgtcataaatttggatgctgtcattgctttctgagtttcatattccccaaatgttctttattgaaatccaatattcattccaaagggtattacattgaattcaagttaactgagaacaggagccaaagaggccccattccctagtcattcttttcttaatgataagaatgagatccaggagttcacatttgattagattattctctctttctcaaatgtaatgctattctacaggaaacttaagaggcttctttataatttgcatgttggagaatgaaggtgatgataattccaatacacaccagggaaacaa

SEQ ID NO: 125849 - DNA, 1013 bp, Homo sapiens
ttagactgcattactctttccatattgaagacctatatttaaagtaatcaaagaatgctatatttcttgaagtgtaataaaaccccagcaaatttgacatgtaccctttctaccatggctacgtgcatggagcatttgcaatgcaatttagatcacacctggtattgcttctcggccttttggctaagatcaagtgtagatcacacctggtatctttggggctctattcttccctgccacacctctcactcacggaattagggtcggaaagcagattcaacaaattatcttaatatgaccatcaggaaaatctcctcatcctaatcatagagtggagtggtaatataggatagcagttgtttgagaggaaatatggcatagcagttatgtgcatagactccagagccaggctggctgggtccaaatcccaaatccatcacttatcaaccatgtacattctggacaagctgtttagcttctctgtgttcagtttatctgcaagatattgagaatggtacctccctcactggggttttgtgagttaatttatgtaaaattcttacattagttagtgcctgccacataatcagcaccgtgtaagtgtgaaacatgatggtggtgatggtgatgatgatgatgatgaaacgtagatttgcttggtgaatttttgagtatctacttcaaaacatttatggccagaccgtaaaattatcaggaaacagctctgtgataggctaggagtttgggaatacaatagcaattctttttgagataaaccacataggaatcctggtttaagaaatcactggtgtggccttctggactgagccctttcctgatagttaagaagcttgggaattcctacttgttcagttcctgacagtgggcaagtcatttctccccttgaacctctatttctttatttgtaaaatgaagatagtgtattagatgaattcggaggtgcttttcagctctaaaatcctatctttttaatcagctgtttgtaaatctga

SEQ ID NO: 125850 - DNA, 1032 bp, Homo sapiens
aatggcctacagagcttgcactatttgctctctggtcctttacaggaaaaaaaaaaaaatagtctactatttactctctggtcctttacagaaaaaaatgtttgctgactcctggtcctggcgctctgaaatatcacaacaatacctatatagagaatactttttaaaaatatatttgtttcagatatgcaatgaaatctctccatttgaagatgtgcttttagcaccggaaagtgctatatttaaaagatttctttgcaactttctttccttgtgttcactgttctgtctggaacccctattagtgagatgtgatctttctggactaatcctctgagtcacctgtcctccctcatatttcttttctctttatcacttcactcctcaatataaggaatttccttgttcttatcacacaactctttaataaaatgtctttacattttttccatcagattttttaaaaaagttttcaagagtcttctcttatgctgcagcttttattgtttgtaacatcttgctcttcttatatttttgtgactgattcttatgttcttatcttggtctttcccttttatgttttaggtttttgtgaaaagaaggtttattccttatagcctatttacatttgggaatgaagcaatagagacattgactgtgatctctgtgtacacattgatggcctcattttagggagagtgggtgaggagccagactcaatttttcaagtcccaaatgcttccattaggacaggtttacccatattccaactcagagactaccttcctaattctgatcagggagtcctgcttatttgcttgtttccttagctagaggctacgtggatgttagggctccgccattggcatcatatatcatcctgacctcatttacacagtgtctctgagtcccaagcctctggagttctgtggaatagagtactccccgcacctccagcttggattcatccctttctcaatatattcttgtctacagctagatgtggctacattagataccactgcatcaatt

SEQ ID NO: 125851 - DNA, 1090 bp, Homo sapiens
atttaccctatttccctttccaaaacgggatgactcgctttgctcttctatttgtgcctccttgacttcactttccttccaaccatgatatccatcattctaaaccagtgtttcctaaagtatgcttggcagaacataagtcatatgaaattctatcccccaaagagggaggaaacctgtggtcaaacaagtttggaaaatatactgcctaccatattctctttggaaaattcatattacggattgaatcttaaaaatttaagttctgcaataaagaagcctgtttaaatctgtgcttccagcatttttcaaacttcttagaccgtggaaccaattgtcatggagctctattaacatctccccaggactcatgttctggagcacacgttggaaagcaacaatatcattcaaccctccaggtctccactgtgttccctgtaaagccaagtggttgagctggatgccctttaagagttctaccagcactatactatgtagtgatggttttctgtccacacagccaactctgccacaagcagtcactaggactcagcctctagaaaccaagtcagcctgtcctcctccaaggccagtgttccctatcaccctgaagcaattggattgatagaacagtagaatggccttttgaagtcacaattacaatccaactaggtgacaatactttgcacagctggggcaaagttctccagaagaccatgtatgctctgaattagtatccaatatgtggtaccatttctcccatagccaagattcacagatccaggaatcaaggggtagagtggaagtggcaccactcaccatcacccctagtgatccactagcaaaattttgcttccagttcccacattacattctgctgacctagaggtcttagttccagagggaggaatgctgccaccaagagatacaatagttacattaaactagaagttaagatggccacctggaaactttgggctcctcctaattcaagaggctaagagaggagttacagtgttggctggggtgattggcctggacttatcaagttgaaatcagcctactacataacagaggtaaggaagagtat

SEQ ID NO: 125852 - DNA, 1044 bp, Homo sapiens
gcattaccttgaatcagggtatttcaagacctctcattgccttagatcatcattttattctaattaagttcaataattatacatatagaatatacataatctattctgcttttaggatagaatgctaattctttgatatctgattatcaaaagaatcatattattggaagttattttctgggagggtttctaataacatttatgagttctctacttcataaggtaaactgtaaaaacaatgggtaaacccagactgcattttaataagaaagggagctaaaaacaaagcacagggggtgcttcagtgggtgcgctgaaagaatagagtgaatatccaatgaatcaggacaatgtagacattgaaggaattaatggaaaaaaaaaaacttacctcatctctattatccaagtaagacaagcacaaaggcagaaagtttatagggcatgtgtgtgtatctgtgtttatattttgtgtgttacatgaattatcagaaagcaacttaaagtgttcaccaagaggctggagggtctgtattatcaatctctattacagtagaaatactactactggatcaaaactacttcaaagcctcatggaggggctgtttccaggatatgtaatgattgatttgaaataacatgacatgagagacactactaagaatcttcaaggataacagagtatttttcaagcttcatgaaaaatgatgaagttaccatgtcaaggattgctaaaagcctactcacaagaacgcctcaaatcaccactgagaaagcatctgtttcttgatagtttttgaggagctgttttgcagtgtgaggtgacactatctgttcggatacaaagaaataaagtgactattgcatgctgttgttcttgttagctggacatcatgtcccctcaaacagaatactacttacagccgagtagcacttaattttctttcaacatatttggattggttatatcttattgtgtttgaaatgattaatagtcagcagaaatacttagtgaagggaggacaaagactactgctgaatatc

SEQ ID NO: 125853 - DNA, 1065 bp, Homo sapiens
agtaggtatattatatttatggtatacacaagatattttgttacgggcatgcgatatataaaagtcacatcagggtaaatgaggtttctatcacctcaagcatttatcctgaaacagcatttttatgggtgtggctagaggctttgtagcagctaaaacagacccgttcaaggcacaggtcttgaatttgttgttttaaataacatttttctattacattgaaatcagcacacttggtatttatgtgaaaccctgtataggaattctgacaaaacagagaacaagagagcagtagagcaataaatacaaatgttattaaaatctcaatttgtaacctcgttccagttgcgatgcaaaatatatgctatatatatatatatatatatatatatatatatatatatatatatacatatatgtaaaagtacacacaaataattacaaagagtagtaacaggtaaacaattaaaattgtattaactcgaaatggggctatgggctagtaacatctgttaggtaggggaaaagtgtttaagcacagaactcaacttgggaaacgttggcataattacatttaaacaagaatttctggctatatgacctttcaaaactttataaatttatattatgactccagaaaatgcaacattccccaaacctatttgatatgtaattatagagagcatcttgtgggaccaggttcattcaagactcaggttgggaggtgctgatatatctatttaacataatttaaataatattcactgtgtgccacatactattttaggcaatttataaatgttaccaatttaatcctcataattcctcatatgaggaaggtagtatgttatcccagttttacagctaaagtaactgaaacacagagtaagaaatttgtccaagcttgcccagctagtaagtgatagagccagggtttgtacccaggcagctgtctcaagaattcatgctctttatttctatgcagatacacaaagtaagtgctattaaccttaatcctagggatttaggataattctggataattaaacatcctagttttaacca

SEQ ID NO: 125854 - DNA, 1074 bp, Homo sapiens
atgaaaacccctttggatttcgaaattagttttccactagttagttttccactattccattgtcttcttagtccagctacccaataaaaagcattctctctctgatcggtactgcctccctaagcttcattagatcagttctacttctccagtacctgaacttgaatatgaatttttcctttgcccctttcttggaagttttctgtgcatcccacacttgcccgtgactaggacttagattttggttctgttttttggttcagtctgtgccctgaggctatgcaccagccctgtctcctgacagctcccccagacgctgtactatgcagagcactagcttttctgcttgattgtaaggggtgatcagaaagtgttaacttcaggcaactcatttaatatcactggacgccatgttgtttctcattccaaaaactaagaggattggacgaaattatgtaataaatgccaaagagttctaattttctagtagaagaatccccagtaaatccataataatttttatgggaagacttcttaactcagaagaaatcatgtgaggttgcaaatgccagtcatggtcatcaaacacaaagccttgcatgtaatgccttagacatggtaattggttgataaatgcttattttttttaatgataggaaagaccaatcttcacatagctatgtgcctgactcatttaaactttaagtaccattcttataaaatgatgtttcattttaaaattttttctttaactgaaaagaaagcataaaaaatatactttaatatatgtcatttaaaagttttctgtaaatctaaattatgttactataaaatagagaaaaaagataggcttccatacatttatataattatatatataaatcttttatataaaaacctgacatgtactaaagtattaagagacttagtagagccagatcaacacaattgataaattataacacctacagtatagcaaagcagtatgactgatattactatgtaactgcaaataatattttgggccatgttcaaagcaggccctatgtaatggacctcaacttacattttcct

SEQ ID NO: 125855 - DNA, 1070 bp, Homo sapiens
tttgatttcactgatatagcttattggaaatatgaatataatttcctgtaacttcactgtagtggaaagcattcgtattagtattttttaaaaaaggaatactcagattctctgaaggtaaacttaaggcactttggtaatcatggaaattatttctagattaatctaacagaggcaggctaatagtgaattcttaatagtcctcctaacatcctaaagaaatgaacttgtacacatgtacaatagaaaatcctttaacaatcttataaggagaagtgaataggtatactttttttctatagctggaagaaaataactatagtatatctcagagtttcaaaaagtgtattcatcatttaaggatgagagaggatggggaaaggcaatgtagacataataaaaagggagagaaatagtatcttaaagacctgaaaaaaattgcaaagctcacaaaattattcattacaggaaatggcagagcattttaggaaatgtccattgtattttttacagtgaggttaaaaaagacatttgctctacgagatgaggatggaggtttatttgtattcatggcaatctttttttgtattgctattatgtgtcagacactatgctaagtataataggtggatgatctcatttaatgtttataacagcccttggataaatactagtagcatatccattgtaaagatgagaaagccaaagctttcagaaatttaataatttggttaagaggaaaaataatgtaagtggcatagctagaatttaagtccgtgcactcagtctcaaaagtttaaagtatttaaaacttatttcataatacttcctatcaaaatgagaaagcagactgagaagcagtctgaagtgaaatagaccaagcctcaataagccagaccaccatacaaataaacaacaggcttaaatttccatgaatagaataacagacaacactgcggagaatcaactcagtgatgtagaggacaaacttccaaagctctccctaaatgaaaagaaaaaacatgtgaaaagagattaaacactaaatatcaaaaatgttagagagatga

SEQ ID NO: 125856 - DNA, 1149 bp, Homo sapiens
taacccgtatgaggccaaggccagtttccaaaaaagtaaagtttatgaaggaaggaaggaggaaagtaaggaaggaagaaaaggaagaaagaaaaggaaaaaggcagggtgagcttgttttgattcctattaactaacctggattagagaaattcttagcacaaataccaccttttctgtgaacttagtgttcctacaccctacgtaagattccaaacatgaattatgtatcccttggcttctgaagagcaaaagaaagaaaatcatcatcaaatgtatttaaaaactgtggtcccacatgtactctaccttacattttattacaaatatgatctgcatttcctttccacattttgaacaaaacaatattttattaaccaaatctctcaaattttcccaaccccatgccaaatgtacccagtgtaataattcacctcctggaatcttgtttacagtcaaaatcacagagtctgatcaaaccaaccagatgtttatatagtgaacatactaatgaaggccccagatattgatatcgttaggtgaaaatagatttaacctttgattttatattctaatttataattaatgttcagtctttcttactgtaaaatttttataatggaaaaactgaagaaatgacaacatggatttttatcagtctccacatttcaatgttatagaaacaaaatatattgtagacttcatggattactttttagatatttatattaaaatttaatattttatttataatatactttcatatatttaaattatatgtaaatgtaacacacttactatactaaatttatttaaatttaatatattacttttaagtattttttccatttgcttaagtaaaaattatgcccatttgacagagtgtatttaagagaagttgaatctatacaaaggtgtcagagaactgttgaaaagtgtcacgatgagaaatgataaacctcaatttggtgatatgactttagggtaaattcaactcaattcataatcatgttttttgtttattccatcacaagcaatatatatcctaacagtcagatatcttcaatctttgatcaaacagaaaattgccaatatatatggtaggtatactgatttgttcaaagtggttgagaagaattgactagaaga

SEQ ID NO: 125857 - DNA, 1049 bp, Homo sapiens
atctggtttgggctatttgctgacagtgcatggttcttgaataatacagataacgtacaacaaacacactctgctccctggtacacaggaaatgaagatgctcacagtacccgcctccatgaactagctcaataaatttgaattgctcattagatttccaatgcctcgttgttgcctatatgtgaagagcttaagtgaataggaatcagatggaaggtgggggagaacacacagagatttcacataattcctgttgccagagaaaccattttcttgctgtctgggcatgcaccgagtagcttagatgaactggaggctcagcacagcccttgctgtgactttagtaaagaaaacaaacagaagggagaaaatgcttacaaagtaaagcagaattggatattaaaatgttattttaattagaatggttttgtagactgagctttgaaaccttgccccctaaggacactgatccatctgactacacatgtgtttccacactttgtgttcatttatgtatcttttttcttctgtgtctagaagaccatgtcttcatatatgtttatgtacactattcatatttacacaagtatattctcttcccccctctttctttcacctcttccccccacaacacatatcacacaactgtgctcttttgaaaacatgggaaactattctcagtggaaaaaaaaaagaatgtggcagtaacagagtttgcttacccaagccgaaaagaaataacagaaaacgaggaagcacaaggagagtacaaactgtgaattctagacttgtttatttaacacttggatctttttgatgaaggatggttgctaaaaacaaaagttagaaaatcaattgagaatacgtgaggtaaaacgttctgtatgcatggttctccatgcatttttccatgcattgtgagtatacaaactatatactgaatcaacatagtacctccttttgtgatactattgaaggaaagcaagtaagagtagattttgtatttatttgtgtatgacagctctgaaaagagctattacatattttga

SEQ ID NO: 125858 - DNA, 1043 bp, Homo sapiens
ttatatatctaaataaattatacaactaatggttaagatgactgattttagacccatactgtccagatttaaatgtcagcttcacttactagctgtgtctaggagcaagttaattattctgtacctcagtttcttcatccataagatgagatccctaatagtttgaatctcataggtgtattataaggattaagtgagttagtacacactcagtgttgtatgactggcacataggaagcattcagtgttagctattactatttatagcttaggggaaaaacaaagtcatacttatcagatgtcagtactgtgtttctccaaatgttgcttctaaatttatccctcttaggaaggcaggatttatttgtaattttatatatagttaattagatatattttgacatatttacaaaagaatttatctgcattttaggtaatcttatctagccacagtactatgatatatgattctggaaaatgtggaaatgcagccatttgatatatttttgtagattatgagttcatagttaatgaaagataaccgagtagatttaactaaatatttataataactaaaattatagatgataaattatataaagtgaaagattagtgcacacattaaactggagttgcatatcacctctatttaaactttttacttatttcaagaaaataatcacaaacaactaccctctagaaaagatggttcaaattaaattctgtccacaggaaaggtatgtttggagagtaagtcccctgtaatgaaactattgatagtactgcagccaggcccctcatatgtcaaacacctgctttggtgagacaagtttaatgcatagaaagagctcttaatagcagcaataggattccaaacccttggcatgacctttgtcgttgaaagtaaaagaaagagggttgcaacttgcttattttcttcgtgcaagatcctgcataaaccccaatacacgatcataattctaactaaatgatttttttaaacgtagtggtttctatcactcactcctttttcagtagacata

SEQ ID NO: 125859 - DNA, 1055 bp, Homo sapiens
agttttatgttagtgttattacttgattaatgtctttctctgccaggaggcaggaccttctaaagtgagggtccaaattcattttgctcacaaccgtatctatctgtaggacttcaaatcatgtcaactcagatataagatatgcactagggccgggcgttatggctcacacccgtaatctcagcactttgagaggccgaggtgggcagatcacaaggtcaggagttcgagaccagcctggccaacatagagaaaccccgtttctactaaaagtacaaaaattagccgggtgtggtagtggacacctgtaactccagctactcaggaggctgaggcagcagaattgcttgaacccgggaggcagaggttgcagtgagccaagattgcaccactgtactccagccttgttgacaagagcgagactctgtctcaaaaaaaaaaaaaaaaaaaaaagatgtgcactaaacatttgttaaatgactgactgaatgaataaatgaatactaaggcagcaatatagtgggaaaagatagtgtaactagcctggctcaacaaagagcaattctcttcactgggttggctagtttggaaacctaataggtggatacactaggacagtcccaggatctcccttctgtcaggattttccatgtaagaaatcacacttgagtgcttgctattacaatatttcaaaaaagaaatttactacccatatcaacaagtatttagaatcagtctggcaaaatcatagtctgtctttccctctccgttcctcctaaggtacctcttttcctgaatctcccactctgatcatcctttagttctttgcatccaggcccttctaggtctcatccgaagatggctatgctttgctaactaagctggtaataagttgtgaggcctgaaaacccatctaaggtgtgagctttatttgcattttgagcaaaattatcatgtagtggttagcactctgcttattaatatggaggctgtgaggcataacatagcacgaagcttgcctgtaggaagctattttcggttgtggagctaagact

SEQ ID NO: 125860 - DNA, 1046 bp, Homo sapiens
tgtttggagaacagttagtgttttgctccagaaagctgcaaatgcatgattaggttattgtgaaatgtaaacagcagatatctgctgacttggcatttcttctaatgtcagaatagttcagagaaccaagtgcatttgccttatctttatttcccacgtaattgacttcaaatataataagtttgaaatggcaccccatcaacaaagacacacaccaggtattcttccagcagagtgtgttttacctcctattggagccgaagcttaaaaaattaattttatggggacctggtttggggaaaaaaatacaatgtgttataattaaaataggtttaaagccttttttacaaccagtgggtacagatgtgtgtaaaacaaacacataatttctcttgtttcttgctgtgcagatagagtgtcttttgttccagcatgtgtattttcctgtgtttttacaaagaaagcattgcttgtgctttccgtgatagcaaggggcttgtatgccaatttgccattgtgccctggtcaagaatctgctctattctgaagtaaactgcccagaggtattagtcaagaacgtggagaagggtggggagtaggaagagatgcttttttctcttcctcttttttttcccctttgactcagaagtgtctaattcacatgatgttaagaggaaatggggggaagcatttagttctgaataggatgcagttcggtgccatgcagttgccacagactataacaagaagatgctcggagctgagggaatcacatttgtaatggggactctttaagaaaatgttctgtgagggtgactggctgagtccctttggaccaaattaagatgcgctctggcagtgcactagcagctgtgagctgacattttcttgtgaacctagtgaaaaatggctccatatctctgtctcgtcctgagggagatggtctttgagtagtcgagccgttcctcagcattgtgatttgctctgatctctgttttctgatggggacggactgacttgtggttcctttcagttcgcctgccttt

SEQ ID NO: 125861 - DNA, 1031 bp, Homo sapiens
tttttgctagaaaatttatcttgttgaaatccatggaatcatgatgaactacccagaaatcttacaacacaacttcctgattttattaataatcaatattcccgaaatgacagaagttttgtaaatgctaagtttgaagggagcagctgtagtttttggcaaagagactataaatatattccatttatatctaagtttccacatatatcatggtaagagaatgcaagaactattaaacaaaaataaacttatttgagtctaaccatgactgtaggtacatctacttatttttcaagattttttttccagaaagtttacaatcaacagggaataatggggataaactttctattttagtttaaaaaaataaagtgacaggaagtagggagagtcaaacttcataaccaataaaaagaataatatcaaatatgagccaggcaaaatttggtatatcatcttgccacctggcccacagaatctggaggcttctattgttgggatcaagctacataggaggatgttgtagctaatatactggactttgaaaactgaaacaaatataacattttttctttccaccaacatatggtatattgatctgcaccaacataacttcaaattcaattttagtttcacaattttcacattactcaaaatatgaaattggaagcttaataggcaagtctggtttgggggatggagtagagaagtcaaagggattatgtgatggagatgagttttatgccaagataaggcttgatataggtgttgaaaggtgacaatttgaccattgaagaaaaggaggggtagggggaaaacaggtgttttttaataagcatgtttattaacaatggaaaagcatgagtaaagagaagtgtgtgtgtgtgtgtgtgtgtgtgtgtgtgtgtgtgtgtgtgtgtgatgaaataggctcaggaaactgttttaaaacaaggaaggctggatgagaggtttttccctgggatatagtagtctaaaagattagaaattatcagccgggcagagtggct

SEQ ID NO: 125862 - DNA, 1035 bp, Homo sapiens
tggtttcaattccaggatcatatttaatatgacttttagttagcaaacaatttcaaactagaaaagaatgattctgtttggcagtttattctgttgtgttttggcttacttttgaacagcaatgatcttaaatgctattagaacaataaatttcctctcctgttcactccatcatcacactcacgtaacaatgaatttgggatggtagagagaggacaagcaacggagacatcagtgaccaaacataattattccaaatgaaagcaattttaagttatgaaaactgatactgacatggttctttatattttttccaaaataaaaaatatataattgtatattatatattagtttactttttgaagactacatatctgtttactttttgaagggaggcataaaaaataaacaaatgggataagatgtgcccagccgttacctcctcactagactaatctagagctgtgagtacctgcctaagaagagatatagagaattcaacgagagttttgaacacaacagacatgaagaaagattggaaaaaagagagttgtgagggaaatgtcgaagaaaatgcaattgtaaaatagaaagcacgggacaatttaataatgtccttcaagtatatgcaaagctgctcaatacagctgctgaccagctgttcctaatcttccttgaaatcataagttggaaggagacaaaaattgtaatttaacagattcatatcaaagaagagataagaacagcagagaaagaacaaattagatttctagatcaccaagtgatcactatgtaaaataatgataaattgcacattttttgctggatgttgcctctgccagtgtgctctccacattgagaatacatgccattgtcccctattccccctttccttagaggataaattgtcactaacaggaggtgacataggctcccattgttttcattcattcatcccttttcttttttttttttttttcattctgataaaccaccactttctcctatgttcctttcattccaaacaaaccaaac

SEQ ID NO: 125863 - DNA, 1057 bp, Homo sapiens
gcaccgctaggtttcaggaagccatttatggtgtgtgtaccagttaggcttagatgggacttcatttaacaggaagagcaaaataaaattagttttaagatggtagaagtttatttgtccctaacagaaaaggaattcataagtaggctgtacaggcctcctatgaccacttaactatgttatcatggctcatattttctgctttgtcattcttagcttgggctttccaaattcaagggttgagatgatgactagagttccacctattatgtcaacattcaaggctgtgctcgctactcccttttaagaatttcccatagacacatacatacttctgcttaaatgtgattggccagacttagttacatgaccatagccaactatgaaggtgaggctgggagcttcttagcagaacacattgtccaggattctattactaaagaagaagtaaaactggatattgaaagacaattagcatgaaaagcaagcatctgaaatagtcatgccatagaaattacagggtgtttattgcattacactgcactatattcactcaagcatttgtatgtgttagtgtcctctttctaggtgactttatgagtctggatgtgtatgaaggaaaaatggtggcaaacatcccaaacttacctgtctgtaaactgagggtagatagtcaaatgcaggaaagtcaggaaagaaagttgaataaatattctaaaactagcctcaaaaatcagagattgactgcagacgctgagataccaatagattcacatctcgctttaagaaccctttcatatagtaaatctgagatacagtggcaaaaaagaggttgcgaatagcagctcccaagcaaaaaagtctatttaatgcatatttataatgcaaatacttaatgggatatggggaaatgatgatgacccagctctcttactgtaattcatatacagagagagtgtaccccatgagcagcagtagtgtgcttgaactgatggtaagtagaattaaagatggaaggaaaacttactggaaaaagagaaaaactacagcaaatttg

SEQ ID NO: 125864 - DNA, 1028 bp, Homo sapiens
ggtgaaatgtataatatgtatttcatcacaattaatattaaatgaaaagagaactttgaaatcagatgattttggatctggggcaaattgctgactgtttctcagtatctgtgtctttatctctaaaacagagatgttaatgtctaattcctagtggtgttgaagattaaaatgataatctgtttacaaataataaatatagtttttattgatgatgtgtacaacgatttcaaaatacttctaaagagactgactaaaaagtaccaatacgtatatttatttttacctttttatgttggttctaggagagtgctataatgttagaagacattatggttattacacgacatacaaattatggcaataatttaattgggcagccatgtaacgcaatcttgtgaatttatctacctgtatttctttttcttttttaattcttatgtttcatgagtttgtttttcaccatttatggttgctcaaatttagaaagcttcaatgatgtataagacattggctctggtatgagagaaaatcattttgagtgccaagaacccccttccttttgtttcagcattatacaggtttgtctatctaccttggcattctatatttattgccattggatagttccaagtttggtttctgactgaaccttcccagagtcgggctgtgtttttgcacactgggaacctggctttattcccttgaacaaaattgttagtagaaaaaccttcctaaataaaatcaagcaagtgaaaaacaaaccacaaaaaaaataccaaacaaaaaatgcaagtttattgatatataccttactgtttgaaattgcatgaagccataaatctgactgaattttattttttgtcagtgtggaatgcttaggacagctttagtttatcacttttttaattgcaaggggaaaatgtatatttctgacattttacatttttttctgatatattgtttgatattataattaaatttcataaagtacctggattttgggggaaaataaaatataaagtatt

SEQ ID NO: 125865 - DNA, 1046 bp, Homo sapiens
gcatgacaccttgaaaaatcatttcgatagatggcatcttttttaaaaaataatttaattaattttttaattttactttaagttctgagatacatgtgcagaatgtgtgggtttgttacatatgtatacatgtgccatggtgatttgctgcacctatcaacccatcatctaggttttaagtcctgcatcttatctactgttccatagaatcttcaagtttagatattcaagcttctatatcttcttagtccctttccttactaacttcacagagtaagtactcggtaaatatttattgaatgaagaatatacttgtttcaaggtgtaaatgaaagtttgtgtccaaaaactgccagttaaagtctagattacgtacaatacatttatatccaacttcaaatcataacaatattttatagtttagtgctttgtaataaagccctgcaatcagacaatagtaaagttggtggaagtaaagattttttttccttttttaggactaaaactaactgcagaaccatccaggcatacaggttgaagtgccctaattttcaaaagtacaattatgtcatttgaataggggcaaaggtaggaaggcagttcaaatcaaggtacagaatagatttactacatttgcagctcaagatatcactcatgtaaactcctgatatttgaatctgtagtgcaaaagtaatttctttgcaaagagcaaattttaaggggaactggcttcaaaactaaagtgtaaaaagttcatctctgacattgtgcatccctgattaatttgacatatttgtagagataggatataaatgcccaatgttctttgatgattctagttatatatgtagtaacttacccaaatcagtacacctcaacatataaataaccaatatcttcgctttaactcctcaggagagaagataagtcagaagctgtgagaaaatgagaaatttcttaatttcataatttctattagagatgcagaaaatcatttttacctttagattggcatagtgtaatatattacaatgacaattttttat

SEQ ID NO: 125866 - DNA, 1061 bp, Homo sapiens
tctacattgctctccctcctactgctcctttcaaagataccttcaaaggaaagtagatccacatttattaagagtcatactttcttcttgactgacttcaggcttagaataatagagtcagatctctatactcctttgtatctgaaaaggtaaaaacaaattatgtcaaattttctgaaaataaagattgactttttttctgtagaaatgtgaggtatatgaatagtgttgtttaataaacaaaacattgtttaaacattttgatcagtttattattttagaaataaagtaccattaatgttttgaacaaggttaatgagacggttctcttggggcataatttataagtgataccactgtagttttctggtacatgtagataatttaaatggtatgacctcgaatgttaaatatgattatttgctttttatctgtactgtccctattcttaacatttacactgtttaatcttttggcatgtttattatgctcactttccttttcattgcttgtaactcacaaattcactttcataatgagaaaagcatattcacatttgacatctctgattgattatagtttaattaatgactttcaaatacatacagaccctggcagaatcattttcctcagaaggtggggtagagcaatggttaaaggtacagtctcctaagtagaccacctagttttaattcctgagtatgtcagttagtgctagctatatgtacaagataactaacctggggtagtaatggcaccttaagaatattagataagttatgtatttaaagtgtgtagtgtctggcaggtgataagcattatgtagattttagtaaatgctattgcaaacatattggtcattttgagctagtgacattatgaggtgtttttaattttcaagatattttactcaattcaaattaactgaaaaatatgaaatgattgacattaatatagagtattttgcaagttgtattttaaggtttttttgcagaatgaaataaatattttatttgaaaagaatttatttgaagaataatatcaataaatacaatggaaaa

SEQ ID NO: 125867 - DNA, 1115 bp, Homo sapiens
aaatagcgggacctggacttgtggcgcgcctggtgccacatctcgggctctgcgagcgtcctggcgcgggatcctgccgtgagaaggagttggggcgggggacccggcggggcattgcgggagaaggcctgggatccctgggagccttgtagcgtgggggagttcactgtgtagagaggtttcatgtcttcatctatatagtcacttatttgtcttaaagttctcgaaattccctcttagagaaggagaaagttagagaactggaggctgcgtaccctgattacgcagaagggaagcagcctcgcattccccggggcaggcccccgcccgcgcgtcccgccagtaggggaatttagcggacggctgcggttgtctggtgaaaggctatccaaggataaggggcttcacttttcccaagtaggggaaagagaaggggtctacagggctaggggtggagggagcggatgcagtgagcagcctccgcagagaaattgacaatttaaccagggacctgcggcagagacaaggcggagacactcccttgcccaggaaagccgccagagtccggcttgtacctggggaagaatccttaagacggtctggcccaacactcctttgctcacagagaaaggggagaagactcccgagggtgaaaatggtacattcggagctggaactcagctcgctgaccccaagcagtgttcccttcttttcgccaggtttgcatccaagagaggggaggacaggggcaaaaggatgcagggaggctgctgatttccactgaagagctaatttcctgtgagacattaacagtgatttaagaaaaagattcctgtaactggtaaatgaatttcatttgcttaacttttagatgatatgtttcaggcaaaaaaaaagttgtgcacccacttatctctttaaagcggaggatgaaaagcattgaataggtaggattcttaatgtctgagatgaaggcgatgtaggaggcaaacaatacggttaaaaatgttgagtcgacccaaacagaaagaccaggtttcaatccagactctgcggcttactgagaatatgatcttgagtaaactgcttgaccttcctgagcctcagctttctta

SEQ ID NO: 125868 - DNA, 1053 bp, Homo sapiens
tgtttttagtagagacggggtttcaccatgttggtcaggctggtcttgaactcctgacctcagataatccacctgcctcggcctcccaaagttctgggattacagacgtgaaccacggtgcccggcctagttcatgttctttaaggacaattatgaatatttttatgcactgttaattttcattaagatattgatcaattaatagctatatatgttctataaattaatcctatctagtttcaatcttaaattgtttgcatataccaatctagtttattgtttgcatatattttatagtgtagagattaggcattttaataaaattttaaaatttccaggacatactgttaatgactatgcttcctactataggccataattaatttttttctattgtcaacaatattttggtagggatgatcaggaaataaggaaatgtttccttcatttgttaacaataggtgtttggggattttaaaatgaaaattgaagaagtaaaagacaccatatatttagtttgtttgatttcgtggcttcaagagttcaataatttattgaaatattttacagaccaaagaacaacagatatattacgtttataagcccccacatattttaaaggataatggtttatatatgaaaattccctgaacctacacttcatcaggaaaagctaaataaaagaagtttacatttcctaggactaatggagatttatttcccagtcctcttctctggagacaaatgtaggtctctcttgaaaagcagaaagttttgcatatgaggtatgatttagtgggctagaaacatcttttccaccctccccaaaatgtttcactatgttttatcatactatctgataattttgcactaaagttttctttctgtgttaagaaaatgcaaatatctctgaatgggtctctttgctttagtcatactcatatggctactactgaacaaaatatgttcattacaggatgaagggaatgttgccagccagcaaatccctagagtttgcactacaccaaacgttgcttagcaatttccacgatt

SEQ ID NO: 125869 - DNA, 1055 bp, Homo sapiens
ttgaaagtgcaaaataattgtaattttacattctccagtccctcataatttatgtgactatcatggtaacactaaaagcaccagtttcttacatgtcatattgaacccatggtgttactcaagtcgtaatgtgaaagaataaagcttttctttgcctcttctttattgacatttttcctgatcatccagtctaaattagtcttccttcgtctcccttcctactaataccatattgaaatcatcttgtacttttattttttattgtctgttgcctttctctatggcattggccccatcagagcatgaatcttgtcagacttatcatctgatgggatggcacatagtagctgtttcataattgttggttaaattaatggataaattgttgaacattaattttgactagttttcttttaaagggaaaaattggtacatattctttgtgccttgggtattttgagtgaattttagcccaatatatatcttgctggtttagagtaatgaaaacctactacattattcctaacacatttctaaaaagtaaactaattttggggaccatattcttgttgcatgatcaaaatcatgattcttggtaaataagtggtagagtgaaatgtgattttcatatttgaatattctgggaactttgtttttaacagtattgctgccttgctgtttcacatgttattttgctgctttcttaaaatgcatacactattgcaatgtggcatttaatatatactcacaactatatatttcacacaggatgatgtgactctggtaaacctcagctttcaggagccagcaggctgctcagaggctcaccagcagactgttctttatgtcttgcttgttcctatgtggtgaggatgatcactagtagcatttgtaagatgtgttccatgcttttcctgtcaaattacgcattagccttaccagatccttaagagaatttacagtctacttggggaaatacaatatatacataaagataagtcctcataatgtcaaatggggaagaaaaaataaaatagatactaggtaggggaggt

SEQ ID NO: 125870 - DNA, 1306 bp, Homo sapiens
ttgagtactcacattttactttttaatgagttgtcttcagaattggcagaagttgactctagactttacctaattttatcactgcctcttttaatttggggcatttatccatctctgctcttctctaacatcctccatgatttctcaaatttcctttgatgagtttacaaagataccagtaattggagaagcaaaaatgatgatttaataatagctgattgacatttcagagcattagtataccacttacttctttactcgacctttttaatagcaatggagaggcattggaaaaaaggatatatgaaaagttagaaaatacgcctatgagaaaaagctaaagatgacattatttgtctccaaaaaagagaaagctcagactttatatgtgaggatgtattgtagtagccagctcttttgtatgttccaccaagaccgaactgaagggaattgatttaggctgcattattaagggatgtatattgagtattaataggagttttatgattctgaatattgttcatctctggagggactttttggtagaagttgtgattcctctcccctcttaaatctctaaaaataacatcaattttcatctctcagtaatgttgtacagtgctcccaaaggctaaaagagatattaggtgacctttcaagtcctttcttgctcagtgactttgtcttttcacagatctcactccacagctagagatctgttgcattagattcacttttgttctttctttgtcatttaaagggctgttaacattccatcatgaatctgctaatggaagggtgaccctgcagtttaatatactatcctagtgtaaaaataaaactccactttgtatgtttatgtaaaatacagatgctttatgtggtatttcagttatttaaaaaacatgagatatttgataaattatttttaaagacagtctttattttcagtttaccttcagagttttggcagaatgttttctctttctcttgtgaaattgaacatactgtgcatttatttttattttttcattcaagcactttatttctagttcttttagttaacatattctgtaactagaagtagtttttagtataatagtttttaaaaactagattaccaaagaacaaatgctatttgagaatataatctctcaaaatttctgatttggaaataaatcatagataaaaaatcaaggttaatatgtaaaatactttgatagcagttactgtaccatttggacaatattatctcgtttgatctttgttacttttacttcgttgagaactaaatacagagagggta

SEQ ID NO: 125871 - DNA, 1049 bp, Homo sapiens
gggattttgtgtggggttttttggtcttatttatttaagttttttttttaaggagggataatatgtattttgttattaagtctgacacttgatggacttcttaaagttaaaaaatttaaataactaaaatttatgatgtagctaaaaattgacaggccaggcttttaagtgacagtcgaacactgattatttgttaaattgaccaaggcattaatacagggcaaaccatcagagttttacggctttatattaaacagttgactcaacagttgagttttacagttctagtaagcagtcggcaaagctttgagctttacggtttatgttaaacagttggctaaatattggatcacatgagattattcacatttcatatcagaatagattattataatataatctgcttataattcttgtaaaattattatataatctagagtagctaaaaatcaacaatgctactgcaggtaatttatttgttagatgtctttgcttatcctataagcatgtacttatctttgaaaaatcactttctgacattctctactatgtatatgattacataaaaataaaactcaatctgagtaggaatttattttaaggtattctattgaatgggatttattcaagatgttagtctctatcgcagttgttataatttctcatcatggttacatatgagaccaggtggatctgtgtcttcactacacacccatagcaaatggtctaaccaatctttcccttgtttctggtcttgaaaacagagaatggtagatacttgcagacaggaaggatgtgcacagatgtcttactaagtctcttaaatcctcacaattaaaaaacagaatcaaaagaatttataactgtaagggagccaagctctccaaatcatcagaatcattaataccattatatactttctactaaatgtgtgtgtgcatttgaaacttcaaatgcccactagataattctccgattatttaataatgtaattcataaagccatcacaataaattctgtcactagaatcaattaaacatcatatttta

SEQ ID NO: 125872 - DNA, 1368 bp, Homo sapiens
gccctatctgactctaattacttgccaaaggtctcgcttcaaaataacattatattggagattagggtttcaacatttgaattttgggggtacgaaaacagtccatagcacttaccatttttaatggctgtcctataggcgagagaagaagcctttcttaactagaacaccctctttataagcattctatctttggtgaagttgtaatgaaatttccactcaatggttttggaaattcaatcaacacactttgcatttatagataggagagctaagttccaatcttagttccaggttttgtcaatatgcaaacaggtgccactgaggaagtcttcagctttttaatgctttagtttcctcttctacaaaatgaggatacttagctggatgatttctaagaaattcctcacttttgaagctctgattatatgaatgaaaaatgtagagatattataaacaggcaagtgaaatattttgctttatcagtgcagttacttcgcttttaagtcttatagaaataattttagcaacacatattttttaaaactacatttctgagacaatattttcaaaggaattttgaaaaaagatcttaaagtgtagagatagagatgaaggttttttcacttgtagtaattactctcgaaaatactagaaactctcctcttgccaaagagccaggcattctgcagactacaacatagcccagtctgcactgtgaaagaatcccagtaagcacagttctggtaggaggtttgtatttctctttgtaatgtggctctggagatcttataggattctaagactgagaaataattgccttttaatgccagtgcaatctctggcaggaatgccaagcagagaaaacagcacagggcaatttgataaggatgaatatcctctcagacagggacatataatcacttgagctttccttccccccaaataacttctagtcaaagtataaaactcgtctaaatattactgaatcttggtaagtcaacaattcagactcatacaagaaacaaatgaaatctaagttttctacaatgtttttctactgcatgtattctcaaactgtgcatcagagaaataaaaattttccttattggaagtccctcagcatacaagcagcaagtccagacactttgtgcatataagccaccatgccccctaagatgcctgtgtcatgctttccagtgcataccccataagcatttatttaataatcaaaactgacaaagatattaagattccttagtggctttgctaaaggttttcacatgaatagggagagtacaaaaatatcaagtgaaatatgagatgccagcattaatctaaactgtccactttgtcagtaaatgtcta

SEQ ID NO: 125873 - DNA, 1059 bp, Homo sapiens
atcagctgcatgagcttggataaattaaaatattttccaggcatcatatgttatgtgagaattaggagagtaaaaacccaaaggggttattatgtatgcaaagttattatatatgtgatatataataaatattcaatttatgtttactactgctctggtttccataggaaaatttacttctcagagaaaaaaaaatcatacaataaaatcccagggaatgctattgtgagttcgaattgtttgggagcctcctggagcaaccagattatacagaccatttccatacttctgagaaggaagaaataatcatttctacctcatgaaaatatgctaaatatgctgctaaatattttaaagatggtttcatcttaatagaatgataatcaggtttatttttcactagtaaaaaacactgttgaatatattttataaaatcattcacaataaaaatattattgtaccttcatttatagaaaattatttttgtgtccctataagttcataatgtaccgagtgccttatgtctctatcagttgctgtcaacctgaccaactttgttccaacagacagattttcataaatattcataggtgcatctggtatatatctgtgggacaaaatgatttttttttatcagtcagtataaacaaatgtattttttcatttatgtcacacagcaaatattttacatttcatataatatgtattgtgtaacagtttcaagtctggccttcttaatgttttttcattgtacattattaaatctattagagaatgttcacattttataaaatgaacttaaattttcttttacctgtatccttttttcaagtctttctgctgattggtaaatgctactttattccacattacaaaatactacagacgtttttgcaatgattttcattatttttgtgtttggtcatatgtccatatcagcaagtgttttttgcccaaattctcttaaatacctacattgactttgcaatatgaacatatcaatgtacattttctagaatattttcattattaaaaataaataccagaaaaatatgaagc

SEQ ID NO: 125874 - DNA, 1037 bp, Homo sapiens
cattacatttagtatttttctgagttacattgacaagaacttaaattatagcctgttattaatattgatttccaacgactgaacagtacaacagatcaataaaaaagtttatacactgctttaactaatttttgttatactcatgtggcttagtgtagttagtcactaaaacagagttcaagtgagcttggcaatggtgttgagtaacaagaaagaattttgcattaatgatttctttttattttcctcatttaaacaaccagcattactgccaaacaccaaccgtggtccatatttgtaacaggtttttaacatgacatagttagcaagtttgattgaagagatttttaggtcctgggcctataagattttagtatgatcttttttcatgtttctaatgcttgaggtgttactgcttaacttgggaaaaaaaaaaacaaaaaacagtgttcctgccatttgtaagttttcctataatattccttttattaactttaaaactggacttatcgggttcaaataggcagtatcccttttaagtgacctttgcaacccaagtgttacttgcttatttgatgctctcttgtattttaaatctcatttaaatctttgtctgtgaccaacaaagcttaagattttgtcttcatttaaaactctgaatctattccattgatcatgttagacgttcaaatgtttaatggtatagtctgacctagtgaaacaaaatggatgttgttactttttttaaagaatagaatgaaataactatttcacttgcccaaaattttaaatattttttcatctaaacttgtattgtttcccatagcagaatgtcaatattcacagtacatttctgtaaagagcaaaccaatataatgttttgagtgttgaaaaaaattccagatttttgaagaattagacaactcttcatctaccttatttctagttcacacagttatctcaaattccactgaaactaatgggatactgtcttgtgtagatgccagttgagtttataatgtgacctagtaaagctg

SEQ ID NO: 125875 - DNA, 1014 bp, Homo sapiens
ttaccatattggacagtgcgaacaacttttccatcttcacagaaagtttgcttaatagcactgttccagacttttctctgcccttaggttgggcaagatgcctagacatttttgtattccctgttgtgttatctgtaaaataaggcaactttggcataagcatcacaattctttgtatgtgtaaagaaaaacttttttctatgtacatcaacaactaaattgtgcttattttgcaatgaggattaatactttaaaatggtcacacataaaacatatattgcaatttttttattcatttgacataggtaatacgttcatgctaataaatgaagcatttttttcttctaaaatcatactcctattgtgctgggaatggtttctgtttcagatgtcatattttgtctttcattttaatatgtaagaatctttgaaagatttccatttattttggaaaagatactcattttctatgataccatatttattttgcagaatctttcatggagaaaagcttatgaacaccaacttaatattcataatggttgagagcaaagggacatgtccatgtgacacacgactgctcatacaagcggagcagacttgtatcctttgacatcagagctatctggaaaggaaaaccatcttaatgcattttgaatcttgtcacattgtttatattcataaagagaaaactattagactgctctgatcacctcgcaaaggcagaatcgattcctcactcaaaatttggttggaatgtcaagaataattatgctacacatgccccagaaaaggataattcacaatttagttctttaaatccctatgtacttgaattgtgttggatgagagtaatgatgtataagttatctctctcacatgttttgggaaatacattgcattgtatttatttttaatcatgtgaaaaaaactaacatgagattccttaacaagtctcttttagctgacggtccaaatccttgtgacatggttaagcaacccagataccgaaaa

SEQ ID NO: 125876 - DNA, 1038 bp, Homo sapiens
aatcattcttttttatatctgtatctatttattttgttttacctaaagggattggaggcaattagaacatttactttccaaatgaactgttttttaaatgattcagtttctaaaacaatatagtaaaaaagagtgtctagaatgaattaaaatgtactccaaaatagggattacattgatcctttaatcccaggtgtaagatatattaacttaaaataattaaaagcaacaaaaatgtttccagcctatctcaccaccatgttgtatagtaataggatgttaagaacatatattctttatctgaaaaagtcaaattttgtcgtaaatgtgcaatttcagagggtacctgttagggtatttcagagcttaatgggtttagaggaacaaggagaatgggaagaaggcagaggtttttgtttaagaatacataataattggcctttgatcctcatcacctgtttcctcaattatctttaaacttgggctaatatgcacttcagttattctagaaatgacaacctattatctacttaggtattggttctttgaccaataccagtagatttcaaaaacattcttgggattgtactgctctgtgatgctcattccattccttgctcctcgatatgcggcactgaatttttcatagtcttatttactccaagattatcctatgttttgatatttgtgatagaaaagaatgaaaatagcttttcttataacaaatgaaagtgaaagtagacagtaactttttgttgaatgtttttacttgataatttcagtggtagttctgtttctatatatataaattttatatacatatataaaattttatgtgtgtatacattaaattgtcataaaattatgatggttgggaatcgccatgctaccatacagaaataaacaaaaacacaaaagaaggactatttcctgtttcttaacatagcttatttcttattttgataaagtttacaaaataatttggctcatttagaattgatttttctactactaaatccattcatttcctgaaaaact

SEQ ID NO: 125877 - DNA, 1062 bp, Homo sapiens
aaatattcacagaattgaagaatttcaatttggagaaatggaagaattttccaactgaagaaattttcaatctgtctcatcctttcaaattcatatagtggtgtacagaacttccattgcaatatttaagtacggaagtctctttaactacatattaatatacagttaatatgtaggctgtggtgaactcaactatttctctcctaataaaaatcaaaccaactccccagaacatacacataagcttttatgggagcctatgttattatcataggaacttatctcctttagtattcctaggattgcatgtagaatagacagaagaggagagcatattgcaaaacaccagaatggctgttttaattattttacttttttctatcaactgattcctatctctaatttctaggcatttctttatacatgcacaatctttatgtgtatacacaagttactctttttcctccctcttccttattgccacctttcaatttttggattaacttgtcaaaaggtgcaaaaagagaggaaatcttgaaggtctgtctcttgagagatgattttatgataaaacaaagtatcagggcatcgtatgagaatgcattctgtgtctttgttgcttagatgaacaaattctgagaaaaactgggttcttttgacccttacaatgtgatagttggctctcctacagttataaggacacttttggggtgttttacgtgtctcacaaatggcctctatgctcaacctcttttccgcatgcacccagtgataatacacagtgtgagcaggcgaatgttcttttctcgagttcatgtcactctttgttgacaaaacttttgtctccttccattttcatcatcaagtttaatttgaacttccaagtctgatagtcccttcacacatttctaacccaatgtatctgtcctgtcatttctgccacttccatcaccatacatatcactgttctctgacaaggccccaactttcccacctttgcgtttcctcacacattcgctttccaagtctccaactttgggccagattaaatctatttccatt

SEQ ID NO: 125878 - DNA, 1087 bp, Homo sapiens
agtggtactataatgaggactcagcatcacactattcccgtgggttggttatttaccagtggcagtagttgcatcaaactggaggagcttttaggcccatgtgtatcctctctctctactatcaagctcctccattcatgggcctattttgcaagcagtacagttgacacatacagagctggatgatctccagtggacagatcatcttatctacccaattgtttagtgccttttctgtgacgaatgttctctagcacacattgatgcaaaacaaagacatctttatgcttcatgcctacctccataggtccatcctcatgttgcttctccaaaactatgtatgaggaacatcttctaatcttgatccttttaggactttggacaaccagccatgccatttataactgtataggagtccatgagttttctaattgtaggttacttattttccacaacatattgatggccagttatattttgcctcaataaccctaaacatccattccctggcatattatctcagtatcttctggttcatattaggcagatcctgcaactcttttgttaaatatcttcttttgttttcttggagtagagactgtacttttcaaggtgggccgtgttgatacttggccttttttttttttttttttttttaacttttgagtaggtttattgtcatgtaaccttttgggattctttcctttttttaaaaaattatatatatatatatatacacacacacacatatttattatactttaacttctagggtacatgggcacaatgtgcaggtttgttacatatgtatacatgtgccatgttggtgtgctgcacccattaactcgtcatttagcattaggtatatctcctaatgctatccctcccccctccccccaccctacaacaggacctggtgtgtgatgttccccttcctgtgtccaaatgttctcattgttcaattcccacctatgagtgagaacatgcagtgtttggttttttgtccttgcgatagtttgctgagaatgatggtttccatcttcatccatgtccctacaaaggacatgaactcatcattttttatggc

SEQ ID NO: 125879 - DNA, 1036 bp, Homo sapiens
cctccaatctaaaccataccaaacttgtttcatgaacaacagtcaaataattccaaaaaatatttttttatttgatagtttcattgttaccatggtagaaatcaaaacaggctttcaaccaattgttctaaattttacaggatgctgactcattcttgttaaaattgctgattagtctaacaggacatgacttacatgagctgccatatatgaatatcctcaccgtgacaaatttcctaacatatctagtgctcagatgaagagctgaaaaatccactacacttccaacccactggtatttttcagggtaattgttttctatgcttggtatttgtcacaagtgtgaatctggatcacaatagaatcataaaagagttttcatcagtaggaccttcttaagttttgtgtttattgattttttaaaaccagataatttgcaaaaaaaagggttctttaattctggaaagtacatcattatatataatatatagagttgtatgttaaatgactaaaaaagtgaatgtttttaaagaactttcagtaaaatgttgtcatggttctgatattagcagagtagcttttccttttttcttttaaagagctatttaaattataaagtcttgattctgactcatgcaaccagaaatctgattaagtgctaagaaagggcactttttaaaaagtacaattgcttctgtaacaaagtgattgtctattgtaataaagtgattagcttacataattaacattgtttctcattaggtgcgagcagggaaatggtaagaacatcataagacattgaggacaagcctgagttagagaatataaattttaagctaggctaatttgaccataattaataagtttggcacaaagagaaacaattctacttctgaggtaaagatggcctttactttcactatctttttaaaataacatttatgtaatacatgcatattcatagagaacaatatactattgactttctgataagagaatattgactacttatcaacccaaatgccaaagatacagt

SEQ ID NO: 125880 - DNA, 1026 bp, Homo sapiens
aaaaaatttttttaaaaatgtttacataggcatacatatatcttagtatgctacaatttacatacacaaattaatttgtgtaaacaatgtttttctttccaatttaaaataaactatttgtaaatagctacagataattttaatagtctcagagaatacaacttaacattttgagaatcaataaaatatttaatatgttttcagaagtcataggcattctttgggatatgtcataattaaaagaagctctgtctttggattatttatttagtcccattcatcttaatattggcatcttcatctttgctgaaatctcatcagtaagactctaacctttcctggcctgtactcctttaaaattcatgtccaatgttataagctgcatgaataaatgacaggaatgaaatcagaaatgtccacaagatctggaaaatttaataattaccagtattcttcatgtggtgtgtgggaacatatccgatttagaggattgttctcggcttctgagtttaatgaatatgaaaatgcactttaattgaaggcttaactgaaggaaacagcctttttcattttaagacagttgtgtagctacactctcataagaaacctcgtgttctaatttcacaaagatgattactttttaaagtcccttgaattgaaatgtgattatttctgctcaatgatatatttaaagttttagagtactgtatttaattagagccccatctcaaaatctccatttttgagaatttcactggttgctccttttcttttagaggacacccaaaccatacttaattttcagatctaatttatctgcttagaattatacaagacaagcatataacttagtaaaaacaagggctgaatattctgagttaatttgtttttaatctcagaactttattaatttttgaatcactttagactcaatgtagggctgtcttcatagaatattgtataattattttaaatggaaatttgtattgatagttctttgtataattatatttctataagaataac

SEQ ID NO: 125881 - DNA, 1044 bp, Homo sapiens
aaaaagacatgaataattttgatccacatatcaataaaatcacattataagccattttcatcaaactgcccacaggataagcatgaagagaacgttgtagaaatttagatcatgggattctctggtgtaggggctttatatggcctacttgattttgtttcttttcacagtattctgaaaatgtcaaggatatttcattgatgattataaattatcttgagccatgctctgttgactcacagtaaaaacagcatgacaagaaaagccaaggtctagctacaaaagcattgcttggccatgttgcaagctttgtgaatttagaaagacaggcaattgtaccataattcatagctatggctgagagagccatggagccgtatcctccaacagctttacattcctttagaagatgtaagattcaaggctacttgttgagcaaattaaattcatcaaaatatttttatttcaaagaatataaaacatctattgtgtggtttgataggaaatttacttaattatgttgatgctagtcagtttggtaatgtggaaactaaaacatttaagcaactttcatgacagattaataatgcatttataaacaggggcctttgagaaaaagttcaaccacatttaactcaagaaaaagttaaatctactcagcttttcatttcaatttacttgttcacaaagaaaaagatttaaaaaaacgtttaatatcttgattatacttgatattatgcacattgatctctcttattaaaagaaaataaatttatttactattatactaaaattatagttcttatttatatacttttaaagatatacagtcaaataaaatggggaggatatataattttcttttttaaaaataagtggactaacaatatattacttgcgaatgtagagcaaaagttgattacacagagagaactatttgagttgcttcaagattgatttatcacgttctcccttggaaaagactgatctatagcagtagtttaactgctttcaggctcccttggagccgtatttgtggcccac

SEQ ID NO: 125882 - DNA, 1144 bp, Homo sapiens
tgttttatactgcaaacctccaaaagttatgtggacctctgcatttttcacattttcacctttactcactggccagcccactccaatttgactttaaatttcatctatggtgaagctcttctttgtagttaacaactacctctatgtcatcaaatcgaatgagcatgttctatttatcttcacacttcatgtcttttcatcattttagtgcaccacttactgtatttcctttcttcaaacacttctttagttatcaggaaacctcactttccctgatttcctacttttcactacccattccttttcagtctttattggtaccttttcctttacagtacctctgtgtctttaatgttgtctaaatttagggcacagtctttgccctctcatctttaatgcccatattcctccaaggacacttgatccatattgttggatttacatgtaataacacccaaacctcttttctgagctttaggctcatttatccgatgacatgcttgctgttttcatttacctgtctcactggcatgtcaagactaacattcgcaagtgaactattatttctattacttttctccatcagcatcctgatcttctgttaagttttgcatctcaaaggatcactttctcctccagttaatatagctcaaattcaggagtaatcttaattcctttctctgccataactccacatgtagttaatctgcaaattttgtcaattccaactccaaaatttaccaagcaagcattcatttctcttcatctccactaacaacatttttccccagaaaacattcatatcctgcaggcagcataatcttgagattattaatcaaattatgaatcggaatccactccactattctttggtatccacaaaattgttttatagaattctaataatgaggttcagtacatgctaccccaaaatattttaagctgaaggaatcaaagaaaaccatgggggcagggaggtctctttgaccttccctcatgtctttctttcctgaagccataaaaccctcagagaaaggaaggaaaggaacatcctcatctctgaagatacagggatacaaagaaaaatctcaacaaacaggtcttgctgagtttcccccagcttatctccatcagatgaagcttt

SEQ ID NO: 125883 - DNA, 1067 bp, Homo sapiens
aatgggatgtggggatttcttgaatgaaatccaaatgtgttctttgttaaataaatagaaggacaaaaattatactgacaccaaaaaaaaaaaaaaaaaaaaagaaaggaaaaattgttaatatgcatagattagatttggccccagagatcttacatcaaatatgactgggtttgcttgctttaggaaaattgtaaggtaatatttagaagaaaattatacagtgagattcagcatttcaatctgagaaatagtgctttggttctaatgagcagatgctcaactgtggattgagagacctgatgcaattaaaagatgtttttaggtgggaagagatcattcagccatgtatcgcctgtcagatctaccttggccagctttctgtgtgacagatgcagttcgattttcctaaatctattcagccagccattcatttggcagcagttcctccaacaataacttacaagacctgggtttggacgaagacttatgtgttcttttttaatataacagaaacctgatgtgtcattgcagtgatatgaacatgcctgatattatgatgaaccccagtgactttttaggagacagaacagagtctgaaatgggaaacaatggggagatatctgattaggggactctattataatctaggtatatattttcatctgtaagtgtgtatttgtaaatatgatagatatagagaaagtaaataatcataaatggtgtatcctagatgacactaatattatttttaaaaatcgcaaatgaggaagcaggtgcatcttgagtaggaaagtgcagctgtgagacacaaagtcatttactgtaggcacaatttgattcaactgatatgctttccctggcccattcttttccttttctttcttcatttctcttcaggtcagaggctggcagcataattaaaatttgaattatttatgaagagccattaaagtgggtggcttgcagattagtcagagacagcagagctgacactaagctgcttttcttttactctctcacaataaacaataccttcactatatgccttgaaaataagcatatga

SEQ ID NO: 125884 - DNA, 1015 bp, Homo sapiens
atctgatttcaaactttctctcaaccactacattgcattcccctctcacgcagagctgctcaggcaccagattatttaaaataacatttataataaatatggccttacttggagggccattaaaagatgttgctaacaagttcatactttcactttctctaggctagtgattgttacctggaagacactctctagataaaggaatggcttttaaaactcttgcttctctcaaagaatatataaagtattaaaggaataaacattttgttttccagaataatacatgtgaaaaaatatcttcaaagtgaaataggcaaatgaatatcaaagaagcttattttagaatgtaatcctatgagagagagggcagtctcgaaagattaaaaaagattccttttatgattatgaatttgaaacagctggaatgaatgcagtcatgaggatcatttctgaaagtgagggatatagaaagttaaaagactcatcgcttggtactgagatcacctgcttcgtaacagacagaaatagaagagtacaagtgttaagaattcattctgccttccccgtgcttttgtcgctttatttttagagctctgctagcagcagttgggagcaggatttgcccttacgcgcctgctcagtcagactcgccttctctcttgcagtctgcctcccttgacaggtgtgagggacttcctaagtgtcgcaagccagccacctggcatcagccacccctgatgtagcgtgcaccttcagaccactgagctcatgaaagaggtaatttttctactgcctgttaacatgcgttagttttttcttaaggctaagccaatcagaatgaaagatgttggatagatagcagtacagaagtgataaacaatatttaataaaaatggattaggtaaaccgctatgatggattgattcataaggaaaggatgaaaaggtatattttagggcctcccctacacaacctaagcagatattgtaaaagtctcaaatcacacaaacatacc

SEQ ID NO: 125885 - DNA, 1040 bp, Homo sapiens
gggtttttttttgtttttttttagatggagtttcactcttgtcgcccaggctagagtgcagtggcgtgatctcagctcattgcaatgcctcctgggttcaagtgattctcctgccccagcctcccaagtagcagggaccacaggcacccaccaccatgcccagctaatttttgtgtttttagtagagacggggtttcatcatgttggccaggctggtctggaactcctgacctcaggtgatccgcccatctcggcctcccaaagtgctgggattacagatgtgagccaccatgccaggccattttcaggtatttttatgcaacttgcagacttcatgcctagggattttttctagcattcttggacaaagagatttgtatctgatgtgtcttcctgtactcttctgtggtgcaaccacaggggatctgctccaggtttggaaaatgtgtaatgggtgaataggataattcttgtcagacagatttcccaagaaataaagagaaacgttaggcttttaaagacttgtttaataaaaaagggagctaatttagaaagttgtttttcttcttcccctaaataaggtaatgtgagaatagttccttctattttgggacattttaagttaagataatatgaatttgttaatatgtgcattgtcagaatgataatgatgtgattataagtatgaatgagtagctataaccagtgcactaaacagtcaattttacggaggtgtccacttctagggtgtatggacatgtagaatcaaagtccaggctcactttgagctgttagtgctggctgttgagtgttaagttcaacttcttgaagaagatatttttacaataaacattctggacacatacacctccttcgaatggatcagaatcacttgtagcctgaatcaatgtggtgtgccttctctttcaggacttgacactatgtttaccctggcctccctggatggaatgctctatacatgcttttaatactcactgctgctcttgcttcccacaaattagtatgcaatagattattgt

SEQ ID NO: 125886 - DNA, 1096 bp, Homo sapiens
tctgacttgcctaagaagccagacggagcctctcgcttccacaagtctctctgcctgccattccccgattcctgcagccacccccaccctccagcgccgtcacccctcctccgcccccgcccccgcctccgccttcgcctcggcaatcgggggaataaatcagggaggaaaccgagagggagagcgagagcgcgcgagcgccggcgggctcgccgaggtctgtttccaaagtcgcccttgatggcggcggaggcaaggcggccgcggcgcggagcagccgacgcacgctagtgggtccgcccgccaccgccccttcctcggcgtccgctcccgcccttgccgtcccccgcgcggctccgcgcctcgggccccgggcgcagccagccctccagacgcccgcggtcccggcggcgtgtgctgctcttcctccgcccgcggtttccagcgccgctccttcccccgcttgggcagggagggggcattgatcttcgatcgcgaagatggctgctggctgcctgctggccttgactctgacacttttccaatctttgctcatcggcccctcgtcggaggagccgttcccttcggccgtcacgtaagtcggcgggccgggcagggagcgccggccgaggggcgccgcgggagttgggggtgggggtcggttcccgagtcgcggggcttttccgcccgtgggggtggggagcgagcggccggggagccaggctcggatgcggagacgccgggcaggcggtgcgcgccgctcgccgctggaatgcgtcccgaaccggcgtctcgggcgcctccacggggccgggcactgggggccgactgtcccgggaagcgcccgccgacgactcgcggcgtctcagcccgtctctaacgggattctctagacttcagagtgcagccgtactggggaaaaaagtttccagccagctcacccgctctgattcaacccagttcaataaaaagttatgttttggttgggtaatttacaaacaggtaatttcaggcttgccgaggtagcgtggacttcccccgcacttggcctcggagatgctctttaattgctgtagtgcccaaactcgttttatcc

SEQ ID NO: 125887 - DNA, 1062 bp, Homo sapiens
acacatagaatgagacatacaatgaactgtagccataaagtggcttttggcatctataccaatccttcaaggaaatactggactggattgttttagtggtcacggtgattagaaatcgaatcttatcatgataatcttctaacaggttggtccacaaatcatggctaattgtattcccttattcacactaagtatgtttaaaaagcatatctttgcaacagtcatatttgagtataagaaatattactttttctgtaaatcaaatgtaatcaagtccaatctttctttcatctgttggtaggaaattgaattgcattcatcatttggtgtttcctgcaccacatgccttgaggaacttcccagtgagggtattacacattctagaacactggagtttgggcctctgtacatcagtccacgccactaagagtgcaatgtcaaagctagcacactttcctgataatgagtagctcccttaactgtgcccaagttttcacaagagtagttttgcctacattgagagtcacagaatctagtgttcaactttctaaaggcacctcttggcaatttttattgaaaaaatatgccagacatcttccataggcaatataaacaagcaggatgctggtccctacttcctttggaacctccaaccaccatttcctccctagcactgaatctgcacctcctattctttcatccttcttacattatttttcttcccagtaagattcagcataatttttcatcaatctccctggagaaatacgacattgtcttctcttctgggagtgagatggggaaaagggataagagacccaatcaaattttattcatttctgtcactgtttactcaccataagtgatatatcccacagcaactttctcttcgttcaataatgtcttcagtttttgcatgtccaagcctccaaataatatcagcatgtaggcaattaataaaatttccaaattatcatattatgttgcaatttaaatggcattacaaataatatatgttatttttgctaagtttcacatatttgaacatagtttgccttcagg

SEQ ID NO: 125888 - DNA, 1032 bp, Homo sapiens
ccctgtactaggtgtggtctatttttagatactaatcgcctcattacatcaaaagtgttttaaagtaatgatcattagagtaggagataatgggccataaaatatgtacttaatcattttcattcagtaaaatattagacctagattctcaaaatacataatgaaaattttcaattgtcaatcagatagtatggtcatttccattctccagattctctaacataaatatagtttgcaaggttttgatgatatttttataatgaacattgtcacaaagtaaatgcaacctttttatttttactctaaatataatattatttgaaataaatgtttttctgtcatttcatagtttaataaaattttgtctgctgttgcttaaaaactttaatcatgctaaaaatgactcactgtgattttctcgaattaaatatattggaacctaccagaaaatgtccctggacattttgatagactattagaataaacacaaattagaagcagtatttattcatcacaatgttatgctggagccaggttgctccacatcaataagatattctgtacaaatctcttcccaacttcaaattcagtaacatcatgatgatagcttgaattggctatagtggcagcatttacaatgtggaaataggcaaatgctataactcaaacctttttgtttgcttgcttgcttaattatttgctttcagaatgccagcttaccagcacatcaccaaataaataactaaaagcatattgttggctgggcttggtggctcacacctgtaatcccactttgggaggcactttggaaggccaaggcgggcagatctcttgaggccagcagctcaagactagcctggccaacatggagaaaccctgtctctactaaaaaacaaaatacaaaaattacccggatgtggtggcgggagcctgtaatcccagctattcgggaggctgaggcacgagaatggcttgaacgtgggaggcggaggttgcagtaagccaagatcatgccactgtactccagcctgg

SEQ ID NO: 125889 - DNA, 1097 bp, Homo sapiens
taaaagaaaagagttcaagcctgtaattccagcactgtgagaggccgaggcaggaggattgcttcagcttaggagtttgagaccagcttggacaacatagtgagaccttgtctctacaaaagataaaaagaatagagctattcaaatatttcattatttgtcatgattaatatgtgtttgtttcttgcctttcaaaataatggtcttaaaaccactatgcattaaagtgtactcatgtgccacataatgttttggtcagtgatgagccatatatgcaacaatgtcccataagattacagtacagtacattcactgtagtttttccatgtttaggtatgtttcatgctctatatacttgctaatttttagctattttttaaaaaacacagaaactaaaaatataaacacttatatttatctcaattaggtttctcataataatattattcaccctggtcttttcatgtggctaattccagaagaacctgtactgcaaagtaagaaacagtttactaagatgttcatcagtcaagaataattttatcgtgtcttgtagaaagtgtcaggttaatacacaaacaatattagttggttaattaaggctgaaaaataaataatttataaattatgatcatgttttcactttataaattacaattgtatgtatgattggattgtgtcttctcaatttggaatagtcattactgctcttctataagtaaaatgttccttagtctcataagtgaattgtatgctctgggaacatcctctcataaaatttttacaaaatacctagtcaaaaattggcaagtcctgggtatattactgaatatggctgaattagaaaaattacttgttaatatcaggtcaatcattggagagtctaccaagatctcagaaaatcctattttatattatcaaaatcagaataacatactttggttttggtgttcatttccaatattcatgttatatttagcttctggataccagacctactttttgtgctctctgtaacttgtgataactattgtcccttcttaaattagtactaataatttgctaattgtttaatacaggtaatggattaggaatta

SEQ ID NO: 125890 - DNA, 1049 bp, Homo sapiens
caaaatctttatttatttatatagaattagtctctgcgtctagtttacaatgaaacttctagtacctgtgctcagcagaagtacaatgccacaataaatcaagaaacacaaacataaagtaatcctaattatgatgacagagatgtcaaagtagggggatcttctctattttttctcccccggcacaacttaattgctgaaaattaaaaatgcttttcccagactgtccagagcaaaatcaacagctggcaattttccaaatacattctatatccgaggtcaccaatattgactgcatactactgtagtaacaaacattcttcagaacctattgcatgcacttattaatttttcaaatacaacaagtcattttgcaagagcaattggttataaatgcaaacaccataagaactcagaaccagtaatatcattatatagtgttagtgtaagatgtttaaattgccatcatgtgagaatctcctactacgttccattgatttaatcaatgtgctttgaaatgaaccattctaattatgtatattgcactttaagtgtctttaatgctggttttttaccttactacatgtatgtcttagattatacagatgaacgggaaaactatgcactacatctttcctcacgcaaggataaaaataacaagagactcaaaggatcacacagtttcaggtaaagcaaatcatataatctaatattttttttgtttttttgttttgttttgttttgttttgcatttttttattattatactttcagttttagggtacatgtgcacaatgtgcatgttagttacatatgtatacatgtgccatgctggtgtgctgcacccattaactcgtcatttagcattaggtatatctcctaatgctatccctccccccttccctcaccccacaacaggccccagtgtgtgatgttccccgccctgtgtccatgtgttctcattgttcaattcccatctgtgagtgagaacatgcggtgtttggttttttgtccttgcgatagtttactgagaatgatgatttccaatt

SEQ ID NO: 125891 - DNA, 1086 bp, Homo sapiens
tttatttgaaaacatatgcataacaagaaatcatattcataaaatgctttggaggcaaaagtaataaaaccaataatactaatgcaaacactaatttatctgcttttaaaactagtttacataagacaaacattagaggcatagaagaatatttctgaaaattttttattagacacacaatcatattaattataaaaataaaccgaatcttaaagtccatatttgtttcatttcaaatatatgtgtatacttatatgtgtgtgtatgtgtgtgtgtgtacctatctatctatctatctatctatctatctatctatctatctatctatatgcttaacctctgccttcttcggtagaaattcagcactgctttgtgaattgcacagataacctaatctcttattttttaattttactttagtcacttactctataaataatgctaatacctttcacagggtggttgtaaaggtcagcacttcttgactattataaaatcccttcactttctgcacttaacgctcacatcatctgcaattcctacccaactgctgcattgaggtacattaagctcccatgaaagagccactctttctcttgattctaggaatttgaatgttctgttttcgctccttggacacttttcctccactcatcccttggcaaaccctaatcatcacccaggtgtccatgtaactgccccatgatgcaagaagactcccctgacactaccacccccacttccccagaaatctggggtaagtgtttttcctttgtgctccagtggtgccccatgtattatgtcttgggctgtgagcttcttgagagcagcagctctgtattccaactaccatgttatatatgcatacggtgctaggaactcagcaaggcactctgtctcctgcatctagaatgtgtagtatttaagtgagggaagggatgtctgtatgaatacacagtatgttaacaaaaaggacatgaaggctatctgtcttccgtgtgtgaagtaaagggctcaattccttccctttttgttaacaaactgtttatatatacaggcttgattcatgaaaataactctttgaaa

SEQ ID NO: 125892 - DNA, 1115 bp, Homo sapiens
ttttagttatttagagttcaaaccttcctgatttgcccatttagccttttcctttggtttcttgattttgttttttgtatcatcccatgtatttgccctaaattgacttgctagttttccatgttgaacaagtaaatacttaactaaaaactgatttaaagtagctttgtgtttaaagatatacaaccataaacaagtagtacaagtaaatacttaactaaaaactgatttaaagtagctttgtgtttaaagatatacaaccataaacatttttgaaaattatctagtccaagtctaatattgaagatgagggaggaatgatacaaaggtgtgaagagcctagcccataccaagaggattcatgactcttgactcttggtcctttttttttcacctcctttggtttacatttgaatgtagatgtagatggagttctggaaataaaatatttttgatcaaataaaagcattattatttccttcctttagagactccaaagaactaagctaacatgaacatctcccttttcaaacataacatctttcttgaggactcacaggaaaatacacatttttgtgaaaaggatttttttcctacatctttgtctagatgaataagattttaggaattcaaatctggattttaatagtttttttattgaactaaaataatcactgtatctgaaggaggacaaactgcttttgtttgtgaaattccaatagattagtcattttctgatttgttttcgtctctacaggctattggattgaccatttttattgacaattagttaattgaataaaatactcaatttgtgggttttttatttagatgattatttgaataaatgtacattgcaagaattgtgatatcatgtgggaacagtctttaatatttccttactttttacaatccacattttataaacattttatagatagaaaatgacaattgcagaagagtaaagagtttatccaatagtcatgtctataaaataacaaaataaaacaaaaaccctagagggtcaatggcataacgaaatgccttaagattgtgtgtacatcatgagcatatatctaaagagagtttgatttatcatcatagatattttgtca

SEQ ID NO: 125893 - DNA, 1025 bp, Homo sapiens
tctttctatgcagatattgatcaccatactccacgaaattatgtcctaattgacgacattggagagatcaccaaaggaacagcggcattaagcaccgcatttagccttcatgaaaaggatctgtcaaaaacagaccgtctccttcgaaccactgagacacgccggtctcaagaagtgacagatttcctagcacctttacagtcttcctctagattgcatagttatgtgaaggcggaggaagacccaatggaggatccttacgagttaaagcttctgaaacatcagattaaacaggaatttcgtagagggacagagagcttagatcaccttgctggtctttctcattattaccatgctgatactagctacagacattttccaaaatctgagaagtatagcatcagtagactcacacttgaaaaacaagcagcaaaacaactgccagcagccatactttatcaaaagcagtcaaagcataagaaatcactaattgaccctaaaatgtcaaaattttcacctattcaagaaagtagagaccttgaacctgattattcaagctatatgacttctagcacttcatctattggtggcatttcctccagggcaaggctccttcaagatgacatcacttttggcctcagaaaaaatattacagaccaacaaaaatttatgggatcttctcttggcacaggactgggcacattaggaaataccatacgctcagctctgcaggatgaagcggataagccatacagtagtggcagcaggtccagaccttcctccagaccttcctctgtctatgggcttgatttatcaattaaaagggattcttctagctcttccctaagactgaaagctcaagaggctgaagctctagatgtttcctttagtcatgcatcatcctctgccagaactaagccgaccagtttgccaattagtcaaagtagaggaagaataccaattgtggcccagaattctgaagaagaaagcccactcagtcctgttggccagccaatgggaatggc

SEQ ID NO: 125894 - DNA, 1028 bp, Homo sapiens
ctgcagtctatgaagcaacaccttctctttcagcaagaagaagagcggcaagcccagttcatgatgaggcaggagacgttagctcagcaacagttacagcttgagcagatccaacagctgcaacaacagcttcaccagcagctggaggagcaaaagattcggcagatctaccagtataactatgacccttctggaactgcttctccacaaaccactacagagcaggcaattttggaaggtcagtatgctgctctggaaggcagtcaattttgggcaactgaagatgcaaccaccacagcttcagctgttgtggcaattgaaataccacaaagccaaggatggtacaccgttcagtctgatggtgttactcagtacattgccccacctggtatcctgagcactgtttcagaaatacctctaacagatgttgttgtgaaagaggaaaaacaacccaaaaagagaagttctggagctaaagtccgaggacagtatgatgacatgggagaaaatatgacagatgatccccgaagttttaaaaagatagtggacagtggtgtacaaacggatgacgaagatgccacagatcggagctatgtgagtaggagaaggagaactaaaaagagtgtggatacaagcgtccaaactgatgatgaagatcaggatgagtgggatatgcctactagatcaaggaggaaagctcgtgtagggaaatatggtgacagcatgacagaggctgacaagaccaaacccctttccaaagtctccagcatagcagttcaaacggtagcagagatatctgtgcaaactgaaccagttggaaccataagaacaccctccatacgggcacgagtggatgccaaggtagaaataattaaacacatttcagcacctgaaaagacttacaaagggggcagtttaggatgtcaaacagaagcagattcagacacacaaagtcctcaatatctgagtgccacatctccacccaaagacaagaaacgcccaacacctttagagattggttattcatc

SEQ ID NO: 125895 - DNA, 1078 bp, Homo sapiens
caatggatgtgaaaaggcagatcacagcaaatgaagtttatgggaaacaaattagtgctgtccaaccctctattataaatcttagtgtgacatcatcaatagtgactcctgtatctctggccactgagacagtgacctttgtcacatgcacagctagtgcaagttacactacaggcacagaaagcctagtgggtgcagaacatgcaatgacaacaccactccaacttacaacatcaaagcatgctgagcccccatacaggataccaagtgaccaggtctttcctatagctagggaagaagcaccaataaacttatctctaggtactccagcacatgcagtgacattggctattacaaaacctgtcactgtgcctcctgttggtgtcacaaatggatggactgatagcaccgtatcccagggaatcactgatggggaagtagtggatctcagtacaaccaagtctcacagaacagtcgtaacaatggatgagtctacttcaagtgtgatgaccaaaataatagaagatgaaaaacccgttgatttaaccgcagggagaagagctgtgtgctgtgatgtggtttataaattaccatttggaaggagctgcacagcacagcagcctgcaactactcttcctgaggatcgttttggttatagggatgaccactatcagtatgatcgatcagggccatatggttatagagggattgggggaatgaagccttccatgtctgacacaaatttagcagaagctggacattttttctataaaagtaagaatgcttttgattattctgaaggaactgacacagcagtagatctgacttcagggagagttactacaggtcagtatgatgtggcagcagacctttccttgaaatatcattatggtgttcctcatctcatttcaggatgaaaatgtggcttcttttccagttttgttactttttctctttctttggatgttatagcagcatattttggagtacaagtgcgcttttgttccttcattttaaaaaaaatttgttctgctcaaaatcactgcatgcgcctgcatgttcaacattgctttcattc

SEQ ID NO: 125896 - DNA, 1040 bp, Homo sapiens
tctagtaaaaaatcaaagaaagacaaagatgaacttcgagctcagagaagaagggaaaggccaaagacaccacctagtaatctctctcccattgaagatgcatctccgacagaagagttacgtcaggctgcagaaatggaggagctccatagatcttcttgttctgaatattcacctagcatagagtcagacccagaaggttttgaaataagcccggaaaaaataatagaagtacaaaaagtttataaattgcccacagctgtttcattatactcaccaacagatgagcaatctattatgcagaaagaaggtagccaaaaggcgttaaaaagtgctgaggagatgtatgaagaaatgatgcataaaacacacaaatacaaagcttttccagctgcaaatgaacgagatgaagtgtttgaaaaagagcctttgtatggtgggatgctaatagaggattatatttatgaatctttagtagaagacacgtacaatggatcggtagatggcagtctgctaacaaggcaagaagaagaaaatggatttatgcagcagaaaggaagagagcaaaagataagactttcagaacagatttatgaagatcctatgcagaaaattacagacctccagaaagagttttatgagttagaaagcttacattctgttgtgcctcaggaagatattgtttcaagctcttttatcatcccagaaagccatgagatagtggacctgggtactatggtaacttctacagaagaagaaaggaaactactagatgctgatgctgcctatgaagaacttatgaagaggcaacagatgcaattaacacctggatctagcccaacccaggcccccattggtgaggatatgacagagtccaccatggactttgacagaatgccagatgcctctttgacatcaagtgttctctcaggagcgtctcttacagattcgaccagcagtgcaacactctctatcccagatgttaaaataacccaacatttttcaacagaagaaattgaggatgaatatgtaaccgatta

SEQ ID NO: 125897 - DNA, 1020 bp, Homo sapiens
ttctggcaagataaaattatataaacaaatttaaaaatattctttttggatatgttatggtctgaatggtctgaatgtatgtgttcctccaaaaattgtatgccaaaatctaacccacaaaatgtgttggggttaagaggtaaggccttttgtgtagtactgaagtgatgagggaggagccctcatgaatgggattagtgcccatatgaaagaggcctgaaggagcttgttggtctcctcccccatgaaaggacacatagaaggtgctgtctatgaggaatggatgcacacctgacaccaagtctgctggtgtcttgatcttagacttcccagccttcaaactgaaagcaatacatttttgttgtttataaattacccagtctaaggtattttattagagcagcctgaatgaactaaaacagtatataaaataattatttgtaaattgtatttgcaaaatttagttcaaaagtaaagtgacttaagcaaaggtagctggaaaatgatggcaatattttaaaggatcaaaaaataccaggacccgattcttcaggacaagctaggagtcttcccttgaagaccataggattgtttttcgaatcaccacctaatattgttggcaaatcctagccgagataaatatgaaaacaatatacactagctaaacactaaatgtgggttgaatgaatgaaacaaataatttacaatattccatattttctttcaaaatagacacgctgatcttttagatttatacagtagaaactattttagctgcaggtctttttttaagcctgcaatgaatgagttctttaaattagaaaaggttatagcacatttctttgccttgtgtaacaaacatgcaatagctcctaagtgcctctggcgtaaaaaaaactatctgaaagcctgaatatataggataaagttttaacttcttccctcagaactttatggacaaaagttgaaacataataagctaattctagatcttgcaaattatcctgtttttatttgatg

SEQ ID NO: 125898 - DNA, 1118 bp, Homo sapiens
gaggtacactgaacttactatacttacagaagtattttttccatagttaacaacataataacatttattctttctgaaaaaatacagcttaattctggctacctatagaatctagcctttaattattatttaatttttagtatcagcatgccttaaccattatataggcagaatgagacatggtgcttttaagctgggatttcaattaaaattaatattaaatgtaaagacagctgtgaattttaatgaattatttcatttgtatttggaaaacttctcccaatctcctgctaccgggcttcaaagatttttttatatacttgagccttaaaacggtcatttcaaaatattaatttatagtcattcttttttttttaaatagggtgctttcacactacctccaagtccaattccaaaattcataaatatatatgaagcagagcttataaaagttactatggtatcagctcacaaaactaagaacatcttcatgtatgaatttctttcattgatagatggtctagaattgcgtgttgtcaggatctgtagttgacaaagttggacatttggaagagatcctcttcattattcccacatcttcatccagccttcatcttcatctttcctctgaacagggctgctctgatgagtttcctacacagaggatgttctcttgtcaacccagtctcttcacaacttgttctcagaaaaagttttaaaaattatattcactctgttcttattcttacaaatgccaaatgagaattaaatgtattagctcctttaaaagatatatcaagaaaatacatcgccactggaggaatttcaagaatctgttccaatagttgcaaatatgtttgagtgggcagggtcatcactagtactgtctgaagtcatgacagcaacctgaatttctgctttttctacatgtagacttagggatatactttttacaatttttaaaacttattcactaataggaaacagactcatttaccatctgcttgaaatgtggtgattataatttatccatgaaaatattgaatgtttccttatcaacttgggagtcatcagggaggacccagaagtaaaggttaacagagagggaaaacagattg

SEQ ID NO: 125899 - DNA, 1053 bp, Homo sapiens
aatgtaacgttttcttaccctgctccttttttcttttgtttgtagcacttaatatcttttaacataattgttcattcagtaatttattgtgtttttacaaaattacccttctacctcactagaatgcaagttctatgagtgccaggcattattccaggtgcttagcatacagtagatgctgacaaaatctttgtagcatgagtgaattaatcctatatgttattacagatatagtagctgaataaagtaaactggaatattggtcaacttcatatctggttagctgtaaatattttaaccagcttcctaccttgctttttcctgttatgcccatttcaaatggtaaagagaaacagcaccatatcacatatattgaaaaattttctccaaataaattctcattataaaatcaggtctataaggtagaatacatctacagctaaggctgggggataaatggatgaaactaagcttcaaggaaaaaagaaaacaggcgtggtgatccctgcagagggaacatagcaagagttgtccagatggtgactatggtgccagatcattagggcttcaaaatcattcaatagcttcatagccatcttgctagaacaaattgtttaacctcttatggctttcttcatctgtaaaatgatatgatgataagaggaccttctgtgtggggctgctgtaacgattaggaagtaaatacatgtacaactttcagaacagtacatggcgcttgctaaagctcaataaatgctagctttgatagctactgctgccagatttaggtgtgtggtatcaagatatacttgttactaaagagtcaagataaaaattatcattttttgactgaactttcacttctaagagttaagctgcttaatgaaatgaattttgatgttagaggacaaatggaggtctttactccgggcttgaaagattatttcagattattttctatagtttggtaaaaagtaatggtccttggctaaaatgaaaacacatgcattgctgtgttctttcatttgtgatgtcaacactgcttctaatttt

SEQ ID NO: 125900 - DNA, 1118 bp, Homo sapiens
atgccaaaagggtcaccaacaccccctggcccacgacctaccgctggccaaactgtccccacacctcaacagtccccaaagcctcaggagcagtcaaggcgtttcagtctgaatctgggaagtattactgatgcccccaaatcacagcctacaactcctcaagagaccgtgactgggaaactctttgggtttggagcatcaatcttcagccaggcatcaaatttaatttccactgcaggccaacctggacctcattcacaaagtggaccaggggccccaatgaaacaagcccctgccccttcacagccacctacttcacaagggccacccaaatccacaggtcaagcaccaccagcacctgcaaaaagtatacctgtgaaaaaggaaacaaaagccccagcagctgaaaaattagagcccaaagctgaacaagctccaacagtaaaaagaacagaaacagaaaaaaagccaccacctattaaggatagcaaatctttaacagctgagcctcaaaaggctgtccttcccacaaaactggagaaatcgcccaaaccagaatcaacctgtcctctctgcaaaactgaactcaacataggttctaaggatcctcctaacttcaatacttgcactgaatgcaagaatcaagtgtgtaatctctgtggatttaaccctacaccacatttgactgaggtaagttatatatatatatatatatatatattacatatggaggtgagtctgtgggtttattttgaaacatttgggtggccaaatatctgagcaaaaaatacatttgtggtgaagaaaataaattgataatcttagaagtttcaattacttattaccagcttaccttcttactaagagttcatgttatttgtactttcctgggttaatgttccacaagtaagaagatgaaataagttaaatgaacatcttaattattaaattaatataacaatgagccaatcattcatgaaataaagaaaaaaataatagcttttgaggactattttcacgtgtaaactccagataaaaggttttaatattttcacatgtaaactccagataaaaggttttaatattttattcccatctctaatccttccagtctctgt

SEQ ID NO: 125901 - DNA, 1049 bp, Homo sapiens
ctttccatttcccactcaaagatctctgtgttttacttttatttacatagttatagcaactaactaagtttaaattataagacagtctttagggttgtatgcctattttctgatggggattctatagtaaagtacaacttatatttgtaggaagtacatgcaattataattcctggtgcaagcagcttgctttcaattctgtttctgattatcacaaatatttgacattcatgaagtttattttttgttgttttacaaatatgatggattaagtgaaatattaaaacaatgattaaaataagtttagtagtattttcaagagagaagaatttagtataattaaggtagattttttttttggtactctgcttaaagttagatttataggactctgtacagggaagttatttaaataaaatgcctaatgattactcataggattgccatacctgtaatcagccctaagcatgtgctgttcaagggaatggtacaatatattaagtaaatatagaagatttatagaataatgtcaaggtctgaatagtgtacctataaagaaatgttcagaatgattttctccaaatggaaatatgtagcagtccattttaagagctagcttggaactattggaattaactagggtaacacttttagttctgtttaagtaaagccttgagagacatggtagaatatatatatttttgtaaacttttccttggaggaaatttcaaaaattcagaatctacttatttgtcttttaccagaaaatcactttatgcatacgttgccatttatagattattttcttttcttctaagtgcttgctacctagaagtaatgcttctttgcgtctttctgctatctcttacatcctgacctgtactcaaatttctatgtcaggaaatttggaaaaagttaattcataagaagtattgaatatgaaataaaatatttgtagtctgtctcattagcaggtaaattttggtaaacccaattagaacctataaatctttattctgatattatattttaggtgctactaagttact

SEQ ID NO: 125902 - DNA, 1016 bp, Homo sapiens
aaagaatgtcaaatcagatgaagttatagttaggattctaactactgtaaaagatttttgcttccctcttgtggtaaaaaaaattatattctcacacatttcttttttctctacagacggatatctgtttaggaaagatttgaaagcagattatcagtaggtacatggatacatcaagttcatttgcagaaacaaataactgaaataaaaaacatgttaatccttgtatcatactttaatatgaaagtattgtttatagataatttatctcacaagtcaaaaatgaagattttgcagcactgaaaatctattaaagctccaaattttaagtttctaaataatcttcgctgaaatctaaaatatactataacaaccgtgttttatttgtgaaaaaaatattaaagtgatttgctctcaaatatcaaattttcttctctcttttatattaagagacagaaaattgtttcatgagttcacttaactactgagatattcagagcatttttacctctctcttaaatgttataaaaaacaattgtatttttaagaatgtttatttatcaaagtctttccttcttctattaaatatttagcaattacctttctaaaatatgaaattttgtaagatgttttcacctaaataaaaattgaaagcaagtggattacacaggagaaccattatgaacatttatttagatattaatcttaaacagtgtttatttcagttttcaaagttagcttataggttatacatttaagttaaagtgctcataatcacttgcaatttcattgtaaaatgaacaaatacataaatattttaagaaaaatttaagtttattcagataagtcaccatgcttcaaaagatctaagaaatgcaaatatactgaaaattgacatcctctgaaaattccacttgctatttacccaagaatccactggaggtcattactgccattaaataataactgaaaagactatgtagtgaaatgtatttttaaaaactatattcagtaaa

SEQ ID NO: 125903 - DNA, 1028 bp, Homo sapiens
atgtaagggatgttcactgaactgattaactgatgaatttttttgtaagacgacaaagtgaaaggagcccagttctccaaagagaggtccttgtagaaacattggtcactaccatctggagggcataatcattcctgaaagaatgtgggaagtggtatttgttctgtccattgaaaaacaaatgttaaaaaataaattttagaaattttcctttcactcttactgtgactgctatattgaaatgtattttttctaatgattaattgaatcattagggagaaaaccctcttactttacagtattgatataaaatgatctcaaggtcattgatatgaagtgaccaccaatgtaaatatcttcagaatacacacacacacacacacacacacacacagagagagagagagagatgtaattatttagcatttttgtgtatgtatgattttcagggtttcattatgtgacagtgaaaatgaaaaaattcaagataggtagtggaaagggtgatggattgttattttctctcctgtgtacttcagtgccatttacttttttgtttttgcaggtgaagacagatgacagagtggttaagatggaccttggtttactcttcctaaggttacacaaatcagatgctgggacctatttttgccagacagtagagcatagctttgtccatacggtccgtaaaatcaccttggaggtagtggaagaggagaaagtcgaggatatgtttaacaaggacgatgaggaggacaggcatcacaggatgccttgtcctgctcagagtagcatctcgcagggagcaaaaccatggtacaaggaattcttgcagctgatcggttatagcaacttccagagagtggaagaatactgcgagaaagtatggtgcacagatagaaagaggaaaaagcttaaaatgtcaccctccaagtggaagtatgccaaccctcaggaaaagaagctccgttccaaacctgagcattaccgcctgcccaggcacacgctggactcctgatggggtgaga

SEQ ID NO: 125904 - DNA, 1017 bp, Homo sapiens
ctatttttagttctttgagaaatctctatattgtttttcataaaggttgtgctaatttactaaagttaagtaaatggcacaaaatacaaactagttagtacctccagagctgtatggcttaaataagtagaaacagtgaaattaggagggtgtggtgtaataaaaccaggaaaaaaggaattggataagatatattaaacaatattctttgaacaatgcataaaacgaggaccaagtttccagggataatgtgtgaagtgggatgttaaggcacgattcatctaataacaggttaagtgatgaatggtgctctgttgaaccagaaactgctagtttagtgtactctaccaaaatattcgaatgacaaagagagagatccacaaaggtagacaagagtagaaataaattttgttttgttttctttttagtaaaaaggtgacttggtcatgtttataggttgaaaggaagtagctataaagaagaaatgtgcaactagttgatgaagcaaaataaagaacatgtgggagagaatataatcacaggcaaaatttaaggggtaaattcttagaaggaaaacagagactcttcactctctgaattaggagaaaataaaatgattcatttatgtggataatgtaatttcatcaacagaagttaagtttagcagttccaaaggtcttctatcttcatttaaattcagtggctatatatatttccacatatagttttaatctgaaatacaagcctaaatcttccttctatgaagggtgtataaatcatttttttctgtaatagcagaggacaaaactgttaaaattatagccaaatcaccactataccctggtttatgaagactcaatttctgcaattccacatacttgaatttatgaacctccataataactacaaaaattttaatactgagtaacatccctaagtggagaaattcattcttgttgagacatatagttaaggtcatatagttgaagtatttctgtatgcatttctctttctata

SEQ ID NO: 125905 - DNA, 1047 bp, Homo sapiens
gactctaattatacgaggcagattgagggggaaaatactaatatttcttgagtcccactagatgcacaaaattctgctaaacatgaaaaacacactatcacattgaatagaggcaatgttatatctgaataaaagtaagctgactacagtatattattagtttatgtcttattgttagaaattctatttgtactaattgattataatggctatagaacaaactatttggattttaacacctttttcatttgcactttattatatatgggagttttatactcaaaataactgttttgtactcaataaatactttacttcaaatcccattgtctttatctgctcaaataccttaccattcaagacattctcaaactagaagatttcttgttgaactaaatttttaacaaaaagtaaagagaaatacattccattgttgtttgagtttccagaattcaacattatgtaaataaagaacagggtaacatagatcttagctactgaagaacatataatggaaatatgaaaaactatgaaacttggattttattcttttttcatatgaatgatcatttttttcagtagcagaatactacttgtatatgaaatgcaattggctgcattttaaagtctggaaaattgaaaaaatgaacatctaaatgcatttactttctttcaggcgtttccggagacaagatgttcgacatggaaatgcagctcagcagtgctttggacaacagtttgttggtaatccatagaaaatcagttgttctgggttactcagagaatacattgaacataaactacaaacttcttaaaaagagtcctttttttctttgtgattcatgtatactagaacaatgtaataagtattctttttctctgacatgtagttaaaattttgaaaatttgactaatttttacctgattaggaaaataagttttatgtgctaccaccaagctttattattaaactaattattaaaacaaagaaaccctagaacaagaatgctgcatactttaggtggttgatgccacagtgactcttat

SEQ ID NO: 125906 - DNA, 1001 bp, Homo sapiens
atacctaaaagtatgcttggtgaaaagtatatgtagtaaaaaaatattccttcaaatctcaagttttatccttgttatttaataaaaagaatataatatataatggacacagcagtattataaaatatgtactattattgatattttggctaagtaacaccaattgaaattttatttttaaaagtactggtgaaaacagaaacattcagtaacatgaacatcgtattcctctcagcctcttcagaggagttagcaccacatataatttccaagcaggacaatgtcaccaaatttttatgttctaacatttaaattagcctctaatttccctaggccaaactgtctccttacttctcattgtaggaaatctataagaagtttttttctctatctcctcagaatacttagcacctcatttaacatccttgctggccccttaggaaagaaatgccaatacaaaagtattgctagagtacaaaggttctaccacttgtctctgaactatactattaagattcttcttagctaggcatgaagtcttttgtgcttttagcacacatggctaaaactgatgatgatagtgagggtgatgatgagatgatgattttgtatcattcatcctgtgtgcaactaggttggaaaaactttggatcattgtatgtgctatgtgagctatggagagcaaagatttaacttgtcacacaagtcaacatctatacttttacaagcagctggtgaaatcccatcactacactgattccacgattacttgcaagtcaaatagaaaccatttttgtagagcaaaaacccaaagtgaaaacaaaccttacttccattaacaagtgttaaagctttaccatttcaatcactctctctcactagcttaaaattattacttccagtaagacataaagtatattttatttcactctattgattgaaattacaattttaaatggagaaaccctactcctgtggctttgctggaaatgcttcctgaa

SEQ ID NO: 125907 - DNA, 1074 bp, Homo sapiens
ttgcctttggacattttccctgtgagttcactaatggtctgattttgacaagataatgccttgacagatgccaatcagtgtctactttgctagttcccattactatatttttatttattcacttaccttgcttgaaaaaactttctcctccaacactgatttaaatcagttctccaatacttaccaattgccatatccaagaaaaatttctcgatttcataatcatagaacactcttctcactctttcattctgattttcctgctcttacgttgattcatagtgaacacgttcatcatttgctctctatcttttaaatttgctgctcaagtttaagatgtataatctattgttttcccctttatgtttctgtatttttttaacccatagtaaagtgctgtaaaaatggataaaatattatttcatatattttgacacacaaataaaaatattagaatcagtatttgttaaaaggttatatagacaatttcctgagtatctttccaggtaaggcatagtgcaggtaaaatgattaggataaaaaataaagaagaatatacctcaattctcttgacagggctagaataatattactgaattcctcttttacatcatataagccataaactgtcatataattatgtatactgtgcttacgtggggtctttccacacagctttagtttgttatttttcagtaggtagtttctaatgctcacttagagaaaataatacatctctttagacaagaatcctgctgttgcaaagagaccttttcttcaacagagaaacatggaaacaatttgtctatcaattattccttgatgcaaagaaaaatagttaatgtagattggtagttatcacagcgcatggagagtacttaacgttttaacttcatctcctcccttatgctgtgaataattcatatgttgcatgataattcagtgaatttatatgataaattaaagctatggaataatcggtttagtttttctatgggttaatatgatcagattataagctattttcctaaatgatagcgtaatggatctttctgagaaatcaagcataagaca

SEQ ID NO: 125908 - DNA, 1047 bp, Homo sapiens
taaatagaacaccagtgccccagaatctgttgtcccccttcaataactacccccaaaataaacactattatgatttctatcatcatagattagttttgcctcatttagaattttatgtaatggaatcatacatcaagtgttttttgtgtggttagcttattttgctcaacagttatactgagattgatctatgttgtgtgtagttttcgttcatgtgttttcattactgtaatttatttacatggatataacacaatttactttcccactttttctgatcattctaattgtttatagcaattgtgctgtaattgtgctgctatgagcattcttgtccatatcttttggtgaacttatgggtgtgtttttagttagtatattttagtagtggaattgctgtgccatagaggatacatatgttcaactttagtaaatactgctaaaccatttttgagtcattgtacctattttatgcccacaagtggtgtataagttttctagttaccccacattaagcattgtctgtctttttcttaggattctaatggctgcatggttgtatcacattgtggtcttaatttccaatctttctgatgctcaagaaaattgtgtgccttttatatgcttattgaggctttgagtcacttttgagctgaagtcttcagtttgccatttaagagctgtttgacatttgccaaatgggtttgttgggggattttatgagggagcaagtataaaatatccaattcaatactcagcatacagaaaataatcagtgaaagataattctttttatggcccccttctgtgctgtttaaaacaaaatttaaaacaaggtccaaaataaaattgggaggaaacagtagagagtagttgatttatatgtgtataatgtatgtaattagggggtgagaaaagagaaacaggaagagagaacaaaaccaacgttttctgattatgatatttaacttattgacaatcaagttaagtccgaaagaaaatatgtgctgtatagttctcattagtgtgtgagggagtagagattaa

SEQ ID NO: 125909 - DNA, 1036 bp, Homo sapiens
aaattatttattttttgctacaggcgttgttgatgaggttttgattttgcatcctacttaatccctctgtttttatggggggatttcatggagaataaaatgagtgtccctgctgctattctctcaaaagtctcagagcactttttaaacagtaacaagtgatacaaatataaactactacaagtttatgtctacctctgattttactcacatctcaaagaaaatggaaattatgtgttgaatgtagatgctcagacaataagaaacagagttttaggtataaagcacatatttctagagaattggcaaagaccttgaactcttgcaaaattaaaatggttttcattacttaacagccaacatttctcttaagaatgagacgactttagcacaagaatattagcacgttactatttgtattttctttcttgcaaacaaattaccaaaaatgtagctgattaaaacacagcttcacacacttattatctcacagtttctgtgggacgtgagagtccaggcactgtttagttggctcctctgctaaaggtctcccaaggctgaaatcaaggtgttgcaatctttctggagctcagggtcatattccgggttcatgaggttattggcagaattcacttccttgcagttgtaagaccaaggtcctcattttctagatggctatcagccaggggctgctgtcaactcctaggggtcacatgcagttccttgccatgcggccctgtcataacatggctgcatacttcttctagaccagcaggcaaatctttctgttcagtttactaagagggaatcatacagcacagcttcatcatgacaatgactatcccatcacgtttgccatataaagtagtataaggagtgatttcttaccgtattcgcaggtgtgcctacaccagaggaaggggatcgtgtcgtacagctatatttgagagtgggattcttgaacatcataagcattctacccaccacagtattctttccatatcttacatgttaaagaaaggttgcattaatacag

SEQ ID NO: 125910 - DNA, 1048 bp, Homo sapiens
attcgacctatagtggggtcagtgactcctctcaggtgtatgcaaagctgcattgtaaccagatattgactgatatctttcctaaatcatgcatgacccactgatggattcattgctaacatcaacatcttttctaggattttatgtgtgtgctttttgctttagggttggttttcttttatatcaccatttttctctgtttatcttttcttgtgttgcaacatcaaaaacaaaactgtgttttcacttaaagtttatatgccaaaactgtgttttcctttaaaagtttatacattgcactatgaaaattaaagaacacatgatgctgaatattgttagtaaaaaactgcttggggctcattgcaccaatgaataacaacatcgaagtaatattttatacctataattcaaaacatagagtgcttgtttctatgataataaattaaatcagatagcatttatcactataaaatgctactatcatcactttgataaattcccattattactcatgtatcaggaaatggatttggctacataatgtataagttaagtgacaagcctctttcacttctgggatttacatgccttatctgatattttatggggcatggctttaagaaaaagaaaaagcatacgtcttatttttctttttttttttttttttttttaattgagatagagtctcactctgttgcccaggctggagtgtagtggcaggatcctggctcactgcaagcttcatctcccaggttcaagcaattctcctgcctcacccttggagcagctgggactacaggtgcacaccaccacgcctggctagttttgtatttttcatagagacaagatttcaccatgtttgccaggctggtctcaaactcctgacctcaggtggtccacccgcctcggcctcccaaagtgctgggattacaggcatgagccacctcacctgtcctaaaaaagctgaatcttgaacatatttaggattcaaacaaatatgagattttagaaactaaaatacctataggaatcattcgtgtaaaagaaa

SEQ ID NO: 125911 - DNA, 1037 bp, Homo sapiens
atcatgtataactttttttcagggataagcttttaaaatgtcacaatattttaatagcacgagagctcacaattctatactatgtacaatgaatgacgtgttaaattcataaaacacaccacctgcttctaggaatgttgtgtggcccctgcacaaatgtgctctctaaattcctagaattgctaacttagtgagtaatgaaactatttggaatttctttttcctttgactaaatgtccaaattgatataagataggtctcagatttcaaaatttttggtccaaggcttgtaaagacaggtttggcctttttatttacaaaaatatttcttttatttatctgctgaagaagactggagaatattctttcctctaaggtacctcaggtggactcacagaatattagcacattagtgatttataaacttttctactgatatgacttccttattaagggagaaagaaaactatcttacaaggtctatgaggcaagcttatctaagtataaatcaaaatgtaatttttgctcaaagctgtgttctatttttactaaggtaatcttgttggtttatattgtttatgaagtagtagataacaatatttaaattaatacataagcatttgattgagcaaatataatgtttctctgttatgagattttaaaatgtgatttttgaagcattttctcaaaagaaacgtgaaatattttattaaatgtttatttcttaaaaatatctgttaccaggctttctatgtcctaggcagtgtgaatgcaaggacaaaacatgttcttgccctaataatgcagcatttaatcttaaaaaagaaaaatacgtgtatattatttactgtaattttataaaatacagtggaaatcatagatacaatgtatggacaccaaaggaaaatacatagataggaaaaggccttaacaatatttattgtttctcataaagcggaggaagataaatccaccaaggagacagggtgattggccagagagggagaacacacaagaaagtgtcaggaaatccaaag

SEQ ID NO: 125912 - DNA, 1043 bp, Homo sapiens
ttaaatatcaagacagatgctgtgctgctatgtgtttaaaaaccatctctctgggaagaaagagccttgatttgtaggattttccgacctccatggtgtaaattgtaccaccacatccaatttctaacagtcaacatgatatcctagaatgtcaacttgggaagaaatgtgtataggctgtcattatcattgaattcatgccagttctattgagagccacctagccttcttttcctaaggcttcagaatgctggcagctctccagagacacagttgaaatattctcctcagaggaatctgactagtctaaagaaatatattgatgctggacttcctaaaaaaaaaaaaataacctaccaaccctttctatagcaaagcttacagttgacaagctctacccatgggcttagagattccattcttgagctgcttttaaacacaagtatacaacccaagatcactggatagctaaggaaatcatctaaaatgaaatatagagacgaaaaaaaaaaaaaaaaacccaaacaaacaaaaatgaaggaacttagaagaaacaaactattctggaagaaaataaagatcttcataaagatcagagaaaatattgcatccatgaaacaagatcaaattgctactttaaaaatgagcagaaaataaaacagctctttgaatttaaaagtatgcgaagaagaataaaaatctcagaggaagttgtaaaaattaaagttgaggaaatattccagaagtagggggaaatgatgaaaaaaatacatgagaaaacaagaaaatctgaggtcaccccagaagttcaaaaaataagcattgcagaaagagaaaacagaacatatgtgagagaagtcatcaataaagtaattgaatactttttttagtaattaaataaatgtatttttagattgagagagcccagtacaatggatgaaaacaaactcataccaaagcaggtcatcataacattttagaacactggagaaatataaaaggctctgtgaggttccagggaaaaaaaattaaaatgaaaaaac

SEQ ID NO: 125913 - DNA, 1040 bp, Homo sapiens
ggagttcgagaccagcctggccaacgtagtgaaaccccatcactactaaaaatacaaaaattcactgggcatggtggcacgcacctgtaatcccagctactctggaaccagaggctgaggcaggagaatcacttgaacccaggaagcagaggttgcagtgagtcaagattgcatcactgcactccagcctgggtgacagagcaaaactccatctcggaaaaaaaaaaaaaaaaaaaaagaatattccaatcaagaagcacacatgcacacaaataacttgttaaaaaaaaaaaaactatgaattttcccaacttgtttactccttgtttgattttcttacaaagtagaaataaatatttatacttgaacaaataaaatattaactttagatgcttaattatagagtcattttaatggtaagcacatattagggcaagatgattttattttataaatatgttttattgataatgtgtactaagataaaacttttcatgctattgcaaatactacattctgtttcttaaaaataatccttggtaattttattggaaaatgtctgtgtgtatgtgaaaatgtacgtatgtgtttttgtgtgtgatgtataaaataaattataaaatattaattactttataaaatacaaactacatcaaattcatgtctgctgactatctagaaccttgaattttttttttcccccgacggagtttcacttttgttgcccaggctggagtacagtggcgcaatcttggctcactgcagcctccgcctcccgggttcaagtgattctcctgcctcagcctccctagtagctgggattacaggcatgcaccaccacacctgactgattttttgtatttttagtagagatggggtttcaccattttggtcaggctggtctcgaactcctgacctcaggggatccacccgcctcagcctcccaaagtgttgggattacaggcatgagccaccacgcctggccaaaccttgaatatttttaaaaagaatatatattggaaattgtttcacgtagaatg

SEQ ID NO: 125914 - DNA, 1152 bp, Homo sapiens
ttttggtggcagttataccaaagtatgtctgaccacagcggaccagctcaactaaactaccacgagttaccttccttatttaggctgtgaaatgtggcagaataagtgattccattgttaagggaaatcacacccataaagaaaatcagagttgatggttttcttacatagatttgggcttcgtgttaaaattctagctgcaattttgccaactggagaaaaattagaaaagtttatagagcaatgattctactgacagcatctcgatgaactagtctcagattgttagacttgtgtggtatttatgggtgaataatatgaagtcccatcaactgtgatgtctgactctgcctaaatgctaattaataataacttaaaatattacttcataaagattaccaaaaggtgttattcagaaataaaattataatgtttattaaaatacacttacgatgttaaatcagtattctaagaaaatttggctccagttaacatttggtggtttttcaaaactctcaggatgtatcacataggcaattggttgacattttaggaaagacagcttattagttcattctcagccttgcttatcattgcttatcattttcaaatgtcaccattcttgctttataatcagacattaggcttgcttaatttcatcttaaatttgtcatgcactttttgtttaaacaagtttgagtaaggtatcttcatcaataaaattttgatgtaggatttggtaacatttacttcaaccagtttgctctgccttttgacacaaatcagccatatctttattgctaaatagatacgtacactcataacttgaacgtgcactgtgttactcatcattaatttattttccattggaatatgagacatagtgatacaatgaacatgaaatcttttgtctagactcagtggatagcatgaaaaagtttaagacactaataagaagttatttcaaagtacataatggggtattgatacaaatctaatgttgatcctaaagtgaaatctatatcagctaatggaagaaaaacaaatgaatgtaagatttgtcttgagtaaaattgttaacgtaggaaatgctggttatgttttgtctttgtcttctccatccttgccagttcttactcccatgctaccaaa

SEQ ID NO: 125915 - DNA, 1052 bp, Homo sapiens
tcatgtattcaaatgttttagtatgagtaaattatactataaatcataaaacatatatacctgtgagcctatttcacacttaaagatctaaaaccttcactgttctgtgacatctacctgtgtgttctctctctgtctcatcctcctcattcctttcaaggggtatcactatcttgaattttatatttatcactcttattgttttgtttaaaaaattgttcttaaatagtttgattttgcttggtttggtactttataatagcagtattatcatctaagtgtttttcagctatgtgtttttattgcaatcaatatgaagttttgaagactctttcacactgttgagagtagctatattttgttatttttccaacatggtgattatatgccagattcgtaagtccataaagccacttttctttcgatgaacatttaggctgttttcagtattttttttggtattagaaacatgtaaaaccatttctttagtgtgtatacttagaagtgaattggtaggtcatagggtatatggatgaatgtttagataatgccacacttttccaaaggctattacaacttatagttctaccaacagacaatgtgagtattccccttcatccacatgtttaccaacacttagtactttgatttttaatttttttccaatctgatgcatctaaaataactcattgaggttttaattatgttatacttttattactaatgaggttgaaaactttttatatgtgtattgaaatgtatgtcctcttttgtgaaagtctaatcatatttcttgcctattttttctagtgggatgtttgcatttttcttgttgatgtgtgggacttctcatatatttaccaactctcttgtacagtgtcacagattaatgattccaggaaatggttggagtttctcttggtcatcttatcagaacttcttgatatagaaatgaattttctgatgagtagatgataaaataatggatacaataatagagtaagatgctaaaactggtggatattctgtaatataaacaaaacaaaacaaaa

SEQ ID NO: 125916 - DNA, 1081 bp, Homo sapiens
tgttgctgttgtttggtaacattctattgtcaggatgcagcatagttattttatccactcatctactgaaggatattttgattgtttccaagttttagcaattctgaatacacctataaacatcagtgtgcagggttttgtgtggatatacattttcagttcctttgtgtaaataccaaggagtgcaattgctggattgtacggtaagaatgtgtttagttttgtaaggaactgccaaattgtcatccaaagtggctgtctcattttgccttcccaccgacaatgaattagagttcctgttgcttcacatcctcaccagcatttgatattgtcagtactctggattttggccattctaagaggtgtgtagcagtatcctattgcttcagtttgcatttccctagtgacagatgatattgagcatcttttcgtttgctcatttgtcatctgaataccttcttctgtgagatgtctgacactactattttttctcctgttttaaaagtgttatttcctgacagtaataatacttagaatattaaaacaaatatggatataacaaaacatttaagatgacttccattccatgactttttatggttgcacaatgctggagccttgtatatatcacctttcaatcttgtcaaataccatttgttaaagctatccttctatgggagaagaaaccaaggctcaagcaggtagctttgttgaactcctgcagttagcaactgtcctagcaaagatttggacttgttctcagctccaagtccaatactgttcctgctacatcaaaattgatccagtcaaagatgagcaccaattattggtgctttatttataattaacacaacaccaaaatggtttttaatcttcagccaacaatgtagctggttaaaattatactctatttgaaatgtatggactgaaaaaggtcaaaaaacatcattttcaattgatgagttagctagagttagccatttagggaaagcaaaaaggggagccaaatttaaatcttatatttgatttatattgtatttcttttttcactaaaatatttgtatttgttaaaaatttgatt

SEQ ID NO: 125917 - DNA, 1093 bp, Homo sapiens
tcaccactcagggcttaataggaaaagctcaatttgtttcccaaagaaaacaaaaccaatgatgtccttaaagtcctcttgggctttgtgatttaataaaatagaaaatatattaacacaaatagctgagatacaaaatagaaagcacatacagtgaagagaaatgtatataaattgttaagagaattcagaaggagctgatttatccagccatttagcagtctatggtgtcttaatatcctaatacaatgaggctgactataaattcttcatgtaatattttatctctttaatactcataaatacaaatctccacattctggcataaacggcattcaatcattcacttattcaccattgatggagtatcagataattgtgcttcaaactcaggatatactgataaaacaaaacaagaaaatgctggcccttcttcatggaacgtacatactggtgggagagacaggcaacaaagaaacaagaaggcaaatatataaaatgattgctaattttagtgagtgttatgaaaacaatgggaggctctggtagagaaaagtgaaggaatctttgtttaggtgggatggtgagagtggtcagggaaggcttctctgtaaatgggatactgttgcagaggtagaagcacagacaaggacttagtcctgagaagagcaaagaaacagctgtgcagatggagggaacagcacatgcaaataacctaaggccagagaatgcttagtgtcttcaaagaactgataggaattagtattaggaatgtcacctactatgacctaggcaggggccagaggatgtcgactcttgctcacggtaaggagtgagaatttttcccagtagtaaggggaaaacgctgcaagatgtaaacagggaaacaatataactgagttttttgggggaagattgtgtttgctgttctaggaagaatagattggaggtgacaagagtggaggagaagggaccagtgaaagggctttgagaacatcaaattatctgtcaatatttaaacttcatttaaataatggcttgactcatatatctaaagattacacttacactatttttttaaagtttacatcta

SEQ ID NO: 125918 - DNA, 2096 bp, Homo sapiens
cctttcagaagcccaatatgtctacaggcatcatagctagacagcaaggtccagaagaaatggaagactgtttctttccatgcagctaagttttttgaacaagaaaatcccttccccttatccctcattttaattgggcagaattacatcacatatgtccagcaaatcagtcatgggctaggaaatggaattacctaatttgctttaaatgatcaatattctactttttagtgcttctctgtacacctaacaatggtgagcgtgaacactcagacaaaataggggttctgtcatcaagaaaggacagggcaatgccttgctttaggcaacctaatatttccaatagtcatcaaatatatttacgctccagattttgccagtgaatctatgcatttttgtttaggtgaagaaaacctacattaaatgttgtaaataaatctgggtttttaatacccttttctaaatatctctgatatagaaagttgcctagaatgatacacagtaaatctaaagttaactctagaaaacagaatagggactatgaagggagagcactttcactttttaattcatgtttctaggtgtttgacattttacagtgaaaatgtgttactaatcttgtatcttaagaacaaaagaaaattgtttttcctagcaatgtagtatacaacaaaaatgattacagtaaaaagaaatacaatttctgcaatccaaaaaagaagaacaaagcatataatttcagatagtatgctatgatatattgatctgaggaagccatttctcaaggtgtgagaagtctatccctggacagggtatacagaaatttgatacttaataaaagcattaaggtttttagaccaagcatgcattgttgagccactttgaaaccaggtatttctggatcattcatatttgaatgatccaatacaataactactagccacatgtggctattgggcacttgaagtgtaactttagtcaaagtgagatgtgccatagagtgtaaaatacatactccatttcaataaataaaaatatcttattaataagttttgatattagttacatattgaaataatattttggatatattgggttaaaatatatttaaaataattttcatctgattcttatttatttattgttaatgttgctcacaaacgatgtaaagttttatatgtggtttaaatctgtgattcacattctatgtctactttatggctcaggcctagatgtctcgtgagtggggaaggttagattgcagtctccataagcgctgagcaaccccatgtgaaaatcagtgactggatgtgcttggtttgaagttatatctatgaaactcaaatctttaagtctctcaggaataagattaatttttaatctcatagataattatactctggatagatatctggataaataataatctcaggtaggaaagaaactcactctgaagaaacaagagaggagtgtaaaaaaaaggaataattatttgtcagaaatctgaagaaagaaagtgttgagagtagcaggaaaccctgccaatctgattaccttctggcctagccattataataaagatggagtcaaattataattaacttaagaaaatgataattggctgagccaatgaagtactcagagctgaggcggcgcttgatgctaatctaatagttaattgaacacagatgtgaaggagagctctcctttccaattcctgcgcttcagcttagtgagcagtccagatgagggaagtgacaacatcacctccttaggaagtttcaaaagatgtcaccacagagactcaagagcttttcagcctttcttgggggcatctaaggagcagcatgctatagctgaaagatcccccaggagcttcaagaagtagccctagggatttggggatgaggttttcagattatacagttgcgctctgggtaagcttttgtgttttcttgctttttattgttatgactcatttacttttcatgctactgtgattcaaggtaaatatgtactacaatttaaaacatttaggatcaaaattaaatcattttaaggtgagtaggatagaggaaaaaggttcaaacacttaa

SEQ ID NO: 125919 - DNA, 1090 bp, Homo sapiens
aatcaggttcttagaaaggggaaacggatactagaaagtaatgagccactatccactataacatattttcaaaataaaaatcatacatgtgatctggtactaataaatattctaatatgggagcaaagacagactccaaaattcatacccttccagaaaaacctaggaaggtttgcgctcatcctctctacagcacagcgctataattattttggcaatctgggggagacccagtaggttaacttatcagtcctttaaattccagcactgattagtctgatccttttccacttgtttccttcagcattcttggaaatggttcgtttgtttacatatatttggcatatttcccatccctaatctgatcacctgcacctggaaaatcctggtaatttcatttgaaaattcaggtgccctcttatggaacaaagcgctaaataaacttcctgccggctgcacaaatttaaattgttctcacgtaagcacttcaccttcttacacactgaatgttatatgaaaagcaaacaaaaaagtgtattttgacagacagcataaaaatactccatgctgtctagagaaaaacaatctgtaattggaatgagttggcaaagttctccatattggcataattcaccatatggaacagcctcaatactaaagatgctggtgatagtattgtaaaaaagtacagagctggttcatgtacctccaaatacaaacactctttaacaaatgtgaaatgaaatatttttatatgtctggtttgaatatagtttaacaattattatatgaaggtaattatagttatccaaatgccatcaaaagaagccaacttccagttacacagtacatgttatgctatgtatttccacagtaaaattgaaaaatatatggatacactgctcttgcactgagggccgattggatacatatctgtacatccgaactctcttttatctctagacccgggcatcttactgcttgttggatttctccatatggataaaccttgactgcccaaattcagtctgtttaaaatgaaattcatcacaacaaaacccaaacctgtttctctcttccatctttactt

SEQ ID NO: 125920 - DNA, 1722 bp, Homo sapiens
ttgatttgattgaagccttactagaaagtccacagatacagaagattacagaatgagtatcactaaggcccttcttggctgagacacatttcatttagcaaaaataattatcataaaagagtatcaagattttttgacataaggcctgagaactacaataaccagagactttcatgaccaagaatttggtgggacttaaatcataattttaaatgtctttggtctttgtctagtctggcacactgtggctatagactttttgaaccacattgttggtatcagaggaggtacttatgtggatatgtccctttccaggagtatagatatgtgggtgatatccataaaatagatagcactggtggttctataagctaagtattagtgttctttctagtagtgttaggcagtcaccggttccgttggtctaactgtcaatccacagttttgatgagacactgtagtcatagatttgagtgttaaatgggcatactgtaattggaacaactcaaatgactgatggaagaggaactgtaggatgaagagtttcctaaaaccttgcccttaggaagttatttcggttagattatttgaccctggcgatattacttttctgtgcctatgacaactttaataagcagctaaaagatttacacagataaatataggaaggtctaagatgccatcatgagatcagagatcacagggagagcaagaaaagagattggggcttcaataaaaagagatcctatgtctagtagaatgatgaataagaatggggaactgggtacggagagactggtaagcaacatctgctaaggtattggaaaagcaggtggaggaagtagggtggagagccaggattcctagattatttttatgaatttttcatatatgtatatgtctgtacacacagaactagctataaaagcaaatattctgtattcagttatatatttattatatagttaaactacaactatatgtatgaatgtgttactatacatacatatgtctcctttctttagccactgagagcctaggagcagtgacgttagtaatgagcatatccagtggatatcgttctccgttaaaagaagccagggttccttggagaagtggttgaaatggttgatctggagcaggaaaaatataagatgaatctagagcattaatgtgctcaaaaagaaggaaaaagacagaaaagaaaagatggatgtcaaaagaacatagggaccaacctgaaaaacctcacaatggctgaagctggaacaatttgggcaataaaatcagttatgatattactggatcataacccaaataataatataaatatctgagtcatactaatataaataagtaactgaataaagaagtaaatgagagaagagacaactcttccttacagaataattacaattaaaaatgtagaagaaatgaggaaaataagaaatcctcattagaatgtcacagtactaactgctgcaggcaagacacaaggaagggtgctaaaattagtgggcaaaagtttaaagataaatggaatattttcatagtcataaattatttctccctaaaatatattaattacaaagaaaaaaaccttttcagtggagaaacctggcagacaccaccttaaccaagtgatctgggtaacttatcaaatcataaacttcctaccgtgatgtaccgagatgtgattcctctctgtggtatccttcccaa

SEQ ID NO: 125921 - DNA, 1025 bp, Homo sapiens
tgtttcaacataacctttttttgtactattgagtattttttgaacttcatggttatgctatatgataaaatatacagtagaggttaaaacattatttaaaatgtttttaagagatgtgaaatgtatgtgtaggaaatacactttatataacactatttaaattatctttctcaatacttagtaatttctcagaagtttctctacaatttcttgttacgtagagatttgtcagatggctttacttttacttcttggcaggactcccttgaatctttcaaatgaatgaaattctatgctgcaagttataccacagtctactttttttctcacatctctcaaacaatgagacttgggattttaccaacttcgagtgttttaatatgcccataaccatgttgggttatataccagttgaaaatctaatgaattttccagaaaaatacaaaacttacatacactaaaaatcttgcatacgaattcaaacaattcatggatccccaaaagacaatccatgaatatttatggaattcaaattatagtgcttctagacccacaaagaagcctagttataacaattttgacttatcatcttgatggaatgtaatatacagtgagaacaagagaggggttgtttatgatgaactgaaagctcaccatactaaaagtatgaaaaatgtgaagctcagaattatatatgtactataaattcaatgatataaaatgtgcatgctctggacaaaaactttaaaaaatcatgaaaaaaagaaaagtagttctgaaagagtagtaggattatgaataaatttttcctttaaaaaattcctattaaggctctattattttgtattaaaaaataatacagtaataggagaaacctacaaaagagacaactggacaaatgcaataatctcttatctattctctgagtatccactcttgctccctttcttttcattctgttgaatgaagctaaaataatctttttttttcttttttttgagactgagtcttgccctgtcacccag

SEQ ID NO: 125922 - DNA, 1143 bp, Homo sapiens
tttgattgctgtcagcccttctaaggattttctcatggactctgttgaaccaactttttcctttatttcatgcacgtggtttgtttgctgaagttaaggaaaaccctcttctctctccagtctagaatgtagatcatatgtgtagtaacagtgtgtggtgccctgaaaaagacatgcactttggagtgagacattcctatattcaaagactatatggttctgctattgtgtctttgcttaatttgcttagcatcattttccacatttaatgtcttcaggaaactggctagttaaaatggtaaaagttgcattcattgtcgaaattcttataaagtcgttttgtttttctttttaaatttaaaatacacatttcatgggctttatctaaaatgtcagtatttggaaggagtttaacatacagttgaagtaaattttaattaaagtatataaaatgtatgcttttctggcttccctggatgatgtagaccaataaatgtcactgccagttttctttataaatattataaaattatttacagacttatagtaaatgaaagatcaatttcaaggtctggataaatgagctaaacataaccattttttaatatgaagaaacaaaaccgtctttcttcatggctaaaataaacagaagctttttaaatgtcttaattttttatttaaaaagaatctggaatggtcacaacagaatggaagaattaaaataccatcatagctgtgactgcttaattttataacttgaatttgcttgaaatcttgtagatttgccagtctctcttgtagaaagtcccatgttcttaaaaaaaggcacataatttttcagaataatttttaattaactccttgtaagtcaaatggtaatctgtaaaaaataattttacaaaagactttatgcgttaaaaatattcataatttcctcaaaatttaaaataaccctatatttttgccaaatctctttgcagcctctattttgtttttgttataagattaacttcaccaaatgctcttttcctacattaccagtttatgagctgcttatactgtcttggaattttgagtatacaggaagaactattttaagaagagtaaaacatcatcagtataaggaatatcactaatgatcat

SEQ ID NO: 125923 - DNA, 1029 bp, Homo sapiens
aaccaaggaaagagagaatgaagggagaaaagtcctggtggattcatctacttccttctgttgatatctgttctctccttatctttcaccatcctgcactaatgaggttacagggaaggcaaaaataagcttcttgataatggagctcagagaagaaaaaacaaataagccaagacctatgttgagcaagaaataccgatgtacatggaaagccccagaaattcaatcatgggagcttggcagacaggggtaggtgtttgaagtctcaataagcaagaatgcagttgcagaaatcaaggagaattgctgcttaagcataaaatgttctcctagaatagttggtgaagagacatttaaataaaggcatggatatggcagaagagcattcctaaaatatgttaacattatacatgtagatttaaacatggaatatatacttatgcagatagaacttgtgatagagtgttaattagtgtatctgtattgggtattataatcaattaaatacagatttatcatagttcagagagctcaggatttgaaatcagaggcctctactccagctctgtactccccacttataataatgataattaattgtctgcatctcagtttcctctatttgaaaataggggtagtaatggtaatttgcctgtacattttactgggtttttgagataatcaagtgaaacaacaatatctgtgaatgcaccttatcacctaaaaactatttatattattaatgtttttgcagactgatacaaagtgagaaaattggaaggaaacaggtcctaaagagaaaaaccttgaaaatgttatgagtttatatttcaacaagtgctaggataatgctaatatagaagacaggataaagttgctcttaaatcgcataaaacatatgatttatcttgatagattgcactcactccaaatttcatcttccatatctttgacctctagttataataactcagaagatgattacattgtatgtgaattttccaagattcatggcctatatattttttt

SEQ ID NO: 125924 - DNA, 1034 bp, Homo sapiens
agaatgaggcagggtttcactttactttggcccttacattaataaaatgaacagaggtactacctatctcctatagttgttgtggaaaaacgaccacatattaatgtataaaaaacactgagcaagttcttggtatgtagtaagcacttaataaatgctaattatctgagtatcctttatcccacttctgttgggtggagcacgcttaggaagcttggcctgactcactctgtgagtgattatatttgagtcagggtgaaagggcagccagagtcgggtttaatatatgaaaccacatggatcccaaggcctggggaacacaaacagacctaattacaatgcctggagtgtgacgccttcccactcatttcaggaagacctgttttcttttagtggaatttcctaaaaggatcgtgcctgtagatagactaactcacttgctctttttctgtaattgaaatggtatgcaagtcatcacttcacttcctctcacttgtaatattcataccctgatggcctgcccttattggaatcagcgtagcttcctctgtggtcatgtactaggatatttcgtactctcttaagattcaaatttctccacaacatgcgcttttagaaaactagacccagtgatgaaacatatgactgcaaataaactatgaatacgcaagttaacattacacgttaccagatacccaatctcaaatcacttgtacacttgtacagctcttttaatacactatttcgatcttactatctttggagacataaaaaacgtcagagtatccaattgcattttctttaataactaaaacagatcatctagttttgcataaagtcagacttaacgatgatgtcatttttgattatttctttggcttaagcaagttatagtattttgctgacctttggggaaaaagccctctataagcctgttttatggttatttgagcagatgagtgttagagaagctgagtgatcattcagttaaaacaacagcaacaacaaaggtcctcttagtttttatagtcaat

SEQ ID NO: 125925 - DNA, 1079 bp, Homo sapiens
cagaactccaaaaacccaggggaatattctagaatatccaatataaattattagacctaggatgtgtgcagaggcaaaattagtaggaaaaaaaaactctcttaacatttctatctggtttgttctcaaactgaaatatttgtgtgggagggaaaatgtttgtttttctatttagaaagaagactttgatctactaagtaccctaaagggcataaaggctttctctgtccatgagaaacaaaatctcattagaagatggaataacataaaggagagtatagtatccatttcatttttatggccttggagaaaaaaacccatcaagttaaagctgcttttatgctgcacactcacatgttgacagctgagtctgaagaatttacactgtgggaaaacacaggcattgtccacagctctgtacttcatctctgaaaatgtgtagttcatttgagaattcagttatcagtctctcagcactaaacgtgagaactgatttttccaaattagcacaaaggttacatctgacagggtgcaaaaaacagaactgctgcaagatggaagatacagatatgtttgggatagaaccaagggactctgaatcacaagccttgtgaaattaaataccattacagaataaaattgaaaacaatgtttacacattcatgcataaaataaatgagttttgaggcatcagcatagactatacaatcatacgtgttccagaattaacacattgctttgcaaagtagtttttaaaggtcttcaggaatattaaaattaatttcagcataggactttatttttctcaaatcagttcaactcttttggaagaatcagttcacctattttagatgacttttaatttttgttcctggtaaggaaaagcaaacaaccaaacagttctctaaaattgtaacttgaaatatcttgattttttaaaatggagtttcactactttcataattagaaaatttatatgataatgccaataaatgtttaaattcagttttagcaggaaaatttaggaatgaataacactttcagattaagaaacttcagacaatggagtctgttgtgta

SEQ ID NO: 125926 - DNA, 1043 bp, Homo sapiens
tgctttctgtcagaatgaaaaatttgtttgactaatatttttaacagatttatatgtttatttctgttcttacatatgataatttttagaaatctgactctttcctactcttcagaagccacaatagtagaattagtttctatgtttaggacactgtaatacacagacctaaaataaaatgtaacacatttaacaaaatcaaaataatatgacaactacagatgattattatttttaatttcccaatgtcataaaaaagtgatccctgctctaatatcttctcaaaaataaatggaacaaggaaccaatgagttatttaaaggactcattaactttcatgtgtccctctttgtaattgagacagtcgtgtcctagaagtaccatccaacaaatgattaatgaggtttccaaatattctaaattgactgacatggaaggcagtgaacttgtgtttagccaaatctctgtgaggctcaggaaaaaggagatacctgtctcttaaataattcatgatcatgtctaatattaaatgcttacaaatgtattttttaagtgtaaagagcttaatacgtaaggtaagtaaggaggtaatttctgaaagttttctctccaaatttctcattatgactggtttagatgtagagatcttttaatcttgttcatggtagcaacaaacttctacaaacgcattgaataatacagaagaaataacttattggatatttttccactttcttgttctatgaactggttaaaataccttttacaccacagaaatttggatggcaatctgttctatttgatcacagtaatagctcctttgaataaattataattagatgccttctcaggttagtgaagggctggaattatctgcatcagtgattaaattcttactttcacttgtgtaaatttgctatagctgtaattttgaagtaaaatgttgaaagtgaatttaagaaaaagttaatattgcagtatcctgttgcaagtaaactagaattttttttcaaatttactgtactttggaagttcctttgtat

SEQ ID NO: 125927 - DNA, 1105 bp, Homo sapiens
taagatcaatatagtagtatatattagtttacatcaaggggtggaaatgtttatacacagttgtgtgtgtgtgtgtgtgtgtgtgtgtgtgttaatttgtatagcgtccttagaaaagtctgtaaacagattccatgggtgaagtttccttaatgatgttcaggagggtattttctgaattttcaaagaatatgatttaaataatttggccaaatagcaagaaagttacagcatctggtttaaactcatctatcacgcacagtaacatgaataaatggagacattcagcactatacacacaacagaaattgtgttctcctattgatataattaaatactcatagaagcctaaatgcataatagcttccagaccctttgcttaatgccaaaaagcaatggctccgcttccaatgaacttgataggcatatgttcctagtcaggaccattgtgagccctctccagtttctaaacatttattgctggtactgtaataataaacatcttgcatttataagatgtaatgttgcctagaatttttcatttttcaagaatgcagagcacactctctaatggctctcatatgtccagtgtgcccacaaacaatttgtcttctgagtggagtgttaatctgacacctcaaggacagacctgttttcagaaggacttaaagaaaagctacacacattcataggcctcaataactactgaaaatcctagtaaactgtggctgggattactcagagttctggatcacatcacttcatgccacattttgcttacataagagttattaaagatgatagtagaatatttttcgactcattgtcaaatatgtacataccaaacacacatttaatatatgtacatatacatgaaatcaagctaatgatgacatttatggtcctgttcttttgttttatctggactcagaggtgtgtgtgtgataggaatgtattttttatttgtttaacccagttgcacatgataacctcacagcagtgacgaaggaagcaaatatgtgctttggtcataaacaccctggggcatagcaaaatccctcctctaaagacaaatccaagattttcttctcaggtcaagggcagc

SEQ ID NO: 125928 - DNA, 1066 bp, Homo sapiens
ttagccaggtaatcaaggtcaatatcaacagtgggttgtaaatcatgttgatagtttatgcttttgatattattgcattaaaatgacaatttacctctgtgatctttcttcccaaactcatatcttcaatctaagcacaagaaaaacatcagataacttacactagagtagcattctacaaaatacctgatcagtaatcttcacacctgtcttcaaaaacaaagaaagtcatcacttctccgcgcaaatgaacgaaaccaaacaaacaaaagcctcaaaataagcaaggaaagtctgagaaactgttacagcatgagaagcctaagcctaaagagatatgagaactaaatgtaatatagtatctgcatgggaccctggaacagagataaaaaatgtcagattaaaacaaagagaatctgaataatgtatggactttgattattgaaaatctgtcattattgattcattaattgtaaaaaatgtccataccatgtaaaatataaataataagaaaaataggatgtggtttatggcagacttatctgtactatttgctcaatgtttctgtaaatttaaaagtattcaaaaaaatgaagtctatcttaaatgttatatttaaattatatagtggaaaactttactaatagtgaaccattctctggtgtcaataagattaatgcatgtattagtcattttcacactgctatgaagacatatccaagattgagtaatttataaaggaaagaggtttagttgactgacagttccacatggctggggaggcctcaggaaacttataatcatagtggaaggggaagcaaacatgtccttcttcacatggcagcaggagagagaagtgcaggggaaagagggaaaaaacacttataaaacccttatgtcttgtgagaactcactcactatcataagaacagcatgggaaaactgctcccatgacctagtcacctcacatgaggtccctctcccaacacatagggattataattcagattacaattcaacataagatttaggtggggacacagagccaaatcatatcattctgacc

SEQ ID NO: 125929 - DNA, 1050 bp, Homo sapiens
tatttgctggaaatctgaactttttttcaagtttgtttttctgtgatttttattttttgtgtctttggagacgaaaagcaaaattgatattaataatagtttctactagaggttttaaatatttaaaataatttagaacaagatgttttatagtttacttttttagctttttttaaattggttctattttatttatagaagacattatttgacactctttatagctcagatatggtacagggactaatatattcacatgtaagtaatatcttttgaggttaaaaactgaagtatttctatgttttatcactgctaagaagatttttgccacgtatttacaattttaacagagacatgtcatttaatatccatgcccatgtaggcttttaaattaatatagaaaagctaacttgctatattattcctttgctctcaagaagaaataatcttagcttatttggaatatatttatttttctaaactaattgtgtcctagtgttccaggatcaaaggccggactacacacgttgggtagttttctaccttctccaatgggtagggaaagttaaattattcatctggggtctcagtcttttaagaaacctaggaaaaagtaataaataagttgttcatagtatctactgaaaaataaacaactcagaagtccacatgtgaaataaacttaagtattagaatttgaagactttaaagttatcccaaggccacaactcactggttagttaactagtaactaatagtagttactagtactagttagtaatactaactagtaactactaataactagtatcataactattaactactaatagttaattagttaactactaactactaatagttaattagttaactactaactcatggagaacacttataggtttgcacagaaggtagcccaactcatgtggatcatcttattatagctcaaaattagaattttcttcctttttttggatgactttgcttcactataatttgtaactagttaacaaccttgtacttggaagctaataatgcataggatgt

SEQ ID NO: 125930 - DNA, 1035 bp, Homo sapiens
tcttccaagattttctcatccccattccaaggcatttctaccctgccgcactttcaacctcctattgtatcatttgatttaggctaagatgtgaataaatgatgatgggagataaaaactgttcctctcttaaactatactagttcttctagatatgaggtctataattgcatcctaatttatactaattgtgacagatctcacagtaattgtggcaaaactcctggaactatattattgcagaaattagtttctagtatcaagatttaagattttttaaaagaagaaccaaatagcagtgatattaatctattgtcaattacaaactattaggctggaacactctatttagttattttgatgatgtcaacagaagacataatctggttgtacaactaagccccaaggcagaagtcattactttatgctcttttttttagaatagacggttcatcaatgacatggtgaagatttattctatcacagccactaatgcagttgatggggtggcgtcctcatgccgtgcctgtgccctcggttctgaacagtcgggttcatcgtgtgtcccctgccctccaggccactacattgagaaagaaaccaaccagtgcaaggaatgtccacctgacacctacctgtccatacatcaggtctatggcaaagaggcttgtattccatgcgggcctgggagtaaaaacaatcaggtaagtgggtctgcatttcaggtatccccatgaaagcacattttaatagagaaattcaagcgttctccttaatgtttctctgggagctatgaggttgctatttattctgaaataagactttctacttaccatttctgttttctcccttcttgcgtttattaaacacttactgtatgctatgaaagtactagttactggtgacataaaatattaaaagctcccaaataagaatgcttttccaaaatattaaaactgatttcttgtgtattgtttaggtacagcaaataaactacctatctataggctggctatagcagtcatctgggaacag

SEQ ID NO: 125931 - DNA, 1062 bp, Homo sapiens
cacacgcacaaacaggaagcgatcatttgggagacagaaataaaaggaaagtcaaagtgctggcagatgaagcacaagaataggatgtgactttggaaaatggtattcaaaggaaataaatgaggcctggacatcagaaagtatagaattcctcaggtttttgtatggggtgaacttataaaaggtaaatcttctttgggtttcttggcctgtgtttcacttataaaatgttattaatgaaacatgaccaattatttgtattatgaggatgaaatgagattaatataagataaaggagaaatataaatatgagggctgattattgctagattagtagagctagatcctgatattttgggaagagtctacagtgagactccagaggttcctaggataggcccatccaagacttggcatgacatttttgactcagtgaataataggacttaatggggctgccagagcaaaaaaatataaaggccaacagataattcagagttgcagtaaggtatcagaagatagaaaagtacatgagagtaaaaagaacagaactaattggattatgtctgtattatttacatttggtaaattaaatcacaaaatagctgattcttagttcactgctgtaaaatcttgcataatgcaattctgctgttctccctgactactgaatgatgagttttgctaacagtttttgttccacattcagtttataccatgtgctagacaaaatgtcagatatgaaattagtaatttaaagaatataatttaattggataaggatgagacagatatgtaaacaaacattgcagttaagtgatttgaagccatgaaagaagcaatgggccatcatatctactgaggggggtgggatcagaaaaggccctatggaggaagtgaatgagacttaattgataagtaggaatttgccaagcagacaagggtcagatgtgagtgtaggctagtttgggggaaagacatttcaggtgaagagcacagattgaaaaagggcagaaacatgaaacagcattgtattgtaattggttctaactgaagtacagc

SEQ ID NO: 125932 - DNA, 1118 bp, Homo sapiens
accttcaggttccaaccgccgccagggccgctccgcccagtggagcctgtccggcccccttgctgcccgctagctcccgccggctggcgcaagctgtcggcgccggggcactgcgggcggggtcggagcctggccttcctgacgttgcagctgccgtccccgcacgttccggccagggcctccctcttagggccgggcggtgcccgtggctcaggctgcagagtagggaagcgagcggctgccgaggcacagcggcgatccggcgggggcggaaaatggcggcggcttcggaggagctaaatggcgccgggacccctggggggtggggtgggccgggaggttgagtagagaactgggccagaaggagtggagacagtaaggaagccctacttgttttctcgtggtgttctatttttagtttttatttttgttacgttttcggttttgttttatggtccagcgtaggagaggtaggcttgggtggggtcgagagagtgggggtgggtctcgacccaacttccccccctttgcttttttgttcttttccctcgtttgcgctttagattcttctgtaattttgcgggggttcagccttgctcggcgattcacggcccagacatagagaatcgggatagctggccgaaccgtctctctcagtctgactctctttaaagaagggatgtgggctggggcgcggggacagtcctggtggagcacggaaaatgcggctgtaaagttgtaattaccctattgtgccgagttccgagaaagttcttaaaattgttaagtccactttgttctctaaaatgtacttcgctttgagaatttcttcagggaggtatgtagaatgttttaccacaatctccagagcagatttgagagtagaagtggccaagtgcccttttgtgcaattgaatgatagagcatatgtctttatataaaatactcggtgtagataaggaaaaggataatagtatacagtatgagtcaggactcctccctttctctcattgaatttgtgtagttgcttttttcgcaactcattcatctttgtgtacctctttttaatgtacatggatttgattatgtgtgcctcctttctgacagtcgaggctgca

SEQ ID NO: 125933 - DNA, 1050 bp, Homo sapiens
cagttaagggttttcatgttttttcattacttcaaatttctttaagctggttttgaaattatatttcaaatagctttctgaggattactgtcttttaataacttgaataatttgccatcactttaacatttaaagaatgactatggcgatacaccaaaatcttatctttttgctcttatggtgtacttagagacaggatttcatgtatttggttaggatttagaaattctgttaagatttagagaaaaaaggttaaagctacattccttaacgttacaaaaattgtcatgctgagagaatccaatttggtgtgagaataatttttttcttccatacagaaagcacaaaaaccagcctgattgtatctggaaaaaaccattatgttacaggtgtgaaaaatacatttcatgattgtggtgatttttatctcattttaactctcgatactaggtgcttctgtatgccaccaaacaagctaattttttttcttactattttagttgataggctcaccccaaaatatgcttttggggactgatttagcacctgcatattctgcgtgaatctctttaattggttgcagttgagctaatggtggagccaaaatgctattgccctgtcttcatcaacatttaatcagtaagtactgggcattgcatctttcttagaactttaagttcatacgttgcagttatatgaatacattattttatgtaaacatttttctgagtgttcaggttttagaagtattttgaggggaagaaatcaaagtttgggcgttatgacttgagctttgaaaacagcatggttgggaaatgtttactggtggagactcatatcaaaagtagatagctgtcctctagtcctttttttagagatctcttttttcaatcctttagttatctcattacaccccaggggtgctttaaaggtggggagatagtgtatgtattttataaggttagtttgatatcactggttagtatttaaataacaacaaaaaacttgcctttacctcctccgcaaaaaatcttacctttctattagcct

SEQ ID NO: 125934 - DNA, 1065 bp, Homo sapiens
atatggatagttaccaaatgtatgtggcgtttgtttactttcatgtcatttctccgtttatcttgatggtgctttcattttgtgaagaaaattcctgtaatagaaatcacaaatagattttgtgtttgctttgattctataaaggtagataagtttaaataaaaggaggaacgtggttgtgtctcccccaccccacccccgccccacccaagtttgtagaaagataatccattccatgactgagtactagaaataagttgtcagagaaaagcacactggagagctcattatgaacagtttaattttctatcatttcatatatttaaatgtcattttgattatgtacactgttaggtcattcttccaagcaccagtggtcaaagctgattcattcacttcccatcaggtgttacgtatcagaaatgctcattaggtttattttagtgccggtgtatattttagtatctaatgagtaaatgtgctttaaaaattaacttcactgtaaatcacaggtgtctggtgatactgtatatgtccatgtaaagagcctctgatggtgccttgtagaaaagtactcagttttgaaaggatgaaatctttcaagtgtggcgaataacacattgtaagctcctgaaccatgcatgaagtgaaaaataacatttttgctttttgaataagcaatatagttttattgtcaaaccagatatgaaatgctgcaccttaaaatccttgctattaagtaatcctccttactcaagtaatagtgacattgttttcaatagttggtaattgaaatcaacaaagcctgctagaatagactccactaacagctctgttgacatttttatgatatataatcatattttaccatcttaaaaccaagccatagtaaacattaattaggtaccttaattgaatatgccttatgttcatttatggctctgctgctcaaacttttccacaaagtatatagaggaacaaatcccacggggcctggcaccatagtccaaaacattcttcttcaagtgtgtagtgttcctattcgtatcttgaataaagtttgtg

SEQ ID NO: 125935 - DNA, 1615 bp, Homo sapiens
aaagagtatgaaaaatcgttgggaagtttatggatgattttaaccttcttttttttacttttttacatttctttctcccatcttttgtagtaggtattacaaaaaagccagcctttaaaaaattaatggattcagaatgataacaacatgaaatctaatagcttaatggttctccagcaggatctgtacctttttcactgaaaatgcaaagaggatctaattagaatgccgcaaaaattagaattttaatccctaatttttgctgaaacgtccccttgaacctcaaatcatgtgcttttttttttttttaaggtctttggttggcttttgaggataaagatgagaagcttattgaaagaaacctttaaaaaccatttcatatttcataaagtttcacattgctttcaagagcttgtaatttgtcttttctggcctaattgtttaaggttttgtttttgttttttccacagattcctagatagggttgttcatctgtcatcttaaaagggttttctggatgaatagggtactatataatttttaatgctttaagataaaacataaagaggtgttaataattataaaggaaaactatagttactaataatatttatggtgctgtattgattgatatacacatcatgttacataatggtaccacagtctacagttcatagaatcactagcatagctgagcctgttttttttttttttttcagagaacgtttgtctgcctgatgagagccacttgggttaagaaactacctgtgaatagtcatcatttctgtccttcattggggaatacttttagaggccagtttccaaaaattctgcttaaaaaagaattctggttttgtcttactcttccagatgagatatcacagaggcttgggcctagattgtcatcagcatactgctatactattcgtttgttcttattaagccttattgtgtgtaatgctgttactttttcagagtgttgcggagataggaacatgggagagaaacaatctgggtaacatgaaagtgatgctggttgctaagggaaggcaacttgattctgtgggaagggctgtagctgatccatccgttgtctaggtaagtctgcttctgttgcaaggatctcacatgatttgcaaatttgtcaaaactagatcatgatttccatttacctttattttgggaatggcataattactattgtaaaatgaatgatgtccttttcaaatagtaatttgcatagtaaaattttaatgaattattggatctttaccatgtaaatgttaatatatttaagtttttgtgccaaaggaaaatacattcacttcagtggtaaatatatgaatggactaatatcttgtgtataggagccagagagagccaggcgtgttggcacgtgcctgtacccagctattcgggtggctaagacaggagtatcacttgagctcagaagttcaaggctctaggacccttaagactgtgcctgtgaatagcctctgcactccagcctgggcaacaatgaagacgccttctctaaaaaaaaaaaaaaaaaaaaaaaagcttaataaacattgagtaattatatcagggtttgtgtcctctgtattatttagtt

SEQ ID NO: 125936 - DNA, 1899 bp, Homo sapiens
gcaagaattatttagtgttcctgtttttcagataatagagcttaaatacctgtaaaaaatgttttgaaaaaataattcttaagataaaagttttgatgaatcttctgcttaaagaaaaagaagttaagtacctacaaagctgtccataaaaacacagtaaaaaagtggggaaagttttgctgataagacggattctcttttgttggatgttgcaaaaacgttttttaaagtattacaaatgttgtaggtttttaaaatttatcagagcaaacagattctttgagatatctaattctaaataatgggtataaatttgtgaaaggcagtttttgaaatctgaactctcattgcagttttacatgaagaacactgtaggcagatacccaaataaatgtgtgtggtatttcaggggattataagggaatacttcatatttgggaataatttttgaaatcctgatctggaatctgttcttgtacagatttgagtatgagcacagtggaagaggattctgacacagtaacagtagaaactgtgaactctgtgactttgactcaggacacagaagggaatctcattcttcactgccctcagaatggtaggagaacttgctgacatataattctgactctctgaatttatgaattccatgtcacttttgacccctattgcccaaataggggtctaggtgcctatgagtttaggctgcacagtagaaaaggagattatctctttaacataaatgttagtttttgtcaatcttgttgctatgttataaataggatctgttgagcccccaaaggtaatgatggaataactataatatatacttctttttttatactaattggtaccagcagcatagttaatacattagaaaatgtagaattattcctcaatgcaagtagacttttttgttagaaactgtgttaaaaaattgtacacaatcatttcagtatgacttaatatggtgatctacaatgaattaagattcaatagctttccagctgataattttgttgttactccccgacttgctcattatttatgtcatttatttattgtgctctgaagttcatctttactcaacctaggttatgtcttctcttctcactctgtatataattcataggttatttaattcaaagttaggattttaagtagcacctacctataaagatgactcagaatctgtctttatacagaattctctgtgcttctcataggcatcttaagtttcatatgtcccaaacaatccttacatgtacttcctaaacctagttctcttttttcctttctctgtgaatttcattacttagtgtccagatcatgaatgtggttgggaataaattacttctctcatcacctgcatcatttcatttgaagacttcttgatagtattatgttttttaaatccattgcatcctctctgtttcaagcctgcctttgttagttcagtttctcatttctcatctaggtagctctaatacccttttaaccagtgtcctacctatcattcgtctttcaagcagctgatgaaattgttcctgatacatttaatagcataaagcttcccaaggtttttagaatatagtacaggttctttaatttggcccataggccccagtcatttctgctttcctcatagtcttacctcctgccgcatttcatatacctgtgttccagcagatcacactatctttattttcctaacatacctataccttaagcttctcatacgtctgtgtcattgcacatattgcttctactgccaagagagatagcagttttccccgggcttcccttctctttcaagtttaagacaccgccttgaggagttgaatactgcattgcagtaggcatagaaaggcagtgtccttttgaatcctgtttgcacaa

SEQ ID NO: 125937 - DNA, 1076 bp, Homo sapiens
gtctgtatgtccttgctttgttcataaagataataaaattgtttgtcacatgcatttccccctaccccaagaaccatatttgccctcattgagaagaaagcatgctttacaataggtactaatattgttattcctattttataagtcaggaaactgagacacagaaaattataataacttggctaagagcatatctaggcattctggttcctgtaatacatactcttaaccccaatgccatattgcctcttcagtatgctgtatgacagcatgaaagttagaagcctaattagtttattcttaccgagaaagttcttaatgtgtttctatttcaagatcatttagagtagactggcttctataggaggtacaatatttcaagtgcaatactgttggcacaagacagcataccaactgcaacattaggttgtatttctgatttgcttagcaaagagtgtggagtgttcaggaagattctggagtagatgcttttgtccatggcaatggggatgcaacacatggctgttggcactcttagcacaaaggagggttttgccatagctgagaactttgattttacactcagcatcaggcaaaatcacatcttcatcttttgaaaaagcaagacttggttttcagcatggaaaatcatatctatcatatcttaacaagtagatatgtactctgaatttagagttaattgcttgctaaattgaacagaaaaacttttagtttactgtaagacttaattgaaaaacagtgttaatattgcttccagttgtggcatagacaagcataacatttctaattaaatattcgttcctcctgatgattcctatgtttttttaaaatctttcctaatttgactatcattatgttgtgattcaattctaaaacttaattggcctatctatacagatgtaatcctaaatattttctaagctagaatttttgagtggctattttgatataaattgacttcaaccaattcattttgttaaagtgcaatgtcttgttcatgattgtaggttcaaactacacttggtattagttttattttatggtggtaaaccaaa

SEQ ID NO: 125938 - DNA, 1025 bp, Homo sapiens
ttcttttttaccctgttttacttttatggttaatcattataatcactgtcttgcattcaccaagtccttttttttctctcacttatttggtgaactcataactgtctaaatctgtctttgtctgtttatttctgtaccagtgcagctaattgaaaagtattagagaaaaatggcacaagcaggctgactattctcactctaattcctgatcattaacctgaagtgggctcataatgctgcccaccagtaacaacagctctctagtgttctttttcccactctgagatgactgtttcatttgtcccgaaacttgcaaataccttttccacctttttactctgagctgataaccctattccctcttcacaaagaaaatggaagtaaccagaaaataatttctacaaattcccactaccacaaatacatacctacctgcatctatgtccatccatatatttgttgtcctatcttaggcctacccttccatttacttaatttcttcccctttacctactcaaggacattgttccaataattattttgtttcttctgtatcaccagtttttcttctactgagtcattcccacagtatcacaaacatactgttatttttccttaaaataaaaagtccctggtcaggcatggtggctcatgcctataatcccagcactttgcggggcagaggcgggcagtttgcttgagcccaggggtttgagaccagcctgggcaacaaggcaaaactctgtctttacaacgaatacaaaaattagctgggtgtggtggtgcacgcctgtaatctcagctgctagggaggctgaggtgggagaattgcttgagcctgggaggttgaggctgcagtaagctgtgagtgtgccacagcactctggcctggcaacagaacaagatcctgtcaaaaaaataaataaaaagttcctttagctcacttttggttcttactcaattttcctccttgcctttagagcagaataccttgaaaattgcctatatttgccttcatttccttt

SEQ ID NO: 125939 - DNA, 1143 bp, Homo sapiens
tccagtagttttgattttttttaaaaaaatttaacgttatccttggctcttcagtctcttccatctcttctttgtctacaaatcatagtggctctgccatccaaaatacattcacaatttgaactaccagccactctcacttgccttcaccctagtccaagccactgacctatcttttttgcatttgcccttcagactgtttttcttatagcagccagagtgagcctcttaaaataaaagattatattattccactattcaaaatcttccagtcgtttcccacctaagagttaaaaccaaaaccttctggcttacaagggcttacacaatctcctactgttcttgtttagtctgctttagctacactggcctccttgctattctcgtgaacactccaagcatgccctgtctcagagcctttgcacttggctctccttgaaatgctcttccttgagatacctgtaaaactagcttccatcctcacttgttccaagtcttggtcacttttcctagcctcctatataaaatttcaaatactatcctccaccccaacacattccctttcctgttaggttttttctcactactaatcaccatccaacgtagtatcttgtccattttgtgtctttccccactagaatacaggctccatgaagaaaggatttttgtttcccttgctcactgctatatccccagcacccacagcaatatctactatgaattaggtgcacattaagtattattaagcaaatgaatgtatgtatgtgaagatgtattaacaaggagtgtgttaggaaattagatgatcatgttttttttcccatggatatttttagaataattagaacttgccgttattattctggagatgaacggttccttttcttgaagtttcagaaaatgatcagagctttgaagtgaccatgactgcaaccacagaagtagcagatgatgaggttactgaggggactgtgacacagatacaggtatagtaaatcttttaactggcctcaggaggatgatcctttacacattgcttagctaataaaatgatgagaaacctcagcctcccaagtagcgaggactactggcacatgccactgtgcccaggtttagcccttattatgaaacaaattacaaagt

SEQ ID NO: 125940 - DNA, 2058 bp, Homo sapiens
tatgttgatttaaatacttaatggactcttggcccattttatataaaactgaagccaatagtacatttacttgcttaaatgaaggtcatattgtgttaatgcatataattttgttttcatactgccataataaaaacagcaagaaatatttttttgtaaattggatatatttttactatatctaaaacaagtgaattccatatgactatatttaagttttataatgcttagcattacaaagatgaatccggttgagcattaaatcaagctgccatttttttgttttgttttgttttgttttgttttacttttaccttttcaagattttgcagaatgagcaactagatgaaatatctcccttgggtaacgaggaagtttcagcagttagccaagcatggtttacaactaaagaagataaggattctctgactaataaaggtaagataacactgtgaattttagtgcctagtgaaaaaaaatggagatagaaagggcttatagtcatcaggattctgagttggaccttcatcactgggattgagcagttagagtaattgagcttttctaactgaattaaatttggccccaaatgactttgaattaaggttatgaaaccaccatttgtttttcagtaattaattatttctcccctgatttgaagtaaattttgtcttgttaatttttgaacaaatgcatagtggtggcatttaagacaatatagttattgcttatgagagtaggaagtcaagccttttcaagggtctactaactttggtctgataagcagcttagaggctcaaggtaacatagtgtttacagtgttggctatgctcaagcatagctggggaaggtgctacaaaaaagtgagggttgtgtctgtgccactctgaagtacagaaaggaagcagaaaaacgtaaataattttcaaccactgtatagtaaatactcattaagaatacattattcacttgatattcaatatttaccttgccctagagttttttgtatgtgttctttttgcccataaaattttcactggagaaatttttcaaaaagttttgagcatgtttggctttttttatttttataagtttctttttagctgttctatattgttgaaaggctaagagaggtaattttttttaaatcttttaattaccattgtctttttttagtagggtcaaataaatgtattctagcgtaaaaaccagaagttacaaaagcaagtttacctagagacctttcagatttcagaggaatgagaaatgaaattagctaaattttatccccaaatataatttaatcacaaaggaaatctttggtgttttatttctttcaaggagtaacattttttataacattacttgttttcttttaaaggacataaatggaagcaggggatgtggtccaaggaagaaattgatattttgatgaacaatattgaacgctatcttaaggtatcttatggcatatttttatgtttcaccaatttgtttattgccaattgcaaaaatatcaacacagaatgttgtgtgcacttattaggagctttttacttatttttgtaatggattttcataatggctaacatgtagctgaataattctaaaatacattattatagtacaataatattttgaattctcagtttaaaatagctttactgctttagttaccaccctaaagtttagataaaatcttagtagcctctcaacattttaaagccttatcttttcaagaagcctatagagtttaatttattttgtttaaagcttaaggtatgcatctttgttttgttttgttttgtttttgttttttttttttttgagacagtcttgctctgttgcccaggctggagtacagtggcacagtctcagctcactgcaacctccgtctcttgggctccagctatattctcctgcctcagcctcctgagtagctgggattacaggcatgcaccaccacgcccggctaatttttatatttttagtagagacggggtttcaccatgttggccaggctggccacaaactgctgacctcaggtgatccacccat

SEQ ID NO: 125941 - DNA, 3420 bp, Homo sapiens
tgaaattaacacaaacttgtattcctgggataaactcacttttctacgtggacatactaatgtttttatacattgctgggttcagtgtgctaaaatattattaggatagctatgttagtgaatgcgtttgacctgaaaattctgttctgaaactgtccttctctggtttcactattaaggttatgctagcctgataaaataagcaaagaaatgtacccacttttttttttttttaaacttttgatagtttaagaacaggattgtgtgtctatttggtaggatttacctataatgtcatctatgtcatgtgggcctagtgtttttattttgagaagattatttaataactgattcgattttcttgatggtctgtgcctatttgattttctgtctcttccagagtcagttttggtaagttgatgtttgatgtcttctaggaattgattcattttaccaacatttaaatttattaccataaaattgttcatttctgttaatggtctaatctctgcagcgtctctatttaggcctcatttttccatttctaatactgtttgtgtctttttttaaaattttggcagaactttaatcatttcaagttttattaatcttaatggatgttttcaaagaaccaatttctagattagtttatcctttctgtgctttgattctggattccattgattttgctcttgtgattttcttccttctgctttctttagatctatttttaactttttataattttaaaagagttgatggaaattcaatttattgaatttgatagtttattcttggaacatttaagtgtcacttttgtatctcttgcatcatcttaaaagtttatatttgatttattaatgaattagtgatatattatttttctaaatgccgttgatgacctttaacattaaaacaaattttaaaagcatagtatatccatatgcattttatcagaaatccctaaatcaaagaaatgtaacccatttaggcacgcggaataaaagatgctacagaaatcatctttgagatgtcaaaagacgaaagaaaagatttctacaggactatagcatggggtctgaaccggcctttgtttgcagtttatagaagagtgcttcgcatgtatgatgacagaaaccatgtgggaaagtatgagaacttgtaatgctgcatgttttcatgtaattaggggaaatatttgaggaactgtccatttttttaaacaatagaaatatggtcaaggtattaattgttgttaatatttttatcctccaggtccatgttgtgaatatggtgaaaccttattattaaagcctcttttagaaattaggatctaattcactttatataggttagatttaagacttggcttacttaatatgtcaaagtctgctttgtagtaaagtaacataaaaaatacagtaatgattaaagatttaagaagtgtgaaaataacttgaaatttattggtaacatttttcctatttatttttagaatatagcattcctaggtcagtggcctttttttaaatccagaatggaaaagaactacatttctgaaaacaatgtatggatttctgttttagatagcatttatgggaaggcatcattaagattcttcaaatgcaatgattatatactgttactgacatatttttaatttctctttggaaattttaggtggcagtagtatggcttattagatactgccgagctaatgttggagctctttctctagctcttcagcagcctgctaatgaaagtacatttgaaagctgaagaggattaaattatgtttttgtgacagtggaaaaagagaaaaaattttaaatggagcataaatgacttgttagcaattcataaactttccatgcattacaaatggttacaaagtgagcagcgtttcataattattaaatggacatttttaaaaagaacattacataggctgtattgagtacttgcctactgtaataaagagcaagagtatgtcagatgtccatacctgggtaaaggaaatgaagataatcttaatttgttcagtgctttgagggaattttctgtagattttctttttagctctagtttacaatgtcacccataagtttttttggagtagttatgatttgagagtgccaaaatctaagtttgaaataaaggaactgttagacagcataggagcaaatgtatgttttaaatgttgattctttttctagagaaaattatacaatccttacctttattataactaaaaaatatttactgtttaaaaaaaaataaaaatagaagcatttattttcaactttttttttttttttttttttgagacagagtctgtgttgcgcaggctggagtacagtggcatgatcttggctcactgcaacctctgcctcgtgagttcaagctattctcctgcctcagccactctagtagctgggattacaggcgcctgccaccagctaatttttctgtttttggtagagatggggttttgccatgttggccaggctggtctcgaactccttgcctcaagtgatccgcctgccttggcctcccaaagtgctgggattataggcgtgagccgcaccctgcctattctcaacttttattaatccactttaaaatgggttactttaaaagtattatatgctaagtgacttaacattcagctccctaaatgaaattctgatttttattgaggtttttagcattcattgttttaattgattttttaaaaatttctctgaatttctagatatacacctgaagaaattgagaagctcaaggagtaagttttaaagtttttttcattaattctaattttttatgtcttacgtccttaaaagttttactttgaaaatttcaagaggtttttggcagactggtataattgaattgtgctattaagcatgattggccttaaaaagatcacatcaaatccattacttgcacaaaataaccattctcataatgtataatctggtctcctgatgccattcaccagatgcttcctcagaccactaataggggttccagaaaagattaaggggccatttttggtagcctgaagactaaatttggggaatttatataccaggatgaaaaccagggttgtgctacatggcttggtttagaatggtgacttggcaaatgtttcagtgaatatctgggctgactcaaccttgcaaaggctattgaatctcaggaagtagaattttgctttattgagttagaccttaaagtatggtttaatgaattgtatggatcatgaaaaaatttgaaggtagattctgtttataatgataaagacctgtgaaactttagatgtctaaagaagagtttgttgggtatatgctcaaaagggaaagtctggggcttgcctgggagattgtgtcagtaacctgaggggaaattggtctt

SEQ ID NO: 125942 - DNA, 1026 bp, Homo sapiens
ttccttgagcttattagatatatcaaactaatcttttactttgtttttgtataaggtaacattgtcttcagggacacaacatcaccttagtgtcaagatgattcagatctaacatgtttcagttttgtaacaatttcaatacttccccagttgagaaagtattttgaagacatacatgcagcaagtaattttaatttaggcccatctaactgttgaatttacattagcaacagctaatcagtgagtgtttatgaaaaactttagtcacaggtaagtcccaaattaggaagaagctgtgttccaaagatttgtaaatattttgcttattttaaactcaaagtatatttttccatagaaaaaatttatgattggtgtttcagtcccctggcaagaccacaaatgcctcttaatgcatgcagatgtcctgatcatactgttaaacctaatctttgcgaccaacaacgtatttaggctctgctattaactgtcatttaacctttctgagcctcacttccttctgtaaagtaaagagattagagtaggtggtctcatagtgcccttttagccataatgttctctgaaggatccacaatccatgcccactgttgcaattaaaaaaaaaatttctgaagtttagctttagcttccagggcatatacattttgaccttaaccccctgctctaaaaatgaaatcagaattctttcctgcttaactactgcactatcactgttacctgcagggcagtgagaacataacttctaccaactttgtcattctgtgacatggccagcttaatgaaagaagcagggctgtaagctttagatttaggataggatctcagagtttcatgtaagatgctgtgagtacagaaccccttttggtaacaaaatttggaaggacacagtggcatttcctgattgccaacctgagggattgattgatctgcctgcttccttctcatgttgtgacatacagctgctgatgaggccatgccatgaaacagcacagtctcaaagtagtccca

SEQ ID NO: 125943 - DNA, 1020 bp, Homo sapiens
atatgaaatacttaagatcttaaacagtagtgctctatggaaaggatacttttcagacactaggcatccaggaaaaccaaaagaggaaagtctatcaagacatccacagaaattaagttgcttttgtcattacaagattcaggacacaaacctgaggatgagattgatttcatcttccttggtccattcagtacccccactctgtttccaattcaggtagttgagccatttagaacgacattgcttttctgagcgggtaccgactcgttcagccacagctgcccaagacacaccctgtgtgactatgtcacctggctcagtgcttgtcaactcatgaaccacttctgcaagtctcttttcttcttcttctgtccacttccctgaaaaaaggaaatcatccagactaccactgctaacttcttttacaaatctgattcagccctctatttacaaggactgataggaagtaagcaatagtactaagagtttgtttctgaatgaccctctggtggaaaaccatatatacccactaagacagtttcattttactagcccagtaagggtctcagtagaaaagaaaataaagaatcctaatggaaagcactgaccaattatgaaaagaaaaaccacccaaaacataactacaaagaagaatgtattctcaagttacactaagtcctttataaacagtgaagtgggaagagcttcgtcaatggctgacagacaagaaatggcatgctttttttcttactgtcacctaagattccctgctctgcaaaagtaagttcaagaggccattacttataggaatgaatgatgagggacaagggaaattacaccaatgggctcaacctattttagtaaaaactaggtttctaccatcttgtttcctcactatcccaactccaagctactgtgatgaaatattagtaaagtctgatacaagtatttacttttattcctgtgttttctcaacccataaacccactaatagataaccccaaatgttcctctctgtct

SEQ ID NO: 125944 - DNA, 2464 bp, Homo sapiens
ggatagtgaggaaacaagatggtagaaacctagtttttactaaaataggttgagcccattggtgtaatttcccttgtccctcatcattcattcctataagtaatggcctcttgaacttacttttgcagagcagggaatcttaggtgacagtaagaaaaaaagcatgccatttcttgtctgtcagccattgacgaagctcttcccacttcactgtttataaaggacttagtgtaacttgagaatacattcttctttgtagttatgttttgggtggtttttcttttcataattggtcagtgctttccattaggattctttattttcttttctactgagacccttactgggctagtaaaatgaaactgtcttagtgggtatatatggttttccaccagagggtcattcagaaacaaactcttagtactattgcttacttcctatcagtccttgtaaatagagggctgaatcagatttgtaaaagaagttagcagtggtagtctggatgatttccttttttcagggaagtggacagaagaagaagaaaagagacttgcagaagtggttcatgagttgacaagcactgagccaggtgacatagtcacacagggtgtgtcttgggcagctgtggctgaacgagtcggtacccgctcagaaaagcaatgtcgttctaaatggctcaactacctgaattggaaacagagtgggggtactgaatggaccaaggaagatgaaatcaatctcatcctcaggtttgtgtcctgaatcttgtaatgacaaaagcaacttaatttctgtggatgtcttgatagactttcctcttttggttttcctggatgcctagtgtctgaaaagtatcctttccatagagcactactgtttaagatcttaagtatttcatattgagctctttttttgtgttgtgtttgttcctttttttttttagtgggtttagtgctcatgcaaagtaccagattgaaggcgtggagactgaagtcctctctatatccacagaacaggtatggcacaggcagcggcagtgtagcttttccactgtcccaccaatgtgcctcagtcctagcctagggggaacacgtttaggataagagggctgttcagtctccatgcccttcaatccttggctactgtgctaagattgccaagaagggggcccagtctgtagttacctccacacctccaaagtagaccaaatcaaacacatccatttcatacaaattcaaaaaagctttaagatatcataatcccagcttatttttttaagtagctggtttaaccattaagatttattaactaaaatgggcaaaaatactagcaagaaattatttaagaccctgaagtaatagagactgtcaccatggctactccctaccgaaaatcaaattgtcacaacaaagctagaaaacgaacagatttttttaaacctcaaattttgttgtactgttgtgttgttttttgattgcagctattgcttttgtgttattttgttttggatttttttttcaactagtcatctttataaatagctcatttctaaatatttttgcttaacaatggaaacgctcagatccaggaagtaaatgacttagtaaatgccacactatgaaacattgcatatatacaactaaatctgttcttattctaacctttagcatactccttttccttcacagtgcctcatctggctctaaccatttatagtttagcccattggttgtacctttaattaaaagtggttgctgttggtatttcttagctgttagctctgaaagcagatctgcactcctggaatcctttcccgtgtaacttaacaatagcatctcattggcataacctgccattccctttatttgccagtgcaattacctgtagtcagaggaggggttcttatagagaaattaatttaatgtctaacgatgcttattttgtaactgtaggatagcagaacttgatgtagctgatgaaaatgacattaactgggatctgttagctgagggatggagtagtgtccgttcaccacaatggctacgaagtaaatggtggaccatcaaaaggcaaattgcaaaccataaggatgtttcgttccctggtaatgtattacttactttttaagctcctccccttttcttaccatatttactccttaggagtgagaggttagaagttctttgccccagctagagatatcatagcagatttctacttacaccacttccctgtttctctcagtaattgtttccttccccagagaagagttaatactgtttgtaattcctaaagcccctaaaatgaaaatgtacacacttattcttgttcttctacgtaaactatcaggaggaaataaaatcatgccacataacgatttaatttttatgtttttagagacagggtctagcttggttgtccaggccgacatgcagtggtgtgatcatagctcactgtaacctta

SEQ ID NO: 125945 - DNA, 1046 bp, Homo sapiens
tttgatcttcaagattccttgctgtttgatctatatgatttggttaatggctctgatgtcttttggttttctagaatgttaatagaaatttacccaagtcggtgaactgaaggacatctaagatattttgtttagttcagttaatatttgcacacacaatgaatgtgtgacaggaaggatgtataagcagttgcccaaccattataaaccatttgaaaccatcttaatttctagattttgtaattaatgacttaatagaaattattaaaaatagaaattagaatgaatgatagaaaactacctaaaaagcagtcaatcaagcaaagaaatagaattcaccaactggtatgtcgtgtagtaatttcactagaagacatatcaattggggattgatttgaggtcgtttggtaaagaaatgagttttggcaaggttaagaatgattttcttcagggagtaaagggccagtttcctattgggaactgtgtttggacagttttatgcttaatgagattatgggaacccagccattgttagagtgagaacttttttcttctttaggtataagtcaaattgatctttatcccttcccgtcagtcttgaattatagtgacaaaaaaaggaatgaggatgaaattctcagaaccatattcttccttgtttttggtctacatatgctacctgcatttgaaaagataacccaagagtattccaatcactatgttagtctcaaccaggtgattattggcattttgagcgacaggtttttgcagactgtcctttacattgcaggatattcagtgtcctttgatcttgcccacagaatattagtagtacatgccagtcattatgagaaacagaaacaccctgcatgtttccaaatataccattatgattccctggttgagaatcgcagaaccacatattggtgtttaacaccatatatccatgtacattgactgtcagagttaccttagagacatttaaactaaccatacctcttattcttaaaatcctaatctgaatttggttatctttctaccagtgt

SEQ ID NO: 125946 - DNA, 1035 bp, Homo sapiens
tgtgatcttatggatccatcaaacagtaagatgaatattacaaatcaagtgcatttctattggtaagggcattagattccttttaaatagctgagaagtgttgtagtcagaatttaataaactataataaacattacacagtaaaagttccaaatcatatttcacataatttacctataggtatgactgcaagcgccaaaaaagatgacatttctagcatgttctatttaaccttgagcagacgttgataaagtctgatcctcagttgacacacatgtaaagacattatactgtctgatctttattcagtccccaaatgtggtcttcggaaataatgctctcttaacatttatttgtgtttacaagcacttttgatcctcacagctgtatgaggtaggcaggacaggtaaaaaaaaaaatacctgaacattagtttataaagtaagttatttacccaggttttatactgctaggaagtgattaaagcctagtatttttggactaccagtccagacatccatagtgcttacccatatatacaagaaaactagtttttaccaagttcctgtctttttgcaggttggtcttagtgtgttcctctttacttcctaccgttagaaacatttaatcatgtataccaagggttagcaaaccttttctataaaggaacagatatagtaaatattttaggctttatgggccttctggtgtctgtcacaggtactcaactctgttgtagtgctaaagtaaccacagaaaatatataaaccagtaggtgtggctgtgttccaataaactttatttacaaaaactggcaatgggctggatttgtgggccatagttagcccacccctgcactatatgtcatgcaagacaaattcattagattccttatctctcttaagaaatgtaaatgacttcaggtctccaggcaaattattcaatattaaattgcctttatgataattgagtacactagagaaacttaaattaacaaaacatttattgtaaattattcttaccacagcttacctt

SEQ ID NO: 125947 - DNA, 1071 bp, Homo sapiens
taaaccacagcagttaagctttcgtgattctaaacttttcttagtggctgaagtgaatgaaattccttattcccatgtaacactaaacagggatttatgcttaaaactcccagcctccactcaactacatactgtcataaaactcaacctcagatgatgtgtttaaaggaggtaaaaagtcatagcagcaacaatgtgtgtggcttaaggactgtggctatttaaattggtaaattaagcctcttgggggttgctcctatttctttgaagaggttgtaattaacagtgtgccttctttgcttgaactgcctatttctaagaattattctaatgacagtttaccaaatcttcgacatcctttgaatcttctgaaacaggactgcccaaggatgatccaatgatatttgattcttcctgatgatgttggagtatgggatctgtaatgagtttcaagttagtcttaaatgtatatatttattctctaatccatgtcaagaatttaaggtattctaccacagtgtagaactcaacaggactagtagcttattggatcaagaaagactgaaacaagttaattaaatgtctgtttttttccatctaaaatttatcaggcacatagtaagtattatattacagtacctgttagtgttgtcaaaggcaagacagattcagtatctataacatcagatgcctggataaagccatgtggtgaaggaacgataagtattgtttcatcatcaattgtttgatcaacttgttcttctatagtgggagactctaaaccctaaataacattaaaaaaaaaatattgactcatattcttactagtcttccttaaaatcccatgtataggtatgtataggttagacttaaacataacccatttaaaaatcagaatataaaataaaaagttaaggtctcacagggacaaaagatgacctcacaatctaacatacttttaacaaaaggaactcataaggactaggtcagttataggtcagctgaatataacagaagaaacaatgctgttacagtgtaggatgatgttcctaggctgaaccacaaagatta

SEQ ID NO: 125948 - DNA, 2610 bp, Homo sapiens
tccttgggcagtcctgtttcagaagattcaaaggatgtcgaagatttggtaaactgtcattagaataattcttagaaataggcagttcaagcaaagaaggcacactgttaattacaacctcttcaaagaaataggagcaacccccaagaggcttaatttaccaatttaaatagccacagtccttaagccacacacattgttgctgctatgactttttacctcctttaaacacatcatctgaggttgagttttatgacagtatgtagttgagtggaggctgggagttttaagcataaatccctgtttagtgttacatgggaataaggaatttcattcacttcagccactaagaaaagtttagaatcacgaaagcttaactgctgtggtttaaagtacagtttctctaaagatcagacatggcactgtctcctctcaagcctggttgtagttcagatgagtcttttcaacatggtcttcaacatggtctagagcttaccagtgatcttctgatcttcaagaagactaagtttgagacttgaccagcatacaagtatagagacctaggaggtggtcttgtggtggtacatttggttaacccattgctggcagtgggagctgatttaggcagggtaaacaggaaagcattaaaagttaaaattcactacaggttttttgttacttttaaagggaatatggataagcatagtaacaaaacccaccagaatctaagcagttttcaccccctcagaaaccactgtcattagtttacaaagttagcactttgaagtaaaactaaatgaggaaggaagtaatgttacctatccttgataccatgaccatttattagatgttttgctatataaattaccgagagaatagtttgtcatccacttagtgtgttagctggtggggtacaatataacctctcatctcaggctattttaaaaaaacaatatttgcttctataacaaaaggaaacaaatctaagaatcattcctgtactacagaagggttaaggcaaaggtagccttttgggctttttaatgaatatgacccctatagaaaagtcaagaaaaaaaaacccttgtataaattattttatttattattgtaattagatcttcacaaagttgtcttttcactgtgttttgtcaacgtgaaattaaattgtagttataagcaaaagttggttgcctagggaacaattgtatattcagtttaacagaaataaaagaatatttgtcttaagatgcaagatttgtttttacatagccttttgccatacaattataaaaatttcatttcaaaagtgaaatttttttgtgctgttttagctttaagggttggaatgtttaggtgcaacatcagctccttaaagaaaaagcaaagtgatctaggatatgtctcccttgcaagagggaattaacatttacaattaacatgaaaatcatgtatcagacttctgcaggagattcttcagcataccttatccaaaaattactcactgtcctaatgtatcattttgaagagtcctggtaagtacttctccttggcagcctcaccttcccacatcatggaagtacaggtttgcacatatacacaacatgatgatagaaaatatgatatagtaaattagctttctaaatttcggttctaagtctccttgtcgataccagtagatctaaaagaagaattaaagtttataaattaaaatttgaaatataacattttctctaccaatttcaaatttcattagtatttgtttattcccctaaatgagacagacattctccatattctgaggtctctacattcctgagatcagtacagccagaatttaattcttactctgagtttccacatccaagatcatacttattcctactttctcagtttactttcctctatattcacacctgtatactccaccagtcatctggcaagctatccaagaacatatacctgggcatactacttaacaggaaaggaagacaacatttagactcatgattcatacagttggttcagaccgtaaaatagggcttccataatatatttggattaaactagttcattgtctgttagtcactttaggcttcaagctaggggaacaggaaagctcccaaagtgggatgggctagttcttcttcgggtcatgggagtatatagcaggatcagtgaatgagaacacttggaggtgtctcctggtttaattaattttaactcagataagcaaattactattgttttttcttttgattctgcctctaaaggaacatgaaacaatgtagccaactaatgaatgaacactgaggagccaccaccatctttgtttcttcaccataaaagaaacatttgcagtaaatcaaacatttttacaacaactgcagctttagatttcccaggaggttttggtgttaatacctccattttgggaaacaaacatgtagattaaactaattttgtaataattagaattaaatccagagtgctctatctcttcccttagcagtaactggcatttcccaaagactgttggcccttacgtagtccttgagtgaagatgaattaagtaaattaaaatctttggccacctacgtctttccacta

SEQ ID NO: 125949 - DNA, 1041 bp, Homo sapiens
agagttagccagtgagacagaatgtctccttgctttccacctgtgtggctgctatacctccggttgtctctagtgacagtgcaaggggaagctcctgtacagtcagagccatgctgctctgagggacccatattaaatccctggacacagggcctgaggtttctttattcagctgggctcaaaataaaccttctcccacattttgcatcctctcgttatgctttttcctggccccttaggcttctgactgggccacttacacagctttcatggtgagaagttgtgatttggaagaagagaagcaaagtcatttctgagaatcaaacttttatttatggtattgggacccttaagtttgcttgagaaatgcagaactttggaggcaaaattgtaggatgtggctcaagggtctgaatcactcagtccaggtaaacaatggtaggaagtagcaccctttgggcatttaatacctgctcaatgtgttgccttgctctttccccatcccaggagaagacaatcactgtcttcagtggcctgaggaactcgtgggtagggagggtaagggatgagtataaaatgggattgagccttttataaaaggaagaacaaagtgcctggaggtattgttcctagaccaaactgagggtcaggctgctatttctggtggcccaataatgagatgcagttgaggagctgaatgttaataggtaagacaatggggaaaatgtccccagggaatttcagagagcttcacagcagcccccacactacaggccctgaggcctgtcaaggaaaaatggttttgtggatcaggtcctggactccagtgccctgtgtcacagctgctccagctccagctgtggctaaaaggggccaagatatagcttgagctgttgcttaagagggtccaagccccaaaccttggtggcttccacgtgctgttgggtctgtgggtgcacagaaggcaagagtttgggagcctccgcctagatttcagaggatgtatggaaatgcttggatgtccagaagtctgctgcaagg

SEQ ID NO: 125950 - DNA, 1391 bp, Homo sapiens
tagttttaaagcagctgaaatgttatggtgattccataaccaagtttgtgaaacatttttctttgttgtgggactttggaagctttaatatgccaattttcattgtgactatagttggtgagggtggatgagtagcactttataaactgtttaggtggtgtggcctttttagccctagcacaacgccttactcaattcttaactccagctccctagagcattcactagatacgtttctgcagaatatactttgggaaacatggttcaatgaatcgccttcctctgcttttccctcccatcctgccccctagggtaaactaaaacctgaaaatgtcctcccctcttctgcccacaactacctttaaaagttttctttagtacaagctttagtacacagtttggacagtctttcccactgtcttgtgttagaagagcactaaattattctcagggcttgcgagtcagtcttgatctcaacttattagctggctgtggtatcatctgaagtcagtttcagtccatctagactggtgaaactaggaggagagggagagaatggttttctcgagaaagcaaagcagcatcccatagctagggcaaatgggaaaagaaggaacactctccacttggtgccatgtagtgcaaacgagtttctaaatcagcccactctgtgggtggtcactgatcacaaaataagtgactcatcctctaagaagggtggtgacagttcttgctcctttattccttcttggatgtgatatataaagtcaatgatttggggagaaggtacatacactgaattcctcagtagataccatagtgagagggaggccctctgtggagggggcaagtgtagtgggctctgaggctcagatctttggttccaaagacaaaagtatcttcctttatccccatccccccaataaaaaaaaaaagaagaaaacaaagacggtgaaaagcaagggctttttatgattagtgttagtcaagcaattcaaacttggagcatttggcctctgcaaataatcatgtaagattagagttgctacttcatgccatttttgttgtcgcttatttaagaacaaggatcagtagggatggtaataaaataatttttaaaaatgcaaagaagagaaaaagaataaagctatgattaagatagctgggtctgtgccagcagccccttcctctgtcttagagctaccaatgctattctctgaggagtgcaggctttagtttatttcctctagatagagcttctaggtgatcaagcacagctatttctctcaaaggagggttagtcacccaaaggtgaaacagttctctcctctcctctcattcagcctgccaaaacaactttgcctttttttgtgtgtgctagaaaagtaatt

SEQ ID NO: 125951 - DNA, 1237 bp, Homo sapiens
agcagccaagcaaggaaaggggagaggcttgaggtgagggattcttgaatgatggcctccattccaggaagtgatcaaggggtccctgaacctgaacaggctaccatacgttattctaggctttaaaatgtttaacaccttttaaaaaggattaattatgtgatgtcttgggccaacaattgaggagagatctttttctatcgtcagcattaactttctgagtagtttgggcaagatctgcctggtttattttttcatctaaaagtggcattggttggctggtcccagtgcagtggtgttgacaactaattgatcatagcccgttacagatttctttgctccttctccaatctccctgcttcacttgactggcctaaaagaaggaaaaaaaaaaaaaagtggcattggtggtctttgacctctgataaagtgctttcaactctccaaaggtaatgcacgtgtagagtccagagcttccgggatttcttagttttggcaggagccctccagcagataggatagggaagtggtacacctggcagtctggggaatagccctgaatttggaagctaagaggctgccacaggactactttattttttaaactccacgtggattttactttctcttctcaaaatgttttaatatgaaagcgttttaaactcgatctccaggaagatgcaccttgttcatcttgtggctttgtataatcccagcccacagtgctcctggtttgagacgcattcctcctccagtagatgttccatcttaggcaaactttattgaccattatgtacttggccctggggagccaaggaaccctgtcaggtggagaaaaaaaacgtagacaaatgtgatgtggttggatctgtgctacgacagggacatgttagggtacagacaagaactggttgcttttgtatgagaaatttgtccatctgtcccaagaactaagagagtgcctccccagcgtgcttcagcacatagattggggttctgggtgatccagacctttgacctcttttaactcatagctcttgtaattatagaggtagatgacttggtgtaatggacttgtccatttatgcaaacacttagaaatattgatgttttctgaacagcttgggccaaaacgtccaatgatttcagtttcctattgcccatgatccatttgaaacccattcaagaactttattattccaaatgtatcttttattgcgtacttacttactacaag

SEQ ID NO: 125952 - DNA, 1061 bp, Homo sapiens
atttggtgggggagtagtgtcatcaagcatctcgcctgctggggtctcaggggtaccctcaaggttgggccgcggggctgctccgttgtagtgcttagatttctctcacttgatggcctcttgagtgcagagttgctcttgggttggtgggaagagcctccgagctctcattgccctctgctcctgcttctaccccttgccactctgcgacgaacctgttacccagccactgaaaacgtatcctctaccctttgaacccgtctaatggaaggtgtacttgtctgaaacctacttaattgtatgatcatttactcctgctctctagcaggtggactatttgcgtgtgtttgcagtgattcacgaaaagtttgtcttgggaactcccaactcctagtttgtctgcattccaccttctttcactagcttgttcatttctttttccctcttaaatatttgttaagcttgtttctttcttcccacagtcaccgacttagtccagttccctgtgatctcaaaacaattgttgcagcaggctcctggcagtctcaagcagttcatcttcttggtgtactggtatgtgacaattccttcacgtattgttcgtggttcttttccactttctgtgaattcatatctaattgcccccagaaagtcaattctaattaaatctagcataatcattttcttagtgctattggaaccatcttatttaacttaatctttgtggttgagaattcaagaaaactcttcaagaaagaatccaataatttatatttttaatgtgtaccggttggtgggttaagcactatagtgggtatgtaactaatactcttgcttccagttttctagagtctattaagtggcacagaggtaaacagaatagcttatcttctctgtatgtgtgtactagtcttctattgctgccttaaccaattacacaaatgcaacaattaaaacaacacaaatgtattatctcatagcttctgtaaatgtgaagtttgggtgggcttagctgagtacttggcttagaatttcacaaaaccgaaaccaaggtttctgta

SEQ ID NO: 125953 - DNA, 1633 bp, Homo sapiens
ggctttgaagatggaagaaggggttcatgagcccaaggaatgtggatagcctctaaaagctggaaaaaggaaggaaaccaattttcttctagagcctctagaaggaacacagccctgatggcaccttcattttagcccagtaagacacatttcagatttctggtccttagacctgtaagataataaatttgtgttgttttaagctaccaagtcagtagtaatttgtttttgcaaccagtgaaaatatactgattcaaatatttgcccattctctacccccttgcaatatgttactgcaaattcatatacttttcttttctttttaaaatacagatgaactcctctgactcctaaggacaactcttctatatctgtgctgagtcccgcttcctcttgcttagtcaagaaacttgcttttgcattatcctctctctctgctgcttatcagtttttttctttacttgattgttccagtctgtaatatcttccatcttaaaaggaaaacaattcacctcatgtctccttcaagtatcaggccccagtcgaagccatcatcctatctctcttagattgttctcacctggacaactttagtcacctcctaacttggcataccttctcttcacccttgtaatctgttctccatgtaacagctggagggatctttttagtgagaccacattatcactcccttgcttaaaaccatccattggtttccttcccatcatactggaaaccactttctgaggccagtataatcgggtctcaaccttatctaccactctatccttttctctgtgccgcagctgcactgaccttgttttcctttaagcagatcaactcatgtttattctaatgcctttgtgcttgctgtttcctctgcctgaaacacttctgcgggtatttacatggcgtactttctcactccattcagttttctgctcaaatatccgccaggtttattgtgaggtagcacccttctgccaccctcaccctttccaaccatttattgattaatttggcatcaggtttattttcttttttcttttccagccctaaactttgaaaggggtgtggtcaggagatgacagcaataaaagagtggtggtcgtagaggtaaaaggatctggaggtttttgaaggggaagaaagaagaaatggtttggaggtagccatgaggaacaaggaaaacacatatctcatcccctaggtcttgaggaaataaggtataagagaaaaaagagtatttttatcaggagactgttcttcctcatagttgatgaaaagatttcataagataatgtatgtaaagcacttaatactgacccgtaaataatacccaccactatatttccttcaagcggcagtgtatgtcttctctttcttcctctttttccattttcttttcttagaaggtaggggcagggatcacataagaagatccttggcaaaaggacaagtacctaaagatggggttatatcagaatagtctgaggtttacagcaaacaaacagttcttggggagttaaggtgtgccaaagaaatcagagataatccattgtcagtggcttaccaggtgttaccagactggacaaaattcttttcctttgccactggcatactgtatcctttt

SEQ ID NO: 125954 - DNA, 1032 bp, Homo sapiens
tcaccctcagttttctgccgctagggcctctccatcgggcagccctcagcatggcagctggctttcttcagatgagaaataagagaacaagagagagctctctttgtaacctaattgcagatgtgatatcccatcacttgtgctgtactctccccattagatgcaagtcactgtctagcctgcgctcaaaagtgaggggttacagcagagcataaatagcaggaggcaggaatcacgggggccatcttagaggctgtaatgtatatgacctgacagcagccacgcctttgaaacagcccacattatcagagtattttttgctctttggtattggaaataggctcttttttgttgaaagtctccaacctatctgtgttaaagggcttagtctctgaacaaagctagctttattaggcaactatatctgtaatgatattagagcattttctttcttatgatacactcttttaattttttcttgtagccctggttgttgctatgaaacagctatgacaagacatttttatcatggccgtacagagactatgcgatcatgcacagttgaagcagtgaggtggtgccagtccatgcaggatccttctgtcaatgtgagtattggaaaggaaaaaaactcacaagatttgtttaattgttctaaaggaaccgtggtctttgagtaactaacttctttgcttcagttttcctggatcattaaaatactttgagacatcttttctgaggtttttaaagcatttgttcattcaccagtgaaatgtgtaattggaaacagggaaggcaggaaaaggatcccatttgtgttattttctaggcaaagggtcttcagtactttaggtatttcaggacttctaatctacctttagaacaacaccaacaaagtgcagaaatcccaaggtgcctttaaaaggaaggttttcttgatgtggttgaatgtttttgaaatgacagattcttgtttcatatagtggaaccaggacagttgtatgctttgtttcatactcttttttttgaagc

SEQ ID NO: 125955 - DNA, 1081 bp, Homo sapiens
cttaaaaatctctcatggtgaaaaatttttttctaacctgagatttggggtttcattgcaggatttgatcgtcaccttttaggtctcttactcatagcaaaagaggaaggtcttcctgttccagaactctttacggacccacttttttccaaaaggtaatatagtgtagtgttttacagcttcatcaattggcttcctctttttgtatattaaatggtttttagaaacaatataagcatctgtaggcctagtaaaatgttcttttattgtgccacacagcggaggaggtggaaattttgttctctcaacaagtctggttggctatttacgagtccagggagtggtagttcccatggtacacaatggttatggatttttctaccatatcagagatgacaggtgaggcttctcttttttattctttctgtgctatagagtaggaaaggtattacttttgtttttaaatgcctttcctacactgtgattcttatattgccatctgtcacttgctacataagtaactatttttttccacttaggcatttaatgcatattcatgtttctctgtcctgcttttgagacacttgtcagattagtcccttaggtgtctttatgcagaacactgtttcaagtcgattcggcaatcatatcatcatcctcaaaatcagtacacccatgaacatatttggtttgtacaaggtattttataataagctcagataaaatgtttaaatatatggtggttcatgtagtcatagacaatattaatgagatagagaaaagagattgggtaaattatactttttaaaacagttttaccaattcagatgcagttcacttgggctgtgtggagtttgacttatgtttatggaaagaatgagaaagaaaagatcaaaacctggtataaaaaagagtagtggagaacaagataaaatgaaagtgatagcaaggcttgtaaggtccttatctacagtctggcagtctctttacaggggcttttcaaagcatagttggcttcataaaaattacgtgactacatttagcactatgtgaataagaagagggcaggcttggaggcact

SEQ ID NO: 125956 - DNA, 1291 bp, Homo sapiens
tcaggcttctctcctatttatttcagcttcccagggccacttttctcacttgccagatctgggatttcttattaggagtatctcgagaaagatggtggaaggcatgacttgatcccaagagtttctctttttgactcctagaaatagcctttctcacctatcatccttctctgcctttttttttttttcaaactttcttcaagtactctttaaaaacagtttaaatttcattaaaaactgtagcatgaattcatattccaactcattccagtagcactttaggaaggacttttctaggaaggaggttttttgttctgttttaaacgcagtaagacctagcttcagagcactctagggctctagctaatttgttcccctttgtccctaggtgctagtcatctaatgaatgaggtgtttcttagcattatctacagatatggctttaccttcaattgtgtcaggttacatttacctaatgtcagcaagacttcacatttcatgtatgaatatccagatgaaataaagtcctggttgtattcaccatcactatttggagccttttgtgtaatcattaatcattatttatgcttcacaggtttgttgtggcctgttcagcctggaaatcctgtcccgagactgatgcggaaaagctagttcagctgactttttgtgcttttcatgatatgatacagctgatgaactctactcatctttagagatgaatcatctattaagcacttaccaaaacatatcattaaactgagtgctgggagtgagttggtaatatgagatgggaaggaatgttgacttgctaacattcctttaacaagttaagaaaacttgttaaatgtagaaattagtagaatcatgctctctaaatttattctgccatagaaggtagaaatatttttaagctcctctgatgcagcagcaatgcaaattatgacatagtgaatatagaactatgcagtatttaagcctcaacaatccaaatctacaaactttaacaatgcaagtcttactctaatttttaagtatttttgttggtacttacatgggttataaatcctctctctggacatcaatgtagagtccatctttcaagcactttaatttttttagctgccaaagggtatgaattacattattgtatgctaatttccctgaaatcaatgccttctatgttcaccacagggatacaagcctgttatgtttgatgggaaagaccactacaatctaatggtgatctaaaataacttttttgggctgggtgcagtggctcatgcctata

SEQ ID NO: 125957 - DNA, 1059 bp, Homo sapiens
tctaaatgcagccctcaaccaccagtctgtaacctgaagtatggtggttttgagcttctcactacatttgtatgaggtaggcataatgtattcccatttacaaataaggaagcttggtatcctgaagtgccttgtccaagttgttaatgttagtaaatcaacatattttgttacaagattttgttggcataactttggtaattgtttgggggataaaaagtagtctcttctgatttcagctactctttaacttacgtggggtaacgtctcgatgaaaggatgtatgttggcagctttggctgcactcacaatttcatcctgtgatacaacccggctgttgtctccataggcaatattctcggcaatgctgcagtcaaataggataggctcctgagacacgattccgagttgagctctgagccactggacattgagtttctttgcttcttgaccatcgagaagctgaaaaccaaagtccacaaactataagaagggtataaaaaagaaaaaaaaactaaaaagttactagattgtccatttggaggatcgttgcatgagggtgtcagcagcttcaaaacaacaaccctccaagacttataccattgaggccagcatggccaacatgatgatttttatggtgattaagccatccctatcttggtctaactggcaaaatggtagcacatttgaccctcttttttcacacttctctttgtccttgtctgccctcctccagccatctgtgtcctactctgcgttaaagaagcctgcatcaaggtgtcccactcaggtctgctgtccccagaataatcctaacccttcaccttgacttgatttccccttcccccatgcacagcagtgaaaaagctgatcagaagcagggccccaaaagctggttgactctggtcctacctctacctctcttttccctgaaaactactagccttaactttccctcacctctctgatagcactaaggacaagaatcccatggaaaaggaacaagttacaaagggcagtgtctttgggaggattatttttgctggcagtgatggtttt

SEQ ID NO: 125958 - DNA, 1010 bp, Homo sapiens
ctttgtaacaacagatggtctctttcccttttacacttttgaattaaatggtctttaaaattacccaggtacattggagttagtttcctctttgaacattgcatctatgaaaaaatacatgcacccccagtgcccatccacaaagcagagaagttgattacttggttctagaatgttggttcaggtgggcaggagaggaatgagagtgtaaaggcacaatgaagaaatgtctgcagagcctcatgagttaagcacaggtgttgtgggtttattgtaatgaaagtaagccaatgtagctcaggcatagaacccactcatcattctgaccaagaggctaaggctggagcgcatgcatttggagcttaaaactacagttgctttgtgctttttctctcccaggccacaggaaccaggttggctttaattgcacagaatatagctaaccttggaactggtattatcatatcatttatctacggttggcagttaaccctattgctattagcagttgttccaattattgctgtgtcaggaattgttgaaatgaaattgttggctggaaatgccaaaagagataaaaaagaactggaagctgctggaaaggtaggtcaaataagatttcaattggtgttaagtgttgtttttagacatgtgttttatttgaattatttatcatgatatgcaggctttaataattaaatgtttgtgcccactacaactaataattgtcaattgtgtatgaaatattttactgtattaatgtctagaacttaaatataaggtgattaacataaaacgttgagcctatagaaagcacttaacatagttatgataaagaacttctgaatattcaaagtgcatttcattttacttcatgtccaaatgctactgtttggacaaatgtcatccctgtttcacaaaccttcatgcagaagactgtaagtgaattgttcagggtcggacatgtgctggcatttaagagatcctcttctttttggctgtgatttcta

SEQ ID NO: 125959 - DNA, 1055 bp, Homo sapiens
gctaattttttgtatttttgatagagatggggtttcaccgtgttagccaggatggtctcaatctgaccttgtgatctgcccgccttggcctcccaaagtgctgggattacaggcgtgagccaccatgcccgtcctactgtggagctttttatggaagaggaattagggaaaagaactattatgagaattaatctatgtgattatggaataggttgtccaagaagccctggacaaagccagagaaggccgcacctgcattgtgattgctcaccgcctgtccaccatccagaatgcagacttaatagtggtgtttcagaatggcagagtcaaggagcatggcacgcatcagcagctgctggcacagaaaggcatctatttttcaatggtcagtgtccaggctggaacaaagcgccagtgaactctgactgtatgagatgttaaatactttttaatatttgtttagatatgacatttattcaaagttaaaagcaaacacttacagaattatgaagaggtatctgtttaacatttcctcagtcaagttcagagtcttcagagacttcgtaattaaaggaacagagtgagagacatcatcaagtggagagaaatcatagtttaaactgcattataaattttataacagaattaaagtagattttaaaagataaaatgtgtaattttgtttatattttcccatttggactgtaactgactgccttgctaaaagattatagaagtagcaaaaagtattgaaatgtttgcataaagtgtctataataaaactaaactttcatgtgactggagtcatcttgtccaaactgcctgtgaatatatcttctctcaattggaatattgtagataacttctgctttaaaaaagttttctttaaatatacctactcatttttgtgggaatggttaagcagtttaaataattcctgttgtatatgtctattcacattgggtcttacagaaccatctggcttcattcttcttggacttgatcctgctgattcttgcatttccacattaaggtggctctcaaacccaaaacac

SEQ ID NO: 125960 - DNA, 1102 bp, Homo sapiens
agagaaaaggtaaaacccctaagtcctattacctaaggatccacttctcctaagtgattaatactaggatttacctcaccctgtaggtggctggtttagctacctccttgtaagactgccgcactgcctttatctgcctcaacaggatcagtactatatcaagagtgcaactagtaaaccctccactcacatgagatacacttcagtgctcctgccttctgagacagccacagctctggggtagagccagtcccaagcatctgccaaaacctcatctggcgtcttctccctctatttacagggggaaacccagggctgagtgccacaaaactagggttgccagatatagcaaataaaaataggcaaccctgtactaaaatttcagcctggaaataataagatagtattgttttctaggttacaagtgcagtcacatcctgtttctgctctctcctgagtaacctttaactgctgtccctatcatcatagtgaatagttggtgacaattatccattgtgggaaacaacacgggaagaattttgggagcactctaacaacaaaaatgtttaaaaaggagatgttcattttcaaagttagatatcaaaatggaatccattttgatagcatccattaaaattgtttaagtgttggagatactttcataaaaacagacactaaaaggctgatatcccaagaatgtctttcctcaatttaaaatcatgcagagagtgtcacctgctggttacaagtaagatgagcttcaattattttattatgaatactttgttcaaatcaaatttcctttctcctgccaatctttgtcccaaatataatgaaatcagaagatggaagatactaacattgcaacaatattcttcttcattaaaatgctgacctgtttacactaaaacatatcatcttaaggcccaaacatttattttcaaatagatagtaaacctgccattttgggcttttttactgttctttccttaattattcatgaaccattcttagcttctgaacctaaatttttggagtatatagaatcgtctatcctactttctataagcaagctgttagaactttactttcagttctactt

SEQ ID NO: 125961 - DNA, 2159 bp, Homo sapiens
gccaagatgggggcattcccctttcaaggggggacacaaaatatctttcagttgtgaggtattagtgttaccaaaacccaacctagagtgtttagatccagtcttggttttcccccaattactaattgtgtgaccttgtataagttacttaactttgctcatttccttatcagtaaaatgggaattaacatcacagtgaccttataagtgttgctatgaaggttaaacaagagactgtatgagacatgcttatcacagaacctacaacgttgtcagtgcttgatttttaaaaatcaattattatttcacagtaaatatgcatagaagaatacacatttaacatttacatttttgcgctaatgaaagcaagcaatagacttaacagtctacaatagagatagccaatcattttaatctggcctttcattatttcttaccaataggtttactttcctagttatatttttatttaggccaggattttttgagcacttctcatagattccccagagttccttggtctttcctcagaccaacaccattcctcagccaaagaagctctgcttctttgatctgttttacattctaggcatctaaacttgttttacttaaagaaagaattcttcagtcaacacaggttttaaatagtttgcaattctagggtattatgcggggacgaggaggcccaagagtgtattcagtgtaatgaagaaactcattataacttgctgagatcattcagatttgcctgtgattatattagttaggcagtgtctgttttcctcccaggggtataaacctggaaaattacaacaaaaacaaaagcaaaaaccaaactcctcctttccttaaatttccacttctcaagtacagtgttttatctaacaagatctgctgcttagccacatccttgtttggctttcactgtctctctccaccctctactttccaccttcatttattaacattgtaaggaagcctggagcatacatgtgtggaatagtctccatggcaactcagcttggaactaataaggttatgggagagcttccatccctgcacctgccagtgtcacaagcagaagccatgttcctgtagcaaagattgtactctactgctaggcagctgtccccttgagccacccagccaggcacatgggatacagagagtatatggctcagcacgcactagtcactactattagaaaagctcaaagctgagtcactggtgccttcttcagaagggatgaacagctctctcacttgaatgccagaaaattatcttgcaaagcagacctatctgatagacatatttgcatcagagtagggcttgttatcagcaaggctgtaaggtgccctccccagtcttctgcaggataatccagggagccagattatagagaaagggcagccctctgttcctactcatctggctcagtattgaggatctccattcaccctttcctacccctgttcacctatccatcccctgtagttcctgacctgcaaagctattatgtggtcatagttgttatttatttccatgctaatcctgggcactgtttctctgaaaaatggagatttaagaataaggctgtcaggatacatctcagaagtattaggcgttgtattagtgtggctgctataaccacttgccacaaattcagtggcttaaaacaacaccaatttatgactttacacttctggaggtcagaagtctaaaataggtctcagtgggctcatatcaagtgtcaggagggctgtgttccttctagaggctccaaaggatgatctgttttcttgcttgtggccccttcctccattttcaaaaccagcagtggctggttgagtctttctcacactgcatttgctgatactcttctccctccttcttcttcagttaagagcccttatgattacattagtttcaccaagataattcaggataatcttattttacagtcagctgattagcaaccttacatctactactttagtttctttttgccatgtaacataacacattcacaggatccagggattaggacacagatgtcttgtgggagagggaacattattctgcctaccacatgcatacatcagaaaccatggttgaaacacaggaaacatgacagttcctcaaggcatacaattatgacc

SEQ ID NO: 125962 - DNA, 1078 bp, Homo sapiens
ctgagctggatccatatcatgattctagaatgtcaacccctttttaaagccttctctgagacccccgaagaatttagtgcttctcctttcttcctataacagattattcataaggcacctctaatgcataaatagtaattcaactcaagtcaggtctcctaagtcaagaacatgcctgtttcctctatgtcaacccatcatggcccctgcaccttgtaggtgttgggtaactgtgtgcagaatgaatatttacgtagagtacttccatactgtgtgtccaaaagtggggagaaagggagataacttttacttattgatccctaaccggctctttacagtcattggattattttctctttacatcaacactttgaggtgtagttaattctacattaaagataaagacactgagtctcagaggttaggcagtttcccaaatttgcacaactgttaagtgtaaagtgaggaccaaacttagttctttggaaacgaaacccatttttgttggtcatgcctctgtgccctactgccaacctatcaaaagttacattttaaggactgagaaatgaaagtggaatgagttttcaaatgtcttcttttcagaaactctttgaggaaagcacacatctttggaattacattttccttcacccaggcaatgatgtatttttcctatgctggatgtttccggtttggagcctacttggtggcacataaactcatgagctttgaggatgttctgttgtaagtattgggctattatttagttaagctctaaaaataaagctgggatgaacatgcttcatgtctagataggaaaccctactgtgaagcctcatgaagagattctggtgattcctaaatcggcatttctgcctctgagtcttcatgtgccaccattgaagcaccccctttcatttggaggagcagtaacttctttcctcattgctggctcacacatagttgaccttttcaaatctgtgactgagtggagtgattccattcggagattttgagaaggccttggcatttgggaagaagcctagccctgagcaaggagtctgactggctcctttta

SEQ ID NO: 125963 - DNA, 1027 bp, Homo sapiens
tgcgcgcttactatcttaaattaaattccataattttcagctctgtattttttccaaattaaacattatatctcaaacagacccagatatatttgaatattattaatgacaaacgttaggcttaaattacaaataataatatacctaacattggaaatttccatcattcctagtttgtcagactcctttatcttgctaatttgcagatattgctttagtaatgttgccgtgattaatgaaggttttcttggtattaaaagatccaaagagataggaatatgtaattgaactctagattgttgatattctactttcagcattctgaagtcatggaaattcttactgtagaaactcaataaacttacaagtagacctttactttttagttcattactgataaaataatgaatatagtctcatgaaggtgagttttcagaaaatagaagcatgagttgtgaagataatatttttaaaatttctctaatttgttttgttttgcaggctataggttccaggcttgctgtaattacccagaatatagcaaatcttgggacaggaataattatatccttcatctatggttggcaactaacactgttactcttagcaattgtacccatcattgcaatagcaggagttgttgaaatgaaaatgttgtctggacaagcactgaaagataagaaagaactagaaggttctgggaaggtgagtcaaactaaatatgattgattaattaagtagagtaaagtattctaatcagtgttattttgttactccctactgcttactatgctctaagaatgtgtttataaccattcctcaaagcaatctttttcatgcttattcagtaaattagaaacttacagaaagtagcaaagccagttcttggactcaaaaactgataattaactttaacagactttttcagttttcaggccattgtcttcacactgttcttccttcctccccactttcctccttcccttagttattttcttctttcttttctctcactttcactctctct

SEQ ID NO: 125964 - DNA, 1088 bp, Homo sapiens
ttggttatacaaaaggctataagatataattaattctggatatattttagatgtacagccaacaatgtgttggttggataagatgatggatatgagagaaagggtatttaaagatgactccaaattcttttacctgcacagtggaaaaaaaaatggagtttttttttttttttttttttttaaagagacagggtctctctttgtagcccaggccagactgcagtggcatgattacagctcactataacctagaactcatgggctcaagcaatcctcccttctcagccttcctggtagctgggaccacaggtgtgcaccaccatgtcgagctaatttttaaattttttgtagagacagggtctccctatgttgcccagtctggtcttgaactcctgggctcaagtgatcctccctgcctcagcctcccaaagtgttgagattacaggtgtgagctgccatgcccagctggagttgatctttatgaaattcagaagcctgttggagaagcaggcttgggggagaatggagagttctgtatgagacatggtaagtttgtgacgtctgtattagacatccatatgtagatgtcaagaaggctgaaatttgcactgctaactttagtaaaccttttttataattggtttactaaataagttttactatgcttctccattcattttggtcctcacaactctatagactcctactctgtaggaggaatatacatgagacagtgagcattagtctttggaataaaggaacagtaaccagtgcaatgtgacattgcacaatatgacacagaccctgtggtatgggctcatgtgctttgatggacaaatatcccgcatcacatttgacgtggaagacacaatcctggaggcaactcagtcttttgcagcagaacccagagcagatgtattcagggcattctgtattgcagtttttcttcctgcctctcaaattcctctggtgttatgacctgccttaggccacagtgagttcctatatttgtaaaattggtggtcactttttccctccatagtgctgtttgtgaggccctttgccatattcactgtctctaattgcct

SEQ ID NO: 125965 - DNA, 1027 bp, Homo sapiens
ctacttctggatataatgctgaccttaacacacttatgactcttcttttcactcactttattccagccactctgtcttctttgcattttttttttttttgagacatagtcttgctttgtcacccaggctggagtgcagtggtgcaatctcagctctgcaacctccacctcctgagttcaagtaattctcgtacctcagcctcccgagtagctgggattacaggcgtgcacctgtaattacattctatacaacttgatctaaaccttgtttttattgttttgtttgctttaggcaaagaagtttgtattaaaacaacaattactaagaggagctggtactatgccttctgaaactattccaaacaatagaaaaagagggactcctaaggtttatatttcaacgttataactctatgtatttcctcatttatagcttaatttattcttaaagaagccccatatattagatagaagaaatgttagtatagtactaacttacagaaaagatttaaagataaagatggataaggttcaagaggggaaaagacacaccagagattacatgaattttttcaaattctacatcattttgtggacttttgccataaacagttgtagaagaaattgtcacttcagccaaaaatcaaaacctgctggttcaatagtatctagttatatcaagagattcatacagtagcaaaatttaagttattaaaattattaaagtttaaagttattaaagataaagactgaagttattctattcttgccttaattttttaatgtgcttttcatttccttcaacctatattttagaggattgtcttccctcccttctgtaaccatagtgactctaaactttcttacagcaattaaatacatcctttcttcagtagcaattactgttttatgttgattgagcactttatactctcttttctaaataactattctacatgcatcttgttaatagcatgaataacagcaatagcaaatggtttataagttatctatatgctctacagtat

SEQ ID NO: 125966 - DNA, 1498 bp, Homo sapiens
cctaactgatctccctacctccatttttatcccaatcctgtagattcacctaaaaacagccacagtcatttttctaaaatagaaatcaaatcatatcccactgcccaaacctgctgaaggctgcctgtagctcacagggtaaagtctggaatcttgacagtcgcctgtaagaccatacactatgtggcccccactctctctcaaatctcatctcctataaccgcctttttccaatacaccgtctactccataaacagtggctcactgcccaagagtaggggaggggaggatcagaggagccaaatcagaacacaaatctgtccagaggaagggggtggcttttacaaattcatacaaaggttctttttaggctgctggcagcctttaaggctttcttgctggtgtatgaacagattaggtatgcctttgcctcagggtctttgcacatgctgtttctgctttccctgaggtattctcatcctttccttcattcaggcctctgttcagatgtccccttagaaaggccttctgtttcccctccccagtctctaaaatagcacctcccctcacttttctgttcttcttaccctgctcaatttttcttttatttgtaccttccatctctagaatctaaacttcatgaaagcagctactttgtcttttttgttcgtacaggtccaacacttagaaatcatgcgtaggagaaagtaggcactcagaaatttttctgacaaatgaaatgatctatttatgtgtttttatattaagtttctttcttgtgtattgaatgtcacatcctgagtactaaatgcagggggtataagtataaacaaaactgaccccatcgctgccctcttggagctgagagtctcataaacagctttaaggtaataaaatcattttctgtgccacaggatgtgagttggtttgatgaccctaaaaacaccactggagcattgactaccaggctcgccaatgatgctgctcaagttaaaggggtacgtgcctcctttctactggtgtttgtcttaattggccattttggaccccagcatgaaactaattttctccttacgggtgttagttatcatcattaagaaaatgttgaataaatatctaacctacgaatatatcacatgctttttgtagcaacatgttaactatttaaacattatatactgtagagcatatagataacttataaaccatttgctattgctgttattcatgctattaacaagatgcatgtagaatagttatttagaaaagagagtataaagtgctcaatcaacataaaacagtaattgctactgaagaaaggatgtatttaattgctgtaagaaagtttagagtcactatggttacagaagggagggaagacaatcctctaaaatataggttgaaggaaatgaaaagcacattaaaaaattaaggcaagaatagaataacttcagtctttatctttaataactttaaactttaataattttaataactt

SEQ ID NO: 125967 - DNA, 1050 bp, Homo sapiens
cgtacagccttgtgccatggcacacagtcacagaaacatagcaagcccttgaaatcaggctttctgactttgtctgatctcctgctttagcaaagacatcaattctccctccttttatttaaatggtggctgggtccctgacaaggtatgttcctgcccacagggtttcacatttggcaaagctggagagatcctcaccaagcggctccgatacatggttttccgatccatgctcagacaggtatgtctatcgagggctgtgccctgggatgtgtagaactccccatgtgtgccccttggactcagacagtgggagctctgtcatgtttcccaggcctagctcctatattggttgtccctcagtctcacgtcagagatgcggttgaaccgcccactaggcacagatgaggctctactgtctgtcaggtctgggtgggcacaaggaactggaccagtttgagacagagcctccagcgtggattcacctccagcctgtgtctcagcagtggtgggcagtgcaggcagaaggcatctttgatacccctcatccctttcctctctttccttctttctcctggcaaacccagggcacgagtgtttcttcccaccaagagatgccctctgtactctttctttccgcaaatcaaaactcatccctgtgtcctgttcttcactgcccattttcttttctgaggctagtctgaaatactagttcaagctgcagtgttactggctgataatgggtttaatggaatgcttctcacattttgcagcttcaaaaccctaaccattgacacgtgtgaatgttttcctggggaaatggggaaggaaattagaggaatgtaactcagagcagcctggttcaaaggggaaagttcctttaacaatcatgaaaattttgtatgtgacctaataactttccgttttaaaaatcactaatcacttgccattgagtaaaatgatgctttagaagtctgccccagatgtgccaggggtactcgaaccctggctaagaggcatcagtttggtgtgttaggctttctagagggc

SEQ ID NO: 125968 - DNA, 1757 bp, Homo sapiens
taagttaggaatgggtttggttgtaacaaaacctcaacttatgattttatacttttctcattcttcatatgacaataagtctggaggtaagtgacccagggctgggatattagctcttagatattgagtaggcaaccagacatctgcctcattgaagatagtgggctctgcatcggattgcctggatttatatccttgagtcatcccttgctggctgtgttaacttgagcaaattaattaccttctctgtacttcagtttctatctgtgtaaaaccgtgatgataataaatcatacttctggagatagttgccaggattagaggaatagtatatatgaatttgcttagaataatgcctggcatagagtaagaatttggtaattgttatgatttttgttggactgactagtcaaaaaaaattatttaatctcttcaaaaatccttgttgttgttgttatttgtttgtttttttatgaaggataaagttgtctgtcctgggctaggaatgttactatcttacaagactgattttggcccactgtgaagggagatacgtgttttctttccctgaggaatggttatcctctgtgttccttgagtccaaaacatcctattagcccttataactatctctggaaaaaatttcaggtatggtgctaggtcaggtagctgtagtttccaactggctctcttaactggccatcctaccaagaaggcaggctcaaggaaattcctttctttttgaaaggcctgggctgagtgaatgaccaccactctgtggttcaccaaaaaaccacatcaggttttccccagacaccttgggacagtttgaaatgtccaaatagtaaagcaatgaactgccataaatgtagttccccaccaagggaagaggagagtatttgttctgatttcaactttacacagttgaggtggcactcatgactccaagagggaatccgaacagaaaaaatactggatcaatttatgaatgatagacctatccttggcctccacagaagggagaatgcagacacctttaaggctggcaataggaaagccaaccccaatttccagcgtactaaggctctcctgacccctgaatactgggccagatgggaaatgggtcaggtccaggatgggttcttcactgattgaactaaaaatcctttaaatgttttctcacaggtttttacaagaattgatgatcctgaaacaaaacgacagaatagtaacttgttttcactattgtttctagcccttggaattatttcttttattacatttttccttcaggtaaatgtttccattttcactatattcattttgagaaatgcatcattattcaactggggggatttataaacatcagtgtaattggccttttagtagaacttctctattaacatggctactaacagccaagtttttctgacatagtgaaaaaagatgtttgcctcctctggctcccttgcttaccttctcctctccacccttacctcccgcaatgaaaccagggggaacagagtatttggcctgatatgatgattggaggtgaaaggcagggacttcaaaatggggtgtgggggagccctggatgtaagtttggatataagtattgccagtaaatgtaaatactcaaagaaatgtcttcccgtgttctaaaagcaacaacaaacaaacaaaaccccataagcgggtcacatgggtttaaaaagggtttgaagagtttatcgttcaacttttgttcaaggagaaag

SEQ ID NO: 125969 - DNA, 1037 bp, Homo sapiens
gggaacaagagaggttatccagaatcctcctgtcctatcccccagaatgtcaacattttagaatcaggttagaatttaaaagtattaatttacacagcagaatttttagaattaaaatttatagtgtaaagagactatagcgggtcttcaaatatcaaaatttccattctgtttactcctgcttataaatactcttgtcaggttctgagtaccaaataaaagtaagtgtttgtggaaacatcatttattttttaaaaaataaaggagtattgtagcaaaatttgtcaacatttttttgaagctaaataataatcactatgacattttttaaagcaaaattgtcatcacttattcattgataaggaataaggataggatatattcctttactaatttttgtgcgtatgtaagaattgtacatataaaagtttttaactagcctgttgtaataatttgtgttttctaggatgaaagtatacctccagtttccttttggaggattatgaagctaaatttaactgaatggccttattttgttgttggtgtattttgtgccattataaatggaggcctgcaaccagcatttgcaataatattttcaaagattataggggtaagtgtgatgcccatttgtgtgatttacttgtgaatcctgatggaagaatgaacgaataaagtgcttgtgtctgaactgggatacaaaaacaacaaaatccacgtatctccatatgaaactaattggcttgaagatgtaagaatagcagtctggtttgtgataggagagctaactttgtgaaccttcctttgtcatcacagttggtttctaacctgggcaactaaagaccagcttcctgaaatagtcaatgaaagtgatgagatgactttctcatacctgccaacatttggctctgaacaaatcttgtgaactttcatttcaccaatgtgcaaagagagttcctcaaatgtttgtcaggctggcttgagaatgcactgttctctaacatacatactttccaggatgtgagtaagcctagcat

SEQ ID NO: 125970 - DNA, 2043 bp, Homo sapiens
aaaaattgatctattttcttctgtattttctagtttctaccacctaatttttccttgtgtattttttctttttgaagttttccacttctacttatcctatggatcctgaaaatgttgtgtgttggttttgagaattgtattgctagttattagagagacatatagagtaacaaaaattatgagcattgggaaagttacaaaggttagagaagtctcagacaaggcctggatatctggctctgttcctttatgaaaataaaagagacttacgtgactcttcaatttttccataattcttcaacctaggaataagtatcactaactatggataaggcacagtgttgagtactttatgtgctttattttatttagtcatcacaactactctaagaagtaaatactattattatccccattttacatatgaataaattgagtctcacacagtttccttggataaaatattttattggataaaataaattcataaatttatttcaggtcagtgtgacattgaggtctggactttgctgcctcacatttattgtctgtcttgttcatccagggggtcatgcgggataggatattataattcctagggctgattactagccggtgtgtatcagtacagcacaatggcctgtgtttgttttgattggccaacgcctggtctgtaggaatttgttggtttgtacaagcccctgattattattatttttttattttttattttttttttttgagatggagtctcactctgtcacccaggctggagtgcagtggtgcgatcttggctcactgcaagctccacctcccaagtagcggggactacaggcacccgccaccatgcccagctaattttttgtatttttagtagagatggggtttcactgtgttagccaggatggtcttgatctcctgaccttgtgatccacccaccttggcctcccaaagtgctgggattacaggcgtgagccaccacgcccggcccaagcccctgattattactgcaaatttaggttaaataaaatatttgggggcttacataatattaatatgtgactgttatatttgtgtttgtatttattacaaggaaacatcatttttaactattatcaattgtctatacatttattgaagtcagaggctatcttatatagatttgatggttttacaatgcccacagcattggttcagtaaatatatgttgaatggttaagtttcttcaggtaattgttaatgtattcaaaaaccaaatttctctctctttaggccagaaaaggtcggaccaccattgtgatagctcatcgtttgtctacagttcgtaatgctgacgtcatcgctggtttcgatgatggagtcattgtggagaaaggaaatcatgatgaactcatgaaagagaaaggcatttacttcaaacttgtcacaatgcaggtatagtttaacttcagaattttcctaagtcatctcagtgataaactgattttgcatttaatgctaaaaataaatattatttgatttgattaccttacaaagtaggaaacaacacctgggggattcaggatgagaccagtgtttaagattttttttctctcttgaaagaggggaaaataaagaaggataaacagataaaaaaattaaaaggtttcaaggtgagttatccgttatagtagtcagtagccacatgtgtctgtacagcatttaaatggtagtgaatctgaattggaatgttttaagtagagtgtgcacatcttgttctgaagacttagtacaaaaaatgcaaaatatctcaatttttatattgattacatgttgaaacgatatcatgggatatcaataatatattggatatattaggtgaaataaaatatataactaaaattaatttcacttctttctttttacatttgttaacatggcttctagaaaatttaaaataacatggctcatagcatggcttgtgccatatttctgttgaaagcactgatccagagtaaacttgattgagtcaaaacacccacaaaaaatggcgtgagaagataa

SEQ ID NO: 125971 - DNA, 1034 bp, Homo sapiens
aaggaaggaaataaagaaagaaaaagaaaaacacagagatgaaatcacagattaagcaaaatgaggggaaaaatagtaaccagaatcccatcggcctctattttggttcacagaatgtttagtaagctgctttttttctctctcaaaaatttattaagcacattgacaggatgttaaggaacattcaagtgttgttttattagagacagggagagttgaaacaaatatgagttcatctttgaattctactgtgacatctcaacttggaacacctttggttataatgtctccatctccacattctcggtcctcacagaattatccccgttactatcacgtgctggagatcaaaggcacagtgcccggcacacggcaaacactcaaatgctatttggtgaatgagtcatatggactccagaattgcaggacagtcaaactctgttgatagtcaataacctgtcatggcttaggtaggttttcagtatcacaggctatctgcccctttcctggaaataagaggtttcttatttcgcatagagtcttcaagtggcattcaacacctggaaaattatatatggaccttcaggttgtatttttctcttcttggcaatattacaaactctcaaaacctaaataacagggttatccacatagtcaagttttgaagatcacaatgaagatgaactttcacatgtgtctatatttctattttttaatttaaaagattagcaagtgtcttcaaatgaaaatgtattcatcaacatttaaaataagatcagagaaataaatagaaattgaacaataaaacaaacaaatagaaaaagatttcaaagaggcccaatgcttttattttaatagctgaaggaatcacctagaagctatcagaaatttccttttctaagaccaatattaacaagaattagtagtagaatgttcttatgcttataaatcaggttggtttgaactaagcctcactgaccttatccagagccacctgaaccactgcttcgctttctgtgtccaaggctgacgtg

SEQ ID NO: 125972 - DNA, 1054 bp, Homo sapiens
tggagtgatcagagcaagctaattaacatatctatctcctcacttgacaccttttgaggtgacacatttgaaatttactcttggctgggtgtggtggcccatgcctgtgatcccagcacttttgcaggctgaggcaggaggattgcttgaggccaggagaccaggctgggacacgtagcgagaccctgtctctagaaaaaataaaaaaaattagtcaggtgtgatggtgcatgcttgtagtcctagctacttgggagactgaggcaggaggattgcttgagcccaggaggtagaggttatgacgagctatgattgcaccactgcactccatcctgggtgacagaatgagaacctgtctcttaaaaaggaaaaaaaatgaaaaaaggaattaaatgtactgttagttacaaacttttaaaatatttttaacacctagtatttatatgttgcctcgccattttaaattttaattacctatgttagaaaaagacagaagaagtatgaaaaaaaattgctgtcactatctcagtagcctgatggtttttcttcacattcctcaggtattcttttctgtattaattggggcttttagtgttggacaggcatctccaagcattgaagcatttgcaaatgcaagaggagcagcttatgaaatcttcaagataattgataatgtaagtctgagttggccatctatccacctatctaaaagattgtccagttaagtcaatttctttgtcactttatccagctctccacaaaatatcactaaaagtagttattgtaacctagtaatctcttaaaatttgattctgtttagaagccaagtattgacagctattcgaagagtgggcacaaaccagataatattaagggaaatttggaattcagaaatgttcacttcagttacccatctcgaaaagaagttaaggtacagtgataaatgattaatcaacaattaatctattgaatgaagagtttctgatgttttcttgtagagattataaaaaagtgcatgtatatttaaacctagtgaacagtcagttcctatatc

SEQ ID NO: 125973 - DNA, 1002 bp, Homo sapiens
ttaaatgaaggactgggctttgccagaatgaagaaatcctctgagaatgtgcagtagagcaaaacaagatactttctgaggaaatttctgagcaatttgaaattcctaggttgaatacttcttgtgtacacgatgtccatttcctggggccatgtgggctatggatttttgttgttaatgacaaatatcctagtagaaacttctaccctgctaaataaaacaaagcataggcacaaaatactctagccataaactaccctacactcaaaacaggcttcacgagaaaagttgatgtttacaattctgacaattatttctaacactatctgttctttcagtgatgtctccaagattaatgaaggaattggtgacaaaattggaatgttctttcagtcaatggcaacatttttcactgggtttatagtaggatttacacgtggttggaagctaacccttgtgattttggccatcagtcctgttcttggactgtcagctgctgtctgggcaaaggtaggtgaagcctgtgaatccagattttgaactgcaccttctcccttcctgctctcaccctacggaaaggtctttttactacatgatgactctgattctgtacttgttacttttacgttttctgttcaaaatcagctggataagcatatccagcctcactgagtactacccctgccaagactccatgctgttcttggccatgtgattatttggggaagggatgagaaagaagaatgtagctctcatatctaccttctgcctttgtaagaaaacgagcaagtaaacaaacaaaaacaaaaacaaaacaaaaaaaaaaaacttgaactccaaagaaccatgctctctagtggatgatgccccattcacacggcaagtagagactcaagtttagtgaactacagatgtcccattcaattaacatttttttttactttaatgtttttggctttctagatttttgtttaagttttaaattgattttacagttttgtc

SEQ ID NO: 125974 - DNA, 1009 bp, Homo sapiens
catttttaaaatttttactctctctacttatattctatcagttgctaagtcctgtaacttcttcctctataagtctcataagtatttgctttcttttctattctcatttagactctctttccctacatagttatagtagctgaagtcccttagtctctccacattccagttaatcgtatacattgctggtggctaaactctcgtagaacatacttctaattatatcctattttgctcaaaactgtcgaacaactgctggtctgttttcttgcaccatacctgcaggacccagattatctttccagctacataaccacctccctccatccacacaacacacttcctacccctgtcaaaaacaggcttacccattcttcaaacttgccgttgacttttgtccatattgttcactttgctagaaatagtttttcccctcttttccataccagttgaaatcagactcaactgaaacaggccctttcattttaacataactttttgcagtctcgattgtgataatttatcctagaaaatatttactctttgtacatttataacatatgtgtataagtatgtttaacacagcattgcttgtaacagtaaaatattggaaacaagtgaaatagttgcaacattgaaaaaatagatacacacatatatatactgacaggaaaaaatttggccactaaatgtaaactatgactccattgttaaaaaataagtgtgtgtgcttgtgtgtatatacatgcgtacataaaatctgaaaatgtacacacaaaaatgttgaattgtgctcgtgtgtgtatatgtgtctgagtgtgtgtgtgtgtgtctgtgtgttaggggtaaagttatgaaatacttttataatgtactttttatccaaaaatgttagcatttgctaatattgggtgatgagctcactggtgtttattacactgttctttgtatttgatatttttaaataagaataaaactggaaaaatgctaagattttaaatatatacct

SEQ ID NO: 125975 - DNA, 1028 bp, Homo sapiens
ggagggagaaccagcctactaaattcttggggcccgagatacagtcagatcattcttctttttgcccttccctaggcagaacctcattatctctccatgggggtggactagataccagagcctccttattggaaaagtagtccttgcttaaggggacttggacttgcggaggctcttgaaagcctgggggtttttacaataaacataggatctaattagacagctctaaaaccttcttcagtaagcagatccttctctgttgctgcaatagaacccttgtaagttttctcgtcccaatactttgccttaattaacagacatcagcttttgttctgctgttttactgtggaccagatttcctgacagccactcccatctatctctggtttaattatagaatatgtgtagcctttgccttaaaatctctgatgactggagcctagggaactctctgattctgtcatatcacttttttttttgtaaacaaagcttaatcactgatgaatttctgtaatattctgtgaattctcatcttccttatgagactggccactatctggaaatgatcctagataaaggcgattgtggttttaaatgtgttgtggtgaagacggcaggtggggtgcctgtaaaatgacatccaggcagttgaagaaatgacactaaatcttggcataaagaacaggactagaagctgggtgtggtggtgtgtgcctgcagtcccagctattggagaggctgaggtgggaggatcacttgaggtcagaagttcaaggctagcctgggcaagatagtgagagtttgtctctaataaaacttaaaaggttaaaaaatgataaaatgtaaggaggaggtggaacaagatagccaaacaaaagcctccagaaatcatccccccctcccccatccctacaggaacaccaaattgaacaactattcacaaaacaaagcaccttcataagaactaaaaaccaggtgagcgaccacactatttggttttaacattatattaaggaaagaggcactga

SEQ ID NO: 125976 - DNA, 1050 bp, Homo sapiens
ttcaaatcattttacctttataccagttccattgtttggcaggtctttaacccaaaccactttcttaaagcaacacaatgtttcctccatggtatcctcagaggggcctttggcattcaagtttttgcccatgagatgataagtggcttctattcttagaaactagagcaacaaataccatattatataccattaaatacttttacagtttcccagaatgtcccatccttctcattagacttcatataagaagacagaccaagtccaatatgaagaattaggccagaactcaatggaagaatcaaatgtccatttctaattagactattgcaataatttagcaaaggtagagggtgtcttggactaggttggtatcagtagtagtctgaaaaatgtttggattttggatatattttgaaggaaaagcaaatcttccatgaaactgtactaatttttcctctgctattcttttttctctctttttagtttcgctattcaaattggcttgacaagttgtatatggtggtgggaactttggctgccatcatccatggggctggacttcctctcatgatgctggtgtttggagaaatgacagatatctttgcaaatgcaggaaatttagaagatctgatgtcaaacatcactaatagaagtaagtattgtttgtgtaccaattttattggaaacttgcagcaaaaacaagcacttagagtgatgtttatggattctttactaaatacacattagtgtgtttagtcctgtaggaggcagacagtctgagttataattcatatttgtagtgagttagaaaagataatatttacaagcattacaacacacaactgaagtgccagcagagatatgtagaaaaagagagagccctgtgaagtcagaaatattctggaaagcttcaagaagaaatataggaacttaattagaaccttgaatgataagtaggaatctgttgtgagatttcctaacagattgaacatgggtgtaagacgaaaagtcggggatgattctaaagtttttagccctagaaactgg

SEQ ID NO: 125977 - DNA, 1050 bp, Homo sapiens
ttttttttctgtttttttaaatagagaaaggtttagaattcaattggtgacatttattaatgcttaactagaagcgcaggaaggttcccgtgtgctatttaagcgactgtattagacaaataggatgttaaatggcaagatatttctagtgtctagtccctttcatttagtttgattttattgttaagactatgatccagactcattaagtaaattaagtaaattttccaaactaacaccactagttaaagatagaataggactagatttgaggctttttgacacctagattggtggtgcccttgccattatagttcactatattacctttatttttcagaattttattgttcttgcattttcaagtctagttttattttactttttaaaattttatatcgcaatttgtctcctgaaggtcaagtaacctggtttggttatgaaagtcctcgtagcttctgggactatatcagagtggcttgccggaaagtttcacagaattgtatctgcagcattgaaaatatggaaaatgtcagttcttctagagctaaggtaagacattggtcagagactcgtttctattttttttttcattgcatgtatttggaatagcaggaaggtgtgaagctacttactatgaatttccttttcttaagaagcataataaaatacgtcctgttctgtgatgtttctacatttcttgaattatctaaactagtggctctcaaataatgttcagcagaaccctgaagatgtccaagaccctttctttaatgggtacaaaatgtcaaaaatatttttatataatatcaacctgttatttgccttttcgctgtgttgatatttgcactgccaatgcagacacaatggtggataaaactgttggaaccttagcacgaattaatgcagtgacatcaaactgtgcaagcagtcttgagttcttccccaccatgcactcagtattttcttttaaaggcagtttcaacttaagaatgaccatgatggtgcgggaaacattaattcttattaaatctcaactttgaggatctg

SEQ ID NO: 125978 - DNA, 1014 bp, Homo sapiens
agacaaacagaagttggagcttggaactgccactgaacaacagacaaatgtgcctggagttgtgcatgcagttttcctatggggttgttgccaactctaagtcatctgtagctcaaagcaaagtcccataaacaaagctgaaagcagcagggaagaggtaaaactgctgattgatgatttcacagtctagttctggagagatagaggttagagttcaagggcaagcaaggtgaaggggaactgtaaacactccaggtttttacttgagacccctgaaagacaatatctttggagtaagggaaattcagaagattaatacaaaaaaaggcctaaaagtagtcccctaaattgtgaggtgattttctagtactctgactgactgccaaaagaaaaatctactctggagaaaggtagcctcagagttgctataaattttcatacagaatgtctagtatacagtaaaaaatcatcaggcacatcaagaaacaagattgaatgactgaaatcaagaaaaatgaaaaagacaattgaaacaaacctatgggtgatagagactttggacttttaagcaattataataggttcaagaaaatggaaataaatatgaatattactagacaactgaaatacataaaattactagattattggaatatgttaaaattcaaaggccgggtgtgatggcctttaatcccagcactttgggagaccaaggtgagcagatcacttgagctcaggatttcaagaccattctgggcaacatggcgaaacccagtctccacaaaaaatacaaaaattagccaggtgtggtggcacgcacctgtagccccagctactcaggaggctgaggtgggagggtcacttgagcttgtgaggcagaggttgcagtgagcttagatcgcaccactgcactccagcctgggtgatagagcaagaccctgtcataaaataaaataaaataaataaataaaataaaataaaataaatactgcaaaatatacattcttatcatac

SEQ ID NO: 125979 - DNA, 1050 bp, Homo sapiens
ataatgaaatttggattttattactagttgtataaaacctcccactgaaaggataggattgaaaattttcttaaataagtgatgttagactgattattttcattaatgagagagaactctgtttttcatgatttatgagagggctcattttaattagtttgttgatttgcggtattgaagtagagagttatatcttatataattacatcatgtaattcaaaagaagtctctaacccaagtaactcagtattaacgttctgtcccttcagaggatagaaagttagtttgacatgctgtaccctacatattcagagaaacaaaatatatactctagataatcaaaatttacctatttttatctacttaaacatttttcttagtcgttatcaaatgtatattttgaatggctgttctttacatattaaaatatttttgatggcacagtggcaaaatatttttttaattttttttatatttgattctttcttcttccttttagggtagagcctggatcagagtagcactcatggaaaaacatttatctgaatacatctctacagctctgagagacttcaaaacaaccaggtttaaaagtccttttaattttctaatatatatttgaaagaatcacctgaagactcagaaatcagaataggatgaagaatcaatttctaaaatcctcaactgttttatttcctccttttgttactactcagataaatccactgtcttcttaggaaaatgtaatttgtcaactaaacatacatctacctttctgtaaaaagatacacattacgcctggaatatcctttttctaaatcatttctgattcatactctttcaactcttgaagcttcattctccccatagactattccctgatggatttgaatttaagtatgaaatttcaatagcatcttttttcttttcacctcagtatttccttatttttttgcttgtaaagaatatacattggccgggcacggtggctcacacctataatcccagcactttgggaggccgaggctggcagatcacctgaggtctgga

SEQ ID NO: 125980 - DNA, 1001 bp, Homo sapiens
ctgttcatctgtttagcatggatctagattttatacttcttgactcagttattccaccaacttaagaaggggcatcctagcatcattctttaatctggcctgtcctcagatgttggtattgttttagtatggccctatctcaaaactgctatccccaaacaaaaaagtatgcagctagggtgttgtacagagatcactttatctagagtttaaagtcaggactggtaagtaatctctgctacttacgtaatgtgtaacactgagcaatacttcctctccttgctcttttctttctgcacatgtaatactggggataatacctgtctaacagaattataaggatcaagtgagctaataaattgctagcatttaatagctagcttctcagtaaatatttatactctataaagtcttatgtttctactctaatgtaatcctgtatcttcaatgtttggagagtgtatacccacctaacttctaaactttctgaaccttatgtaaaattaaagtgaacaactcatccccagttgttctgaataaataaatccaactgtctcatataaaatggaggctttggattttcagaatagaggagttcaccataaaaatcacgtttgaaaccaatcacagcttttcatcaggatccagttttttctcccttcaaacttttaatataagccaaggctcttgaactacctgatcactggctccttttgatttgaccaataccttaagtaagttcaacagacatttattgagaaactgcaaattatgaaggaggtggctaaaacctttttaataaggaacattagctctcttgacaatctggagaaagaaactgaccctataattcattacagttttaatgatagtagatgatttttcctggtaaagatatgggatgtctatagctatttctctaggaactctgtaacttcattcaaccagttagccaaagacaatttaagaagagagtgttaaaagaaaaactttagacaaat

SEQ ID NO: 125981 - DNA, 1044 bp, Homo sapiens
tgcaatttgttctgtaggtttctttgggcagtatggtcattttcacagtattgattcttccaatttctaatggttttaggatcttatttgtatcattcttgaagggcaattaattatttgctatttaattctaattttcaggtaaggaagatactccctcattacttggcctctgtggatctctaacgtcagtggcaagttacaagtctctaacaagcttaaaatctaatgactaccttgcaagtcctacaacagagatgacaagtccaggcctaactccatcctgaaaatttttgtgtaaaagccaaaactttttatgttgtaaatgtttaatttacatgtttgactgctgggaagacctttgaaattttatattgttctggtacatgtctgaaattctattgcttggagagaatcccctccagataagagattttgagtgaaaaacataatgatcctgccatttttcatttttaaaattcttacatttgtcattgagaaagttcaaaatggaataggctttaaaaaaaaaaaaactttcaaagatccgccaaatcattcatagcaaattgtacatattgttcagctgatttttatatatttaaatacaccttagtggccagagactgacttcaaggttttattccagagactccagagacttaagctaagtattttttcattctttcagattttcaaaaaaaaaaaaaaaaaaagttaatttcattttttcattaatgtcttcctaagttctatgctttaaatgccttgtttttaataacgggaaagttctcagctgcattttcacagtggcttattcagtttttctttaatatttaccatttggtatcaattcagcattccacttaacattttataaattccataggaacatgcctgttttggtagttactgacttaatttgttagtgccacaaggaaaatattttacagtattttatgccatttaggcaaaatgaataaactgttttccaagattttcttaaaagattatcaatttaaaagtatgatcaagtatgcctca

SEQ ID NO: 125982 - DNA, 1032 bp, Homo sapiens
attctattaatgttaaattttctaacataaacatttaattgattaatgtaaaattttaggaaggaacatctttaattttcaatatgagatggttgcaacctttaaagtagtacatatttgattttttttaaaaggcaatatttttttttctaggaaaactattcattatggttatttaactgcatatgttttttaaatttttccctcttggaacaacatgtactggggcctatcaaagggtggagggtgggaggagggagaggaacaggaaaaataactaatgggtactaggcttaatacctgggtgatgaaataatctgtataataaatccccatgacacaaaagtttacctgtgtaacaaacctgcatatgtacccctaaacttaaattcttccctctttttgtcttgggcacaagtttttgggatatggaaaagtttattgtatcccttttgaattttcttctaagatgaactttttaaataaaagatattactgcttttatatttaatctgtcaacatttattgggacattttatgtagtaggcagtatataaaaagcactggagatgataagatatttcagatattgttactggccacaggaggtttcagagctatgattgagtgattgatagaaacatacaaagggagtcatgggaaatatggggagttgttcactcagcctgggggcagagaaggggagtggtcaggaaacctgagttggactgacagacaggcaatccaataagtaaacatgcagggaagtgggagtctcaataaggcaatagaatttagtccatatggcttgaacaaagtgtatacatgggaaagtgtaaacatggaaatgtaatctaaggccttgtgcgcttaaggaggaacaagaaggctgtgagaaacctaggaaaaactttttggcaaagttgtaacagttagttagacttgggttttggaagatacccagcagtatggaaaatggggcttatgataaggtgatctatgttaaaatctaaaagttttggtttgtattaa

SEQ ID NO: 125983 - DNA, 1563 bp, Homo sapiens
aaaagctagagagggcagtataggattgtttgcccttcattcagctggtctcaaaacaagacattgaaatcttcatcctgttagctgtcatgttgtttacatggtagtgtgcctggttcttagaattcttttttttaatcttattgcatctagtagtctgtgggccaaggcagctttttagaatagtgtgtaaacgaaaataaacaaattttgtttataaacattatattcataagctttatgtttatacttcagtgacatctacttttgctgagtttttaaaaaattaggtttttattcattttcttccagatatttgagtggttgcaaataagcgagatgttattattagctaaaataaaccctttgaaggagacagcactggtctaatttatttcaagaatagcgtatccattcagaaaggtagtaataactcaggacactgctagggagaatgagctgttttcctcagaaactccttttagaaaaaaaaagttttaaaactatttacaataaaatgtgaatgaaaaaatggttgtgaggacttttctttggcattggataccccatgaaggtttctatacactttttaagagataggggtctcacttaagagttcaagaccaggctggtcttgaactcttaagctcaagagatcgatcttcccacctcagcctcccaagtagctgtcttttaaaaatttcattatgaaaaatttttaagacctagaaaaagtttaaaaaataactaccatcaagtttaagaaacaagcattatcaagtcaggagaaaccttcagtacattcctccttaattgcatccagtcctatacatctttaaacatacagcctttttctgtttattatttttaatgaatctaactattaaaaataaaacttaaagtagctttttaggtaaacaaacctcttcttatggtaaagaaatgatatatccgcaagggccatggacactatgttatctgtagtaggaattattaaattgttatttataatagcattatttctttattttaacatttagtttctatgcctttgcatatgtcaacctggattataatgaagaacattgttgctaaaaatggattttccggattattttcaggtaaaaatacttgctttaccgaatcattgaatagaatgattacttttaaaatattaccttctaaaattaacttataggaggaagttataggtaacatactacatttattttctcctaaatatctttattataagttaaaataaatgttaaataaaagatttactatcaataagataaaaatttctctataatgtaatatggattgaagtgaggatgttggaagtgagcagtcttttctaccaatttatggatttgaacatattacttcatttaatttgataattatcagaataaagccaaaaaataatatttttaaaaataaggtaagaaaaaaatatttgttttgattattcctattcttttctcaggcctaattcctcgcttaattaaaattgctcctgcttgtgccattatgatcagtacatatgaatttggaaaggct

SEQ ID NO: 125984 - DNA, 2765 bp, Homo sapiens
aaatatgtgttcatttcattctctgtttttatagcaatgtactggtataactatgaaattttaaagaagtggttatgtgagaaatctggtttatatgagccaacatttatgatcaactttacttcaggggcattgtctggttctgtaagtttattcttttgttgttaatattccagaagaataattgttgtattaaaacaaaacaaaatatagcatctcatgtatattgagatccactttggctgcactgcttgaaaatttgtctaagtattttccatctattttaaggaaacaaattattagcaaataaaataatttaaatatactgtatttgtttttatgttacaaaaacatatttttctgagaaacttttggatttgttagatcattacagttataatattttagagctttattatttagagcattttgtaatacattaattcaataaatgctctgattaggtaatatttcatgcaatgtcatctcatatgcattaagcacttctagcctctgctgctgatttctgtttctttggaaacattttgtcctactaaagtactttttaaaataatttgaacaaaaattacagtcggaaggaaataatcttgttaccatttttgggtaatagggagtttatctttttccacaccttcctgtagaatgatatcaaagtcctgtagtagactttcattatgcagatttatatcaccatgacattggcagttttttttatacccacatacttccaaaaatgaatctgtaataacttgtagtgagacaataacacactggaaccacataaaaacaatagcgaaggagcagagtgaagtgatgcagacttgcagaaaaatattgtaataatatctcagaaaatctaggccaaggaagccacagcagttgactttaaaacttagatataaatattcccaggtctaagatctttcaaattaatcctagtggattataagtctattgaacaaaaaaaccaattagtattgttgaataatggctttaggatatttaccagttttgcagaaatatgaaggaaagtcctctattgtactatttctatttaacctagaaaatttatttttttaaatgattttttaaatgatctagaaaattgctgcattttgacagctttcaaataaaggtttgtgtctgcaacagaaaaaacacctgaatgtaagtgtccaggctttctgtcagaaaacagaacagcctaaaccacctcattttagaaagagtttcaaaaatggcttacataacattgtagctactacatgatagataatgaagatggagaaacagtccttgattttaccttacctgaaatctttgaagctgatttcaagaacgtacatcaacaaattgttggggtgaaataaaatataagtgattttgagggacattttatgaccatattggccaaatgtgagttgggaagcaaaaatgcataccagttttaaccttgcatggctgttgtatcaaatattgcaacaacatatctaaaagaattaaattattttaaaaaaactcccttaattaaggcattgtggaaaaaatgtaaattattttgagaaaagttatttaaaatgtgatttgcatccagcttttatcattaataggaaaaaatgtgatttgtgaaccattgtaagtatattttaatatgtaaacatttacataactattttaaaaggcttatagagttaaaagttcaaaattcattttctttattcaaatttaattttttattctattttaaaagcgtttgctggaaatttttaaatgctcactagatacttgagaatttctgctttgacatatgtgttgtatcttcttgtgatgtaaaggaataatagaacacaaaggagcgtgagaaattgtgaatgctggtagtggagtcagagaggcttggttggaattgtggctctgcaactagtagctgtgtgacctcaggaaagtaagggaatttttctgaggctttttacttttgagtatagtgagaaatacatatctatttgctttaatgaaaacttaaaaatatatatattatttcattttaaagttcggttattgttttcattatccttaaataatatactaataagaagaatgtaaaaatattttaggaaaaattaacaggttgattgaaattaatcaattttactttctgatagtttgctgctgttgcaactttaccatttgatgtagtaaaaacacaaaagcagacacaactttggacatatgaaagtcataaaagtaagtttaattaatttaaaatatttttaagatgccatttttgtttttccttacagatattgtagggatatctaaaataaggaaaacaagattttttcttctgcattattctttgtgtattttactgaaagtaatatactgttagaatggaatacccagaaaaactaaacaaaaacaaaaaatttaagaaaatgtaaagtctaatgtttcttgaatgccatcagttaagtctgatacctgcgataaagaagaaataatctttgtcatttaaaagctaagttgttttatgatgttttttcctaaagtttgttttcagatctatttcaaattattatttttattgtccttttaagtcttctttcaagtaaaccaataaaataaatttagacaaatcaggataaaggataggaaattactggaaaccttttttctcttattttttgattatatatatgtatatatatatatatatacacacacacacacacacacacacacat

SEQ ID NO: 125985 - DNA, 3756 bp, Homo sapiens
cttttctaaagctttttttctaagctcttagtagaacaatctagagctgagtaatatagacttcattctgtaagaagttagtatcatccagaaatgcttcattttaattgtgttaaaattccctttttaaaaagaatggacatacataaatccaaaaagcttatttttttagatataaatacctgaaagaatgaaattaccaatcatcagtataaatttttgtataaaaggtttaaagatatattttgattactttttttctattataactttaggatgcattttttaaaatcattcgaaatgagggcattaaatctctatggagtggccttcctcctaccctgtaagttgaaatttaatgttttttctactaaataatgattgttattttatcctataatcagcatggttggacaaagtcttgcatttttaatattagaatgctttcattttctgaggtattgttttttaagcctcacagccacccacatgtttgatgatgtactagaaggacttgcaggacctgaagaggttacattcacagatacggtttattacagcaaaaggatagaaaacagaatcggtaagggaaaaaggcacatcaggagttgtccagaaataggcttccaaagtcctcccttatggcattgcacaggatgtgcttatccttctatcagtgagctgtgaagtatacaaagtgcttctgccttgggaaacccatttgagttttgagtgtagggcttttattgagcatgggttatatggatacattctgtcttttaggccagttgtgatgagcaaaacttcaaacccacagaaggaaagaagtgtactataaatcgcagtgtacagatcaacctggacaagttggtttagtgcttcagacatacaaaaaaccttctaatggggaatactcctggggatatattctcacgagttgtccagaggtcaggcatgcacataggccctcctgaagttatataaggtttgagcaaccaagcctgctgtgttgtctttgctacacaagcatatggtaatttttttcatgttcagaaataaagactttggtgtttatttgttcattttactaaagctgtatgatatattgcaaaatgtatactttcctttctccaggtaattctaattgtctactgcctggcgattacatgaattaatatgataaactgttaatattgaatgtaaaaatgtaaaataataacttggcttttgctgtctcatttattcccaagaactttatacttttaatggaggaaattagtcaatttgaggcatttattttaaacaatgtttaaggtttaaagttagtggcagatccgataccccaccagtcagtcctgctcctaaattctcagcagcaaagtccaccatataacattaggcattccaatttatagtctgtgaatgtcctttagttacatcataaacatggactagtttcttgttgcactaatatttattgacatggcagtacctgcaactttgtgtttgaatttaataattcccttttaataatttcttttaaaatagtatgtcattagaattcccttaaaattagtgtatgtaattctgatgatgttaattataatttatgtctagttataagcaggagtgatatatggtccacagtacaaaaatgttttacaatttctcacgtactttttatttcgctgattctgatgttatggtaattatgaatgagaaagaagatctgggagaccagaaacagagatggagatgaagtgtctgtcttaatttgtcttttcctatttgttttatttttattttatttatttatttatttagagacagtcttgctctgtccctaaataggctggagtgcagtggcacgatctcggctcattgcaacctctgcctgccaggttcaagtgattcttgttcctcagctacctgagtagctgggattacaggcatgtgccaccatgctagcgcttacttaatgctatttattgtaactgtctttacaactggaatgaaaacttttggatggcaaatgcctactttatatctttttactgcctactaagttaagtactaatcatttttaaactaaaagaaaaattgatctcataggctgatttattgtagtttttagcttacacaaaatataagacttttttagcttatataataatatttgaatttaagttaagactatgtgggatcttttgataattttgaacaaatctttttgtgtgatctaacagagtgatggcagttcctgccacagttatttattttacctgctatgatcaattaagtgctcttctgagatctaagttaggagaaaatgaaacctgcataccaattgttgctggaattgtagccagatgtgagtaataaatctttattttcattttgatttctgtttagagcttctgtttaagttgtgacattcacagataatttgtataatatatagagtattagtatgatatattttgcattatagtttatattaatttgttaatatagtataggtactccagaagtcatatggaatggtgattaccatcagaatgagatgggctcagcctattttggtcaaatcatggacagagtttttagagtgacatcagagttggttctgatttacctgaacttctgaggtgtcatctgggatcatgcgtgattcaggccaaagtcctgaatcactttccttataaactttgggattcagagttttatcataaggaacgttgactctatacagaagaacgtttactctgctaaatgggagtgggatttattggggcagtaactggaatgggctttggttttcatagttctggttgattataacatttctggaactgcccttgagagagttgaaaccagaaaaagtaaagtatatgaaaatagatttttaagaaatactttgtcaagggaaaaatctgtggcaattatgttgacatcatgacacatttaattttaaggttttcagacattatagactaaaagtttaaaatataaaatctgtgaatattaatttttacagtatatgtgtttgcatagtacatggctttatttttgttttcttttttttaacttgtttgtattagttggtgcagtaactgtgataagtccactagaattgattagaaccaagatgcagtccaagaagttttcttacgtggaactgcatcgatttgtcagcaagaaagtatctgaagatggttggatttccctttggaggggctgggctcctactgttcttagagatgtacctttctcaggtaggatttatcttatttgtagctactaaattttacatggctttgtctcattcaaatattactgtcactagatttttaactctttaccattaaaggtaagttattttctatagtgaccacaaactcctttttcattgttgggctctcagatctttccaagcttttattgaatgaatagtttttattcaagcttgtttttttttccttgtgattaatttgcttttctacattaattagtgggtattcatattcagagaatgcaaactacctttaacattctaaataagtcatttaatattattctaagcaattagtaagataagtaaaactactgcaaatcaaaggatagaatccatttaagaccactttggaattatatgggctcctactttttcagttattaaaaataaacatctccccattaaatgattatcctgtaaaagactattacaaatcaagtagggaattgtactgattactc

SEQ ID NO: 125986 - DNA, 1075 bp, Homo sapiens
tgtgcctcagaggtaagaacagaattatatttgtgagggaccttagaatccagcttactcctgtgtccaaaagttgtgcccatgttagagcattcatgaccatcatacaactattgcttgaatatagtgattggaaatttattattttatcagacagcttggttaatttctggatagtagtttatgtagaatttgagacaaataatgatgtatttttataagataggcaaaattcgcaattccttagattttataggtttataaagataatggcattgcaaccatattttaagtggcagaaaacacgtgtttggactgtgagaaaattggctcagatataaagccactgtgttgaattcagagtggtgagatggaatgaacagccctggtattttagatgaatgaaaggatagattgattgtaggaagatgctgaaaaggtaatttcctatacattaaagaaagccataaaagcagaaggaaacactcagacctaagtattacaaaattcacagctttgtatttttacatactgttgggcagagaagacaattttggcaacagttagtccagtaagtgggaagaagttggtattagagaaagttgtactacattaggtggaatgtgacaaatggctagactgagcagtacagtacagatacagaaaaagagacaaagcatagcattatgtacattgagaatgacatttaaaaaaaaattctagttttgtctgaatttcccttgcataccacagatttttcttctggtcaaatagagaagatatgcgtccatgttcccttctctaaatgggttttcgtcttttatcttccttcttcattccctcagataacttaaaagaagttatttttgtgtccttttttttttttttttttgagactgggtcttactctgtcacccaggctggagtgtagtagtgtgatcatagctcactgcagccttgacctcctgggctcaggtgatcttcccacttcagcctcctgagtagctgggactacaggcacgtgccatcacacccagctgatttttaaaatttttttgtagagatggaggctcac

SEQ ID NO: 125987 - DNA, 1061 bp, Homo sapiens
caggtgtgagccaccacgcctggccggtgattatttttgaatagtaagttcataagttatttttatactgttctgtattatctgactttttaaaactttttatgtttttatgttgcttttctcatcaaatttttgtaagataaaacttattaaggttatgtgtttttattttacatctgtacaacaactactggtatacaataaagggctgtatttgctgatacctctgtactctattggggaggtttttttagtagtgtgtatgaggctgagttcacagactcagacttagtggtcacctgctttcattctgtcagtatctgtttggttaattctctcttagttgtcttactaatgtgatgctgctcacccagcttagctgaaggatgttatcatttttgaaagatcagaggatgtgctctaattttatgttttctttttaacaggtttttatttaattagttaaaaatatggatcctgagacaaggggacaagagattatcaaagtgacacctcttcaacaaatgcttgcctcatgtactggagctatactgacatcagtaataggtaaaattatgttactgatgtagattatgtaactttgaatgagtcagtgcttccatttgagttttagtatcagtatttcaacgtagtttctttctattttccataagtattggctggctgagaaataaagagtacaaagagaggaattttacagctgggcctccgggggtgacatcacatattggtaggaccgtgattgcccacctgagctgcaaaactagcaagttttattaaggatttcaaaaggggagggggtgtaagaacagggagtaaggtcacaagatcacatgcttcaaagggtaaaaaggagaacaaaaatcacatgcttctgaggaaacaggacaagggcaaaatcacagactcctgataagggtccagcaaagatcacaaggcaaagggcaaaagcagaattactgataagggtctatgttcagcagtgcacgttttgtcttgataaacatcttaaacaacagaaaagagggtttgagagcaga

SEQ ID NO: 125988 - DNA, 1050 bp, Homo sapiens
gggcaaatgttaacctttctggctgggcacggtggctcaagcctataatcccagcactttgggaggccgaggtggcggatcacgaggtcagaagttggagaccagcctggccaacatggtgaaactctggctgtactaacaatacaaaaattagctgggcatggtggtccccgcctgtaaccccagctactcaggaggctgaggcaggagaatcacttgaacccagaaggcggaggttgcagtgagcggaaattgcgccactgcactccagcgtgggcaacagagcgagactccctctcaaaaaaaaaaaaaaaaaaaaagttaacctttctatgctagaatttacttatctataaatgaagataatattgttcagtctactccacaactttttgtgattatcagagacctaatctgatctttcagattacctcacacatacccaaatataaattttttgttctagaatctagacaaattaattttgtagtacttatcactttttttttctttcttttgcctaagcctcttcacctggctcagcaattattttttcctgtccatagcaaacctagcttagattcatcctttatctcctgctcatttgggtataatcattcctgtttgattcatttgccaactattgatatgtcgtcttctgaaatgtgttctgatctatttttattaattttcacatttcatagtctcactatcctggtgaattggagggcttaaggttatatgtaaggttaaattcttagttttgcaggctaagtgcatgaaaggataggattggttagtggctgtggaactgtagttaatgtctcaggtgactgtgggctgggaaaccagggtaaattcagcattatcaggcccttgaagacatcctaagtgtgttcactttaaattacaggcgcctgccaccatgcccagctaatttttgtatttttagtagagacagggtttcactgtgttggccaggctggtcttgaactcctgacctcagatgatccgccagcctcgacctcccaaagtgctaggattacaagc

SEQ ID NO: 125989 - DNA, 1154 bp, Homo sapiens
cagacaaactttatatgaaactaaaacttgagcagtctgaaacccttgaggactaggttattctgcgtaacagaggattctttcatcgctaaatgaagtttaaacaccagttttgaatgttcagcagaatggcagatgctcaataaatagttgagtattaaatatccccatggagtttacatcctaaaaaaagaaaatctttcaaaagagttttatatagttccgtgcctcaggaataaacacacgaatatttcttgctgagtcaactattattttacaatatgcggtctgtgaaagtatatagggcattttgcctctatcctaagtagtactacaaagaaatacatttcaatgctaataacttaaactggtagggttgtaaggatttttattctgtaatattgtataatgaaatattttaaaaatagtaaaagtgtctgtgtaaaacatctgattctaaacatctttaataggtggaatccaagtcaaaaatgaaaaaaacagaccatctctgaaatctctgaaaactgataacaggccagaaaaatccaaatgtaagccactttggggaaaagtattttaccttgacttaccttctgtcaccatatctgaaaaacttcaaaaggacattaaggatctgggaggggtaagtgaaaaccgtacactggcatagaaggaaaaatttgtaactagtactttctactgtgtaatcatttaaatttttcattttggaaaacgcttctattagcaccaagcttaacatttttatcagctgtttatcgttaacaaaaaaccatttgttttaaccttttgtggactgacagacctttcaggtttctctgattagcagtctagtgtaaagttcttagagtgtaagactcccctgtcctagtggaactgctcattgactgcttactgtaatgttggaatgtcctccagataacagcaatttcttgattatgaatcttggggagctacataagtttgtctggactagtgtaacagttaagaatgttactacagaacagccatgcaaaccacagttaaaattgttcctgagtgatacagatgttgtttcaacagaatgaatgttattaaaggaaaagaaatttgcattaagaatctggaataccttctttcctaccttatacact

SEQ ID NO: 125990 - DNA, 1993 bp, Homo sapiens
atcctcaggtcctggtttctgtcttcagcacatttactgtttctatcactaaaaaagattttgtcataacgatcttctacatgagttaatttatcttcacatcattactttaggtgcctttttaattcaccatttcacgtactttggtttctataatctcggtgaaaacatcttaatatcccatttatctgcagagtatgcttctgacaaatttaaccactgagagcacagcacccagattctgatataaaggggaaatacctttaatagtgcaagaaaagtaggtgttacagaaccatctaaggaggacatgggatcagccacagttaggtccatgtctaaatagttttggctaaaataaggcaattggagaggaacagaaatgtaggccgataccttggcgtattagcttgaactgtaaaatgtttgatgttcgtcatgatcaccttgagtcatcagaaaatacgttttgagtttactctttaaatggcatagattcaacaatatctaatacattgaagaccctggtaaaattgattcaacaaatgtttgagtatgatgtgcactgcactctgtgttttggtagattcaaaaatgaatccagccaggctcggaggctcacgcatgtaatcctagcactttgggaggctgagttaggcggatcacttgaggtcaggagtttgagaccagcctggccaacatggtgaaaccccatctctactaaaaatacaaaaatttagctgggcatggtggcgcacacttgtaatcccagctactggggaggctgaggcaggagaatctcttgaacctgggggttggaggttgcagtgagccaagattgtgccactgcactccacctgggcaacagagcgagactgtgtctcaaaagaaaaataaaataaaaaatgaatccttatgtccatcccatcctcatgttctaacctagctagagatgacattggtacaagtaattgtgttaataatacaacatagaatgtcaagagaaaggagagattagttccagctgaggaattgtgggttttgttcacacacaactggaacacggctttgaagaatgatgaagatttgggcatgtgggaattcattcaaaaattattccaccactgtctccagtatatcagcactattttagatcctagagatacaaaaataagtaaaatataaccctctaggtattctttgtctagtggaaacctcagacaactgaataatttatgttagagtgttgtcaatgctttgacagaaatatgtagaaattgctattagaacacagagataggaatgattaactctgccgtttggaatcaacagagataaagtttgagctggatcttgaagtcttagttagcaaggcaaatagacatactaaatagaggaaagcatatttaaaatatatgtcaatgcagtttgtttgtacaactactaatgttgcagtgggatttgagcttaggatataggtgggggaagtgacagcaaacaaaattatattagggctagattgcaaagggcgttttattcactctaaggagttttaactatgtaagaaattaaaaaccaaaggaaataagtggtactaacataagaacagacatacagaccaatagagtagaacagagaacccagaaataaacccttgcatatatggctaatggattttcaagaagggtgccaagaccattcattggggaaaagatgatcttttcaacagctggtgctgggaaaactggatatctacatgcagaaaaatgaagttggacctttactgtcatatgcgtaaatgagctcaaaatggatctaagatttatttgtaagaactgaaactcttagtggaaaatatagggagagatcttcatgacattggatttggcagtgatttcttggatatgataccaaaatcatgtgcaacaaatgaaaagtatgaaattggacttcatcaggattaagaacttttgtgcctcaaaggacattttca

SEQ ID NO: 125991 - DNA, 1057 bp, Homo sapiens
caaacattttagtaaagaaattctattcaaacagtcttacactcttaagcgtaaaggttccctccatcctgtaagttgaagcctcaagggaaggtgtaataatgattgatttagacttgtattgtctgctatggtaaccattagtgatatgtggctattaaatttaaagtctttaaaatcaaatttaaaaatcagtggcttgagctaggcgcagtagtgtgtgcctgtactctcaggtacttgggaggttgaggtaggaggctctcttgagcccaagagttcagggccaacctgggcaacataacaagaccccatctcttaagaaacaaaaaattcagtggcttaatcacactaccaaggccatttcaaatgctttggtaagttgtattggacactgctgctttagatcatgggcttgagtcagaatgcctatgttcaaattatattatttgctactgggtaacattaagcaagtcacctctcttcactttttatcctgcagaaaatgtagatagtatcatgaggctgttccatagattaagttaattaacatatataaagtatttaagaatagtatccagcacatgctgctgttgtgctgttataggagctcttatacttcctcagagatctaggttcagaaaaatacagtataaaaaccaccaatttacgaaataattgcatcaaattgaaattttttactgtgcttggcatatgaaacagtttatggtttttatgacctagttgaaaataccttggtggcatgtgcctatagtcccagctgttcagaaggccaaggcgggaggatcacttgagaacagggggttgaggctgcagtgagctatgattgtgccactgcactctagcctggataacacagtgagaccgtgtttcttaaaacaaatttataaataaaaatactttgttctcttctagcgagttgaagaatttctcagcaaagatatcagttatcttatttcaaataagaaggaagctaaatttgcacaaaccttgggtcgaatttctcctgtaccaagtccagaatctgcatatactg

SEQ ID NO: 125992 - DNA, 1855 bp, Homo sapiens
gtacaacctgcaggttaagcatggtttttacattttcaaatagttgtgtaaaaatatcaaaagaatattttgtgacaagtagaaattttatgacattcagatttcattgtcataatgttttattggaacacagccatacctgtttgtttaggtataatctgtagttgttgtgttttaggcagaattgaatagttgctgtagagaccatatggccaacaaagcttaaaatgtgtactgtctggtcctttgcataaaaaggttgccagcccctattctagaattattgaaatcacatccctaccactccatggccagtaaattgaaagatgcaaggaaagacaaattaaattgatttaattgggtgtgaggtgggataggatcaaatgagagataaaatgtttatttcagtttttaggttgaagtgtaattaagttattattttacaatattctcctcgacttacctattatagccatttgaaaattaaggaaaatgaggagaaaacagaagaaatgagtcagaaaggagctatcacttgaaaaaagagatacaatacatagaagaaagaatggaaaagagatcaagaaaggaccatgcattctctgagttaatgcttttttggagcaaggagacaatacaccagcgattccaaaataattgttggttatggcatttcaacgagttttcctagtactttatttaaaaagtgaagtaacggctgggtgcggtggctcacgcctgtaatcccagcactttgggaggctgaggtgggtgaatcacgaggtcaggagttcaagaccagcctggccaacatagtgaaaccacatctctacttaaaaaaaatacaaaaattagccgggcatgatggtgcgtgcctgtagtcccagctacttgggaggctggggcaggagaatcacttgaacccgggaggcagaggttgcaatgagctgagatcacaccactgtactctagcttgagcgacacagcaagactttgtctccaaaaaaaaaaaaaaaaaaaaaaaggtgaaataacatgtgaaaacagtatataaaatttattgtttttctgaaatctctgatttaataggaactaaaatgtaagccaattaattataaagaattccagtgaaacctagctattttatttttcatgttgaatagaatttactacaaaaccaaagaggtcacccaaaaaagagaaactttttaatatgagacccaaaagttctcttttcttagctgctttacctttttaacctgttctccagttaagcactatgttttaaatttttctggtctttttataggtgtgtttaagcagaggaaaattattagttgaaaaagctatcaaggaccatgtaagtaggaactataaagattcacattgtacattttgttattaaaaactcaactggaaattacagatattcttgaaattttcctttccacatttttaggcaaaaacctgaatctcagcatatattttattttacaaagtaaagaacttacttttcatgtagaaacatccccatcttgtggccttttaaaatattactggaaacttaaaacttgccttatagttttcattaaattaccaaggatgtgggtataaagtgggattgattttaggaattctatagaaaatcttgatgtcctagctattgtaactctatagggtctgttacaaataactgccttagtgacattaaacttcaaataattgaatttttattaaaatttagctcatcttaaataatttcctagaacaaccataaaacttttttttttacaggattttattccttcaaatagtatattatcaaatgccttgtcatggggagtaaaaattcttc

SEQ ID NO: 125993 - DNA, 1808 bp, Homo sapiens
tctctttttataaagatatcaggtccactcccatgataacccattaatccatgaattccctcttaaaggtcccatctctcagtaagtactgtcacactgggggttaaatttcaacatgagttttagaggagacaaacattcagaccatagcataagagatacctataatggtaaattctttatctaatttaactacaagaaaatatcactgtttaactccaagagtaaaattgctaatcttaaaaccttctttcttttaataaagacattagatactacattgaacaaaagaaaaaagagttgtatttactcaagaaatcaagtacttcagtaagagatggggtatgttttctttttcaatttttaaagtgaccaagcttggtttttttacttacgtatttgcaaagttttcctcccaagcagaaaatatcctaggggcaagcctgtgtatgatgtgcctgtttctgttattcaaataaatcgagtgtcatttaactttagggttgtactcaccaggtaaaagttgttcctggaatagtggcataggtcgcttcctcagcccccttttgttactgctgttttgtaacaggtacttttatttattctgtagaaaaatcactaaaatcagcctgttgtataaacgttcctaatgtaagtaatgtacttctttttggaatataaatatgtactatccttttcaactgctctaaatggtataacaaaatctcgttttagcatagctaactggcctgaccttgaaatacttgttaaacaaccacattggttgttaacgttctgttaaacctaatgttcccattatcttcagtccctttccttttccttgttgcttctttgaagcatctatacagtttcaggctttttccatcctttaaaacaaatacagtaaaacctcccttgatcccacatccctacctacctattatctaatccttgtaattcctcatccaaagttctcagatctctacttttatacttcccattcacttttcaacctacaaggtataaaacttctgaccagttttccaaatcattttgatactttttaaacccagtcatattggttctctcagctgttgtccatttcttccttaaacttttctattctcttctgaaatttcatctcttagctttctcctgatctcttcatatttctcagaccattcttttgtggcctacttttcctttgttcaatatttaaatgacagggatctaaaaataataaactgataagagtgtatatagagacatgaagccatagtaggatggcatattttagaaatcttgtatagcataatacagcctgatctttgagtgtgccagtgacaaaagataaagctggaaaaaccagcatgttaagattataaagtaccttgccctatataaaggagttagattttatcttggagagtttggaaaattatggaaagattataaatagagtaacctgattggatagtcattttggaaagatcttctggttgacagtaaagaatgaattatttggcaagactgaaaaatggcttttgaactcttgaacaattttttttttttttttttgaggcaggccctccccctctgtcatccaggctggagtacagtggtgccatctcagctcactgcaacctcctcctcccgggctcaagcgatcctcccacctcagcctcccaagtagctgggactacaggcatgagccaccgtacctggctagtttttgtattttttgtagagacggggtttcgccatgttgcccaggctggtctcgaactcctgagctcaagctatccacc

SEQ ID NO: 125994 - DNA, 2700 bp, Homo sapiens
tcatcttaagtgtgtttacctttacttttaaagtctttttctaataattacaatatcaggaacatgttggggttggcatctgattgtccttttctctcaaaaattgataatgtttttctggttgtttacatgtgaaatttaagttttgactgtatactggacattctaaatgttgtgtaggccctatatcctgatagtctgtaggatgctgattttgtttctgccattgttttagcggacagtcatcccagttttgttcagactgttctgtcttggtggttgtgggtggggtggatctaatctcagtttcaattttcaaagcccttgctatgctgcgttgggtctatccttagcatgtgcaacttggaggtaagccctgcacttgcatggatttatatagggaattagggatccctttctctaacttgctcttttcatggatcaatctccagcttgcagtggcctctttcccaggtcttctagtcagaaagtgagggtttctcaatgttagcttaagcttgtactacctttacaatctcagcctcctaattgggacccaccctcagggcagaactgtgggagaaaagaaaataatacagggattctcttggtatttttggccacttgaacctcattcctggttcttcctgccagaaagataggagttttagctgctggctctgccactgctgctaactccatgactgaaggttccagttttgacttccttccacaatctgcctgcttattttacttttcattcttcaggtagttgcttattcagtgttgtccagagtttctagttgtaatcagtggagttgattatccatctttaacatattgaatctttgcctaaattgactgactaataaatgttgactaatttctttattcaatttaatacaaagattttgctgaataagggcataaaaataatatgacttttaaaaaaacatttcattaactaccttttcattattggttttctttttatgaagtcaaaatcaattatagctagaatgcaaggtacttgctgagtgtattgtaaaacatttaaaaacaatagttttttttaacaaagaataatccttctttgatatagcacttttctgcatgatttttttatcttgaagatactgagcaattgcagttgctgttttaactgtactttcaaagccaatcttttcactatatatttttttttagggcaaaagagttggtagtggtgcacaaaaaacaagaagtaagtattttgtgatctttaagtgtatttggtttgcatttgaaaaatcataaaagatcttctaaaatcatataaaccaccctctaaatgatttattcaaggctttcttcgtctttatagaacatagatccttggtgaagtttggtgaagcctgtggaccgcattttcagaatgatgttttttttaaaacgtttcctttaaaaatcattagtctaccaagaaaatgaattatattaaaatgtagttaccaaaatagtttttaattgtgaaatagtgataacttgctttttattacacagaacagattctagcagtgaatctaattgccacttcattttgaattgataagcgtaaacaatgctttgagatatctgctcaagcagttcataactgatgaaaatatgtgcagtttctattagcatcaaagtcgcaggtactgcgaatagtgtgatttgttacatttataattgaaggaaatgctaaatttcagtttgaggttagtgaagacaatagtgtagtttttctcctgttctaatttatgaccttcctgaatcctgttaatttgagggttccatttagtttaagaatctcagaatataggagagagcttctgttatttttggaaatgaggtgataatggaagtacctcatctgaggcttaaaactttaaagtggatacatagttttttgtttggagggttttgttttgccacagtagttttattaaaaaaaaaaaagaatcctgaatttgcaagtatctaatatgttttctatgttctcaagcaggaagactcaaaaagccttttgtaaaggtggaagatatgagccagtaagtatttaagtccaatctgtatgatttaagtgcaatactaaagaggaaaatcacctaactaattaggctagctcgattagtactgttaggttcctttgtgtttgatttatattatactaatgtgcatgcggcacaagttaacgaaagtagcattaattcatttgtgctcaaggactgaatttagtttcagtatgttgtagatattcctgaaatagctggtttagaaaaatcatgacaccgtttttttagtatttaaattattctctggctaaatgcagtaccaaatgatttagaactactgaaagattacgccttcatttgcgaaaaagaaattattagatgctatttagaaacagaaaatctaagtataacatctaacatggttgatttccaaaattctgaagtattgtaggatagtcttgttgttgttgttgtttgttttgattttttgagatggagtcttgctctgtcacccaggctagagtgcagtggcacgatctcggctcactgcaacgtccaccccacccccggttcaagcaattctcctgcctcagcctcccaagtagctgggattatgggtctacgccaccatgcccagctgatgtttgtatttttagtagagatg

SEQ ID NO: 125995 - DNA, 1024 bp, Homo sapiens
gccctgcagtccatttgatgtagacaagccatctagtatgcaaaagcaaactcaggttaaactaaggttggtttgaatctttacttttagaaggaatattcagaatttcatctcaatttttctttgtaaagatttgaaatagtttcatttatgccataatggttatttgtgtttgtaattactattctgattacttttataagtctgaatctgtttagatggaggtggggagggccttaaaatatttgtgaataatgaaaatgtgtagtttatcttgaatgatctgaaatattctccagaatattcattaaatctttagtttgcttctcaatatagtataaagaaatatgattaaaagtacttgctgatacaagtctctgcaaattatgcagattgtgtgtgatagtttaggacaataaatttttaaagttattccttaggttcagcagttaattctttaccatgtatgtctgtcatcagaatccaaacagatggcgataagtatggtggaacctcaattcaactccagttgaaagagaagaagaaaaaaggatattgtgaatgttgcttgcagaaatatgaagatctagaaactgtaaatgtgattttatattttgggggcttgtttcgaaaactgtaatacttgtgttttaaattttagcttgttattctgatgcagatattttacattttaagaactcaagggaggaaatgagtattgaaaatgaatttttattcagcaaatactgagcgtctactacatactgatcactactctgggcaaacagcattgaacaaaacagacttaattttttaccgttgtgaagattatattctgtagggtaggggtgggataggggtggagataggtaaccacaggataaaagaagaataaaaatatagagagagaatattagatcagtgctatgaaaaaatagaacataggaatggggatgttgctatttagcctagacaaggaacacataactgataaggtgacatttgagtagagacctgagagaaa

SEQ ID NO: 125996 - DNA, 1126 bp, Homo sapiens
ggaaaatggtagtcaagggttactatagtattttgaaccttagcaattaaaaagtgggcttattatttataatgggaagagaagagttgaaagaagtaaagaccattgaggtagcagaaagaaatgggagagttgcaaagggtatataggatgaaaatgggggaactattatagtttgtaaactgatgagcaagagctatggattcaggctgccaggtttgaatcctggctccctggctgtgtgagcttggacagtgtttggcacatagtaagtgcttattgttagctgttatttgaataattttttacgtaatagataggtttgttttggtgtttggttcggttttggtagaagatggtgggaaagttaaggggaaagaataatactggaacatatctgtcttcagactctgaattgaagtttgttttataaaccaaaatatattagtgttttgtgtcagtttttttgtttttatgtaataaacaagaaaactatgattagtctaaaattgcttttaatcagaagctaaagtatctcagaaatatttccccttcctgaaaataattttgaaaattaaaattacagattggtcctgaagttttactttgctggtgtagcaacaaaataatctggaatggatgcttaatttggttctcagaaaatgtcgaggctaaaaaatgaaaaaattgttcagtggttgccacaaagaagaaaattagtgaaagcagatgttgagattagaggttgggattgaaatttaaggtcatgtttttacagttttcatttatatgtttcttagttgctaagagtaaagacattttttttttgaatgttaggtttcataatgattcaattccacttgtatcaagggattaattaacacatatttttgagtactggggagaaagcaacagataaggcggacatccctacccttatgcaccttatggtctggcagtgtagatagatagaaaatatgtatttgcaagtgtgatgagtttcacaaaagtaaagtatgaagtgcaatgggaataaataatgaggttatttaacctagaatgagggtctcaaaaggcccaactgaacacaggtgacgctttaaattaagacttataaggatgagta

SEQ ID NO: 125997 - DNA, 4483 bp, Homo sapiens
gtatctaagttagtttttgactttgtggaatatgaaaaggacacacctaaaaagaaaaggtaattagttttatcaacctaagttttaaattctactaggcggccaggggtggtggctcatgcctgtaatcccagcactttgggaggctgaggcagttggatcacttgaggtcaggagttcgagaccagcctagccaacatggcaaaaccccatctctactaaaaaaataaaaaattagccgggtgtggtggttgcacacctgtaatcccagctactcgggaggctgaggcagaagaatcacttgaaacccaggaggcagaggttgcagtgagccaagattgcaccactgcactccagcctgggtgacagtgagactccgtctcaaaaataaataaataaattatactagaatattaaactattaaactaaaaataaacacagttttcctgttcttagaaggaatatgtattttcgggatgtaaatatggttaaaaaccagtagcttcttccctactatcaaagatccttaccttagactacttttagttccattctttttaaattttctttttatgtaaaacttttccttttttaaattttttgttttattttgagacagtctcgccctatcacccaggccggagtgcagttgcataatcttggctcactgcaacctctgcctcccaggtacaaaagattctcatgcctcagcctcctgagtagttgggattacaggcgtgtgccactacaccccactaattagtctcattcttgacactgtagtttagaaggagttggctgacttttcctgtaaagagccagatagttgatattttaggttttgtgagccgtaagatctctgttgcaactaattagcttagcttttttgtacaatggatatgactgtattttgacgcaattttatttggaaaaatagactgacggctagattttgcccacaggctatatagtgtatcagctcctgttgtagaaccataaagtttaccatttactcagactaaaacattttattgaacttttaggtaatattaaggagttttaagaaaacttcctccacttgccccttaggtctttatatttcactaaatatctttgcctaaaccttatgatgggtatgtttactaaaggtactgacaggacttttaagtgtgaatacagtactgctcaatgtacaccaactgcacattgacaaaaattgtcctgattagattattcctataaacttaaagggatggtttcatatggatataccctagaggtggtgataactcattaagttagtctttattcttagactaatcttacttaagacataaagaagattagaaatgtgataacaagatacagcttctgaaaattaaccagaaagtttttttacttcaggtaaaacagttcttaaattccatatttctgtgacattcagaatggtttcatgactgacttaatatggatttgaagagaaggcatatttccaactattaaaactatgtgggctactgtgcccaggcagggtgtctcacacctgtggtcccagcacttcgaaaggccgaggcgggcagatcacttgaggccaggagttccagaccagcctagccaacgtggtgaaagcccatctccactgaaaaaaaaaaaaaattaggtggtggcacatgcctgtagtcccaactacttaggaggctgaggcgcaagaatcacttgaacccgagaagcagaggttgcagtgagctgagatcaggccactgcactccagcctggttgacagagagactctgtctcaaaaaaaaacaaaaaacaaaaaaactatgtgggctactctaagaacttataattccctaaaaactcagtctgcagcaaaattctgagctagtactggttgttccttaattgtcacttctgtgggcaagtgtcctaaacatcttggacttaaaagccatgttagagtagtttttttttttttttttacatttttttattgcccatttgttcaaagagaattgtttgtaagtaaatgtatgaacaagataaaaaagaacattctggttgaaggggcaggaaaaattgtattatttctcacagttaatctgtgacatgcggaacacaaaatgtaattggtgagctattaactttttctctaattgtatattatttaggtttgtctaatacaaactggaatttcagggatatcaagatgctccatgaagaaaataattttaggtcaaatatgtttgaagcttaaaagttacaactttgtcacctttgaaagtataaagatactaagtttctagctcactttgatattaaatattcttaaatgtaaatttaaaatatatgtttttgccataggtttctcagtaaatacttattctccacattgctaagtaaaatgaagagtaaaatgtgcattaatgtaaatcaaagcacagaagttaagaaattgttcagaataatgaaagcaaaattaggggcaggctcaaatccctttactatcaatttctttcatttacatgattaaagtaattttaaatgtcaaaattcaggatattggttatctgggagggaggcagggaatgtagaggagaagagaggtacactagggttttcagctatatctgaaaagttgtattactttaaaaacagctcaagtaaatttggcaaaatgttaagatgtttgtatttttgtaaaatttcctaagttaaataggtttcttaaagattatataatgtttttactaatttaatttctaactactcaggaatttgttttgatagcaattattttaatatttttcttctatttttcctacaaagaataaaatacagtgttggatccctttctcctgtttctgcaagtgtcctgaaaaagactgaacaaaaggaaaaagtggaattgcaacatatttctcagaaagattgccaggaagatgatacaacagtgaaggagcagaatttcctgtataaagagacccaggaaactgaaaaaaagctcctgtttatttcagagcccatcccccacccttcaaatgaattgagagggcttaatgagaaaatgagtaataaatgttccatgttaagtacagctgaagatgacataagacagaattttacacagctacctctacataaaaacaaacaggaatgcattcttgacatttccgaacacacattaagtgaaaatgacttagaagaactaagggtagatcactataaatgtaacatacaggcatctgtacatgtttctgatttcagtacagataatagtggatctcaaccaaaacagaagtcagatactgtgctttttccagcaaaggatctcaaggaaaaggaccttcattcaatatttactcatgattctggtctgataacaataaacagttcacaagagcacctaactgttcaggcaaaggctccattccatactcctcctgaggaacccaatgaatgtgacttcaagaatatggatagtttaccttctggtaaaatacatcgaaaagtgaaaataatattaggacgaaatagaaaagaaaatctggaaccaaatgctgaatttgataaaagaactgaatttattacacaagaagaaaacagaatttgtagttcaccggtacagtctttactagacttgtttcagactagtgaagagaaatcagaatttttgggtttcacaagctacacagaaaagagtggtatatgcaatgttttagatatttgggaagaggaaaattcagataatctgttaacagcgtttttctcgtccccttcaacttctacatttactggcttttagaatttaaaaaatgcatacttttcagaagtgataaggatcatattcttgaaatttttataaatatgtatggaaattcttaggatttttttaccagctttgtttacagacccaaatgtaaatattaaaaataaatatttgcaattttctacagaattgaatacctgttaaagaaaaattacagaataaacttgtgactggtcttgttttacattatatatatgttcgtaattgtttcctgagaattacaatgaataataatttgctttgtcactgaaaaccaccagtgaagtgcaatttggggaatatcaaacttagcattatacatttggatattctagttgtattgtaaattttaaaagattatcaggataacatgaccttgccttgaaaaacctaaatttcatacagaaaggaaaaatacatttctatgcttgaattctggaaatcatcagaaatattgacacttgagggtcactggtggaccatgctagtattttggtgctgagtaattagattatgtataggggtaactggaagccatgaaggaaggacttaaccaggctaccaagtggaatataatttatctgctatttttaattacttaccttgtaaataactttaataatattcaaaagttgactctcctgtggctcatgccacaggatcccagcactttg

SEQ ID NO: 125998 - DNA, 1013 bp, Homo sapiens
tgcaattagtttatttatttattttttgtgacagggtctcactctgtcacccagacaggagtgcagtagcacgattatggctcacagcagccttgacctcttgggccccagtgatccttccacctcagcttcctgagtagcttggattacaggcatgtgccaccttatctggctaattaaaaatttgtttttgtaaagatgggatttcaccatgttgcgcaggctggccttgaactcctgggctcaaatcatctgctggcctcggcctcccaaaatgctgggattacaggtgtgagttgtgggggcctagcctgtttttctgttttctaaaaggtcttttaatgtgtggttctttcccctctatttcttttttttccccttgcaattttttcagtgaagacatggagtctttcatcttgtagagttgctcagagtcaagattttgctgttgtagccagtgctttaaaacaattcacaaagactttctaggagaggaagagagactgagggaagaagagatacagaaaaagaaaatgacaggattgaacctggaaactcacagaatctctgactcatgctggaaatgtctttgggtacctcttgccttttctgtgttggtgaaagaccaccacttttgaaaagtggaggaggtcagtcctccttttctccccatttatggagcaccacttgtgcagttttttgattcacaggagtcttgacttggggtggaaagctattttgggttcatagagcttctactccctatagcaataaacatcacaatagagaagaatgactggtttttggtgaagtatgaatgaattggtaggatttaggtttaaaagtatgaatagatgattaattcaagtcagaaatgaaagcaatgataccatcttatagtaattattacaaaacgttatcccagtgcctgggatatgtgtacatagtaaggtacacatagtacatgttgatgtctctatcacttgggagccactgcactttaccatgctgct

SEQ ID NO: 125999 - DNA, 1524 bp, Homo sapiens
aatgttgctggagtcagatttcttacatttaccccattggaactatatatgacttttagtgcctgaaaaatatatacattttaaagttagacaatagtgaagaagcttgcagagcacaacaggaatgtttcatttttattatcttgaaaatgaaaatggaatttgtgaggatatctgacatttaaatggtgaaaaacacctcttgaaggacacgtgtcctatttgtttgtagatatgtacactctctgttacactcgttcatcgtaagtcacatattagtattcagcaatcaacaccaaaattgtatatgcctttttgtggtcaaagtttcataggtagaaacattaattgctaagcagggatccatattcatatatttttctccaaaagaaaaaatacaaagtatcttttatgccttcatagaactagcagtaccagagtcccaaacgtgatatcattcaggtaaaagagatatgtaatcaataataacaaaaaatgatagcttctgaaaacatgtagttgaatgtgtttactttgataataaaagcacttgcaagcaaacattgggggaaatagttgaaaaaataaggattagtatttattaacttaaataaatataaacatttataatatataagtataaatatataatatatacaaaatataaataatatataactttttttgtcatgtaccaggcattgtattgagtgatttacatgcattatctctcattatgaggtagatactgttatacccatttgaagatgaggaaactgaagttaattaacctgcctaaggttatacaggtaataagtggtagaagtgggaataggattctcaaaatgttagacatcaacataaaataatcttttataatctttactacttatttgacatgtggtttcccatttatctctgtgttggaacatacctaacgttatttcttggtctggcccaggtctcctccctagctaacttgcagttattttacatataattaaaatagagtacaacatgctgtattttttaaaatagaaatattttatataaaaatgatttttgacttctggctatcctttacttttgattttatcattagagttccttttaaaatagaagtttgttttgtttcccccaggacagactgttctctgtaacttgattttgaaaataaaattgaaaattttgtaccatgatccagaaatatcagcggttctaactggaaagagaaggaataaagaacgtaaatcattctcccctacccctaaatatgcttgttatttgtgttgaagagattttcagaatcatgtatcagcgaggttaaatgaacatttttcttctcctttttaaaatttaattttgtactaggggattttagcacttagcaataattgcccttttgttgcattttttgtctcaagtaaagattgttagataactctttgaagatgagaaatcgatggtgcttttctgcagataggccttgagagctcacattttgcaagtgattttaaaattttc

SEQ ID NO: 126000 - DNA, 1038 bp, Homo sapiens
ccacacagatgtggcgggaggccattatattaagtgaattaatacaggaacagaaaaccaaatactgtatattctcacatataagtgggagctaaacattggatactcatggacatcaaaatggcaatggtagatactggggactaagagagaggaagggaaggagaggggcaagggttgaaaaactaactgctgggtactatgctcagcatctgcgtgataggatcattcatatcccaaatctcagcatcactcaatataccaatgtaacaaacctgcacatgtatcccttgaatctaaaataaaagttgaaattataaaaaaaagattatgaaagctttgattcagggctacaaaaatgttctcactttttatgatcctgtatagctggtttagctgtaaatagtacatagctttttttctgaattatttcctcgtgaaagtaccttctaacttggacagatattgagtgataagaagataggggaaattcaagaagtgttcattcctgtcaccaaaggtgaagccattctggctaggtaagttactagaggtaagactatgtcaaaccacagtgtatagcagttttcattgactctcagaatcctctaaagtaaaaaaaaaaaaagtggtggggagaggatattggtgccgagatactaagaattttcacttaatttaatttctgagacaagtttagcatgatgttcttatagttcttaataatcttgaatagacaatgttctctcatagttaacgagggaaaagtactatttattcataatcaatttaatatgacatctacttgcggtctttgatgagtgttttgggtgttttcttaagtgttctgattatgaaatgatgaactttgcagttattgtagggttatggaataaaaattattttaatttaattacacgcaataacatggaatgaaggcatggaccctcatcttcatttgtatttctttccatcgttgagcacagacagagccttgtacataacaggtgctcaacaagcaaatattgactgaatgaa

SEQ ID NO: 126001 - DNA, 1150 bp, Homo sapiens
atatagttttaaataaaagtttgtcattctgaattcattgttttttcctttctgtttggactcttctcttttaattattgtgctgtttttggtaccattgtagagtagttgtgatcttaaaattttcagcttcttattaatctgggcccagcattagatgtagccttcagatcaatggaaagaactgaagaacttccatgttcttgcagtggattcccatatttaataaatattttaatacttatcaatcaaccatgtgtttctgaatttctaacagttttaaacagtctttccaaaatctgttattctgaagttaattgtttgtgttatttctctttttcaagaaataattaggttagaagaagtccatatgctttcattttaagcatcatatgttcactgatgaaagtattcagtgttcaggaagaagagagctccaagtgcagatagtattgttgctgctggtggtagtggggtgtgtgtgtgtgtgtgtgtgtctgtgtgtgtgtgtgtagagtattctgcatctcatctccataaggccattgggtcactcttcgtccttatatttcacttgacaagaagagaaacagttatacttttctctgaaccttctggcccttgtgcagttgggtatttcagttatgttagagctattaatcatgcctttttatagctcctcttctctgcagtatgttttcactagaactagagattcttgatttctctttttatcattctatctttgaataatgagggaactgaggggattggcaaatatttaatagactttggttcttgttccttttcttacaaagtttaaacttgccagctctgcaattaaaatttttccattggttctatttcaggttaaggctcagtagctgttttgagtaactaacactaatgcagtttgtgtgtgtgttgcaatttcctgtgatttgatttgtgaactgacatccttttaactcactccaaaaacatttattgaggtcctactatgtggcactgttctgtgcctttgggatacatcagtgaataataaaaaaaattctttcttctgggcttatgttctagcacatagacaaaaatatagtaaatgatgcagtaatacattatatggtatgttcaaaggtgataagtactatgg

SEQ ID NO: 126002 - DNA, 1049 bp, Homo sapiens
aaatgacgagttaatgggtgcagcacaccaacatggcacatgtatacatatgtaacaaagctgcacgttgtgcacatgtaccctaaaacttaaagtataataataataaaattaaaaaaaaaaaaagagaaaccttgtctctactaaaaagaaaaaaatacaaaaaaattagccagccgtggtggcgggtgtctgtagtcccagctgctcgggaggctgaggcaggagaatggtgtgaacctgggaggcagagcttgcagtgagccgagatcgtgccactgccctccagcctgggcgacagagcgagactctgtctcaaaaaaaaaaaaaaagaaaaaaaataaaagaaaagaagcaccatatttcttctctttggcctatttatcagccagaaacatggggaaggtaggttcctgaatattggaagaccacagaaaatgcgaagaaaccaggctcacatttattttagtgaccaccactgcaagtttggtttgggtgagaagtcctgtgttttgggtttgatccttgaggcctcatgagtttcagccctgctgctgaaagtgtcttggttttagccaaactgtggaggaaagtgacattgaatactggtgcaatgaactcattggagctgcttttcaaaatgttcagagacagtgtcagtgatgctgtattagtttcctggtgcttctataacacattagcagaaacttcgttgcctgaaacaacaacaacttattgtcttacaactgtggaggtcagaagcctgaaataggtcttacaaggataagatgaagtattggcagtgctttgctccttttggaggccctaagggagattcattccttgccttttctagtttctagaggctgtctgcattccttggttcctgccctcttcctcttagcactctgatctctacttccaccatcataccttcttctctggttttaaccctgttgccttccacttataaggactcatgtaattagattgagcccatccagataatccaggataatctccccaagtcaaggtccttaacaatatct

SEQ ID NO: 126003 - DNA, 1035 bp, Homo sapiens
tctgagacacccttagacctccatcttccctggtcattctcgacagcatttctctgttttattaagtctgagaatactatgtttattttctaaacttatttttaatttaattgttcattttctgtctcctctactatcagataaactccacaggagcagaaacatgatcagttttcttcactactttgtcccccaaatctaaatagctcccagcacttggtaggctctcagaagaaggttattgaatgaatcaatctgtatatagtctaagaaagcttgccttatattaaaactatgttaacatactcctgttcctattactatcaataatgcaaacattcttactaagcagtagttaagcattctgtcaatggattttcttttgaatttaagtacatgagtttctcattgggacataactgagatcaataaaataagataccagatgtaaaatggagctgcaggaaaaagaattataattaatgcagacagtaaataccttgccaagaagaattttaacattacctcaatccaagctgtaatcatgataccaaggtgaataacacgtggcccttgtgtttttcaccacaaatttgcaacattaatatttctgattcaaaggaaattgaggtaagagctttaatagtcctacaataaggatggaggagggagaggttcattttaactgaaacatcatttctggtaagcagaggctcttcccaaaacacagttgttagcactctaggaaactcaaagagctttaggtagagggagtgatgttatccattgacatcacattaaaagcaactctgatggaaagagtgtctttctataagcagttaacttatagctgttcagttgttgttcatttatacatccaggggattgataacaaccttcgaatgaatcaggcaatcagaagatcaactaagtacctggtgctggtcaagtactgaggtcttgatgtgatattgacctgtagtgaggaggagatgaggaggctagacgaggttggaaaggcttcatggaagaggg

SEQ ID NO: 126004 - DNA, 1010 bp, Homo sapiens
agagagatgctaaatctgtcacattaaccgtatttcactaatgtaggcttaacttggaattttactaatatgatacaaggctaggtccagggttgaatccaggttcattaggcctgaaaatcatttaattttaagggatacttttaagaaaaaaatataaaattatgattacaaagttaagtatggagatatttataactaatgaaaaaagaagtaataacatttttaaaagctgacaagtaccacaaaaacctacatatataacataaataccacaaaaacctagaaatataacatttaaaaatgaattgcttgatacactactgtaatatttcattataatttatatgctgtggctgcatactttctaatcatttctcttaaggtaatagtcattttgaaatatcactgtctagcttttgaatgtgtttgctcttgcttttctagttcttttaatcacttcttttttcattagttataaatatatccatgcttaactttgtaattataattttatatttttttctcgacacatacactctcccaatactaaaccaggaagaagttgaatctctgaatagaccaataacaggatctgaaattgtggcaataatcaatagcttaccaaccaaaaagtgtccaggaccagatggattcacagccgaattctaccagaggtgcaaggaggaactggtaccattccttctgaaactattccaatcaacagaaaaagagggaatcctccctaactcattttatgaggccagcatcatcctgataccaaagctgggcagagacacaaccaaaaaagagaattgtagaccaatatccttgatgaacattgatgcaaaaatcctcagtaaaatactggcaaaccgaatccagcaacacatcaaaaagcttatccaccatgatcaagtgggcttcatccctgggatgcaaggctggttcaatgtatgcaaatcaataaatgtaatccagcatataaacagaaccaaagacaaaaacca

SEQ ID NO: 126005 - DNA, 1101 bp, Homo sapiens
tacaaaagaagtagtctttgctgtatatagaaatcaggcatcataatttttcactaatttttttgaaatgccttttaaaatcatagttaaaatagtgtattcaaacttcaccaaatatgctattctaataaaaaaaagtgcatttatattgattttatttttgacaggagtgcactttgaattttgattaggtgtctgtgataatggaattctctgcttattattttagacatctggtgactggaaaaattttccatagactagcttctattttaaaccttttatccctactaccctatccttcagttggaggcatcatggggtgcatccctgtggtaagaggtctttggccctgcaccttgttttgttgattgagtcagcacagtgggctctaagaatgtatctggatgtcatttctacactgctaaggccagcagtaactttactgtacacaatagtgatgtgaaccacgtaagtgtttccgtaactctacttttcatttgtctgaatgccaaaaatgtctacaaccattccaacccgttatggttgaatttctctctttttttttttcaaatataaatagaaccatgtgaacatattgctagggtctctctatagaacttgtaagggaactgtccttggaagaggctcttaggttcttggtgagcctacttctggctatgtttcacttggaacagatcacctaaagaaccgtgaaaggacaggccatggaacactggctataaggtgccagaactgacctaaatttcaaatgtgtctgataaaattatcacaggtttttcatctgaaatggttgtttatgaatttgctttaagactttttttgcaggtgatggacacccgcttttaactagttatggctttggtagaaagaatttactggctcgggtaacaaaccactggaaggtaagcaggttggaagtagcctaaaggtcgcctggatttatatattcgaacagtgtcatatctgttaatctgtttctttcttttcccatctctctttttctatgttagttttattctctactcctgaaaaaggcctttttcttaaaaaatgattgcaggcagtgtggggttctat

SEQ ID NO: 126006 - DNA, 1064 bp, Homo sapiens
tactcacacatttggaaataatctctgcatgggtatttaaaacacaataggctttcactgcttatttttctatataatccttcatttttcttttggaaattaccaaaaccttcactaaagaaagaaaataacccagagttgtaattgatgcaaggtttattgcccctcccaaagttcagaaatcctctagtgtgaatgtttttatttgcttaattcttttgatggaaaaatataatatctttcttctgttgcagcattctaatgagggctggggatggacatgaaagggagtaaagatgtaaaatatttttcacaattgtatttttaatatagcaacccattttatcaccacatttattaccatttgtaatgtttggcaatcattaataatacgttaacagtataacagcacagatataaggaagtttccttactttagcacttcactggaatacagtactgtatctgtttcccctttgatataaaacctctggatacattgagcccatacttagtttatttttattttaattaactgttctcccttatccttccttgctgcccagtctgtgagaaagttgtgaattagaataaaatgaaaactcttctgattcattcaccaatttttgagtgttattttgtacagtgactgcaatttataacaaaaacagaaataaaaagaaaaagagagcctcctcctatgtaatcttaccatttgaagaaaacagttggcttttccttcttttctttcttttcctttcccaatgagaatatatatatattttatgtcatgtcattgtgatcatacttaggtagaatttgtagtcttccctctccatttaacatctgtcataaacatttccatgtattccacattcatttatggctacatatttgctgatgttccataatatgcaaaagaattgaaaatttcattggacatttatgttattttcagtcttgaactctataaatgatgctattatgaacatatttgcgcagtagagcctctcttctgggattctttctttgagaaaaattctaagtaatggaattagtagatc

SEQ ID NO: 126007 - DNA, 1009 bp, Homo sapiens
tctacatcctcaccagcccttgctatctttttgttattttttgataaaagccattcttacttgtgtgaggtgatatctcattgtggtttcactttgcatttccctgattattaatgatgttgagtattttttcatttacctgttgtccatttgtatatcttctttgtaaaaatgtctattcagatcctttgcctattttttccatcatgttatttgttttcttgttattgagttttttgagttcctcatatattttggatgttaacaccttatcagatgtttgtttcagaaatatttgcccccattttgtaggttttctcttcattctgttgattgttcctgtgcagaagctttgtagtttggtattatgctatttgtttatttttgcttctgttgcctgtgttttgggggttatagccaaaacaattattgcccagagcaatatcaggaagcttttaccctatgttttcttccaaaagttttatagcttcaggtctgtgtttaagtctttagcctattttgagtgttttttatatatgtcatgatttcagagtctgattttattgttttgcatgtggttatccagttttccaacactattacagttaggttaatttttataggactttcatcttgaatagttctttaatgtgcactggccactttgttgatacaatataaaatcatgggcaacttagttttactctttttcattaatagtggaatgtggttgttcagatggtagactcaggaattagacctacgtgggaatacatcttggtgtaatcattcaccagctgtggaacttggtgcttgttcctttcactggccacttgtgtacctccttgggcttgccatttgtcttcaggcatctatttcctagcctaccaaatgagatcatatttataactaccttcccaattggctgtttatttctgtgatctatggatgcatttaaaatacctagtacagttcctggcacaccataaatgctagctggtggtattat

SEQ ID NO: 126008 - DNA, 1264 bp, Homo sapiens
tgggagatttaggttaaggactcttgctgttaagcttaaactctgagagcagaacttttggtgtggaacaaagagaaccctcaggtgcaggtgttacaggttgtggcatgagcatgcaggtacctcacataggttctctcagacaggagaggaaattttggatggtatagctatgaacatggtgtctttctatgctaatcagaaccaagttaaccacaaatacacagattttaaaattaggtgacttgcaaaaatttattttcaagaccattctctgaaaaacagtttggccacgacttaatgtcagtttgactagtaatgaaactaaaatgactttaaaaatatttatcaatacatcttcatacatgaatatttagttgttagctgtaggtaggctagctttaaacattattatattttaatgactccattctcccctaattactgaaataaaatgatttttttaaaacctcaggatataaagatcctacaagaataagagctcaactttctaaaagtgattccataagtagggttcaccatatggtaatttaatgagaaattattgaattgaatttcatggtgcttatgggaaacaatattaagatcttctgatttagagatgattctgtaattgcagatagggccaacacaggaaaccgtgtcccttggttcctgtgggtttgagctgttgcccatttttaagtactttcatttttaaatagtgaattgtgtcagaggaatactcattaattttctctgttactcgttcaagaactgtgatattctcacagaagtattttaaatactgaacaaaagtttatctggaaatattatagttttgatggttagtatatgtaagtcatagtgagctagcttcattgattaataattactgtatattgctgtcctgtagaaagattatgctttcatatactgtctattaactcaggctccctaactcagtcttaggggcaaataactgccgccagtaatttactgttagtcatttggaagagttaaccttttctccttacaaatccaaactcattttgcttacttaaggctactgatggattattctttttagttaatgacactcatcttaatggaattaaaaaatataatgacttgttgtatttctgttttacatcattgtcaaagtcttgtatttttacaaataaatattatatattcctataagtgctcactttaacaccagggatttcctgtattatgcaatctgtatgtctttcaatcctat

SEQ ID NO: 126009 - DNA, 1055 bp, Homo sapiens
tttcctcctctgttaaacaagacaaacatgtagctcagagctttgggtgtgggaaatactccataaatattagttctgatatcattattgaggtaaagtggcaatttgtacagaatttctggcaaagtctttggtggcttctacccattcttactgctagtttctgattccactcatgacaggaagcatgtcaggatcaccagcggcagttctttacttcctgctttataagacaattttctgtgcctctagactgtaaattccataagaagttcctccaagagaagcacccacgggaacttgtactatattctcagcatttagcataatatttgttcatagaagacaataagtatctgctgaatgaaaaaaataagtgaaagaattaatccaggtattagaaaattgagtggtttctcctgttcacccaacagtatgtcagatgtgtaggggaaagtacagcctggacaggtctgggaacgcatattattccccctgctatcaaaatatgcagtgaatataaacaggaaaaataaaaactgatagccttataatcggcttgcctgatggtaagcgcatcctccacacagaggctcacattcatgcgttttctttctaaggtattttagagccacgtctgatcagttttaaattttaagtcaccaaatatcaacaattggcctgcgataaaaatctctataatcgtgaaatgttttaaacatgttaaaaattgtataaaatacctcaacagacatccacgtgtagatttaacatagttcagtgttttgctatattagcttttaaatcttttcatggttttaaaatctactaattgtgtatcagcatgtctcctgttagtttttatttttattcttgccttgactcttttacttgatcaatcttgttagaattttttgtaaatactctctccccacccgccccccaccccccctttttttaaagacagggtctcactctgttgctcaggctggagtgcagtggtgcgatcatagctcactgtaaactcgaactcctagcagtacttctccctcagt

SEQ ID NO: 126010 - DNA, 1087 bp, Homo sapiens
tcctcaaggccttgcttcctttctcataaccttctctatcaaataatgtttgctgatgtttaacatgggaatacatccacttcctccatcctgtcgataatgataatgcacaggtggttgtttcttacttgttttgtaaccccttataaagctaccgtgtcattcctcagcattctcttttaactaaatcgtttcatttccttcttgtttgttttactttttggcacagaacaatccagcactttaattttgttaaattttcgttgagaaactttaaaataattcctttttgttaccatcttagagatgtggcttttcatctaacaagcagttactgggtgtctcctgtgtgccagccctaggaatattaaggcgattgaaacacaagtcctgggagctcacagtctcatgaggaggccaaatctagcccatttcctgatgtggaacatgataggtatatttgctttttttttgagagagagagaggaaaaaaaaaaaaacaaaactgggaaaaatgcaagctaagcattgtcaccgaagaacaggtggcacctaagggctctggaaacatgccacctgaagacagtggagtgcaataggttggaatagcctatccaagggagagggttacactgacagatcttaaatctaggaaagagagctaatggacacggccagaaaatctagctagtctgcctgagtgacacctctggtcaggatctgggaataagcatattaggcagaaaggaaagaatataagtgtaagttaaataaccagagacaggaggccatgtgtctgagagcatggaagacttccatttccttgtttgtgctaaaagactactgtgaataaaggtgtacatttatttactttaaatacattatttgaagaaagaggtttttacaaacatggaatccatgcttaatatcagacagtctctgttttcttattaggaaaaagaaacattgaagtccttttcagcagtaaaattgttacatctgagctcaagacaagcacatctgtcacctaggaatagtacagtgagacctgttcacatttgtgacagcaagtgtatattgggggtaa

SEQ ID NO: 126011 - DNA, 1273 bp, Homo sapiens
agtatccaaaaataatggtaatggttcaccttgagtgttttatagtattatttgtataataagccccttcaggttgctcaaccatcaaagtcttaggaaatctgtaccctgtggaaagattgcagctttcctttcactttgtagaaaaatcctcccttataaataacctaatcttatatttggagatgaatctatacgcataaacagttgatgtataattttcacatctgctaccaagagcagataaatcctgagatcaatttggttatgggcaaagaagaatataaattaattggaaaaaattagctcaaaactttggtgtcctataacaatttcttaataaattatgaacttgggaatgtgtgattatttattctacttctcattgctcctcttctttattttgctgcctctagaaggttagtaatggaggtgaaagtcaagttggctttttggaagatttccagtaaataaagtaatgatatttataagagaaatatgaaaaattttccagataaattagaacagaaataatgttctagattttgcaaattatattcatcctttatatgtttatttagtattaatatactacagttacttaatggtttgtgtgatcgttaagtgcaacattatgtattataaaattcataagaaggaagggcaggtaaaactttgccctgtattgaagaaatctgacaaatgcactaagttaaattaaatttaatttccttttagaatttcagcaagtaaacattactccatcaaaatttattttgaagccaagaccaaaaaggagtaaacggcaggtatgtattcacagtggtgtgtcgtgttattttaaaacaattgtcaactgccagtcatttgaatctacagtaagtctgtgtgagagggtgagtattagtttgggaatttgtcagggtgtgataaaccgtaagggtgatggatctgaagaagcagtagaaagggggccatgttgtttcacagatgcaaaaaggattcaagatagtggtgataatatgtttcttcatcatattatgggttatgaggctcctgcttgtggcaccttgggttctttctaccataggcttctttccttgcccagatatgtaccacatcgtggaatccacttgtatggtttatatccttgtatttattccctggaagataaccccttaggaatgaatcaatcaggttgtgaagccacagaatgcttttgtctcacttgggcaaaactttggagtccaggatataaaattaggtcatggac

SEQ ID NO: 126012 - DNA, 1009 bp, Homo sapiens
atatattttgaacattttagatcgtcacaaattcagatatccatagacatcagtagacatataacgtaagtgaaattaaccagatataagacagtattaggtgggtaaggcctgtggtgaaatgaatggtgcatggcctgtctaaggggagcaactgcctctcattgtttgccagttattaccaggtgagaatgctaattttaactgaagccagaaattggattttacatgatatttcctgatttttaaaacacgattgagaccaaccaaagatatatgtgatccacatctgccctgtatgccacctcgttgtgacctttatcttagaggtttcttcttgctgaataagtcttgcagaacttttaaatttgtttgcttttagcagtgttcacatccactttactgtctatacccctacttagatttgtatgtcttgcaattcatagacaactttcatatgttttatcattttgaataacaatcccaataaaaataaacttatgaaatggatggattgggtattttttacttcatctcccagatgaataaattgaggcttcaatcctttaagagacttgtctcaggcaacacagcagataaagaacttgatctcagctctgactctgacattgttttacagacaacacatttttacagaaaagattttttttttttttacatttttagggatctttcaattgcaccatgttttctctgatgagatgattgttttctgatcactttgcaagaccttcacttgttttcttttgctttcagtttaaaaaacatcggctttccgttgtacataccaatacctatgcgaaatctgtggtgaacatggcagatttagtaagtatcaaccccgttcattattgccctagaagattcttatttcctaattgctaatagaatggataatatgattcttatagttttactgctctatgttgcacttcagccaaggtgtctagtaagttccgggtgaccttgcaatagactttattgactt

SEQ ID NO: 126013 - DNA, 1077 bp, Homo sapiens
tattgggcccagattgcgccactgcactccagcctgggcaacagagtgagaccctgtctctaaataaataaataaataaataaataaataaataaataaaattaaaaatataaaaaactaatatggttactgtaagtgaccagaggacagactggggaaataatggcagataatatgggataattattatatattcatgttatgcttggaataatttccagattaagctacttacagattaaattgagagaatctttacctttaccttcattgaaaataaggccctatttatcactttgaatgattttccagggaattgaataattccctgaagcatcaggttgtcacctaacaacccaactggatattttttccttagtatttaacagatttggggataagaaaaatagagtaggttttccaaagggtttcttttactcctaaggcactaaacctactagagatgatcaaaaagaaaatacttgcatttttaagaggctgcaaattgaaaaagatatcctcagttcttcttaagtttctattggccgaagatcatcactacctcctgttactcatttcatttgttttctgaagctacattctattccacttgaggggaatttcaggattacaactggatacaaagatgaacaagttctaaaaaaatttacagatttaattttattttgtattatccaaaagacggatttaattatataccaatattgaatttttcaagaatgtcactggtgaaatttggactcagatatacatttccaaaacccaaaagctgtgattatttcctgacttctagtattccctgtaagacctaatcaaacatggatttttgtttcttactactttttcccaaatgcatattcagtgctggctacagtgtgttcagcctcttctaaagaaattgcttagaaattacttattttcagcgatattgtgacatttttctctggttctttgtcagtgacaatttggatttacatatattttatttttgtttttgtttttcagtttgggaaaactgatttaatggctgttacacttgcccagtcattagcccat

SEQ ID NO: 126014 - DNA, 1007 bp, Homo sapiens
tggctgtgacccctgagggtgcttttacagagaggcctctttgtaggaggcttaactagactttgacttctaagagtcctacactaagagttagtgactttttactttggcagtatggatccaactcaggttttgaccagtaggataaagagggactttggggctgggcatggtggctcacgcctgtaatcccagcactttgggaggccgaggtgggtggatcctctgaggtcaggagttcgagaccagcctggccaacatggcgaaaccccgtctctactaaaagtacaaaaattagctggatatgatggcaggcgcctctaatcccagctactaaggaggctgaggcaggaaaattgcttgaacccaggaggcagaggttgcaatgagccaagatcatgccactgcactccagcctgggtgacaagagtgagactccatctctaaataaataaataaataaataaataaataaataaataaaaggaggggctttgaaaaaagacctatttaaatttgataactctggcagagatatgttggatagattagaggaaaaggtgataaaaacattggctggagtaaaagcattgcaaggaaaaaaggaagtaatattgttaccatgaaacagatggcttggttggtcacttactgggtatcaacttaattatcataaccaaggaagattaaatgaaagggattttattacttttaacaagcaagtagaataccatggatagttcccaaagcagtgtatccctgagctggaggctgtgtcaggttttataagcatagggtaatgaggtgtgatctgattggatcttgcaatgaggtggtgctgggaggcatgatcggactggatgccagagctcaatctgattggatactggatcctgtcattcagtgtatattagtttgtttttcattgttataaatgaaaacctgagattgggtaatttataaagaaaagaggcttacttggctcacagttctgcaggctgtacaag

SEQ ID NO: 126015 - DNA, 1041 bp, Homo sapiens
ttacctttcttggtaaagccaaggagactttcagtagatcttttcttgttgctcagcttggtgtatctcttgcattagctgctgaggaaacaagggagtactttgagacatgataataccatgcatatattattggtcctgcaagtttagaatgcatctttacacactttatgttttcatcctcccagcagcatcctcatacctatctccaaatatttaagcctttacatcaatactaacatttgaggcttacttcccctaaagaaatctaattcttgttttctcatacaaaatctggtgtaatagtctacgttatttctatctgtctctcactttactctgtacatttcatggagcagagccaggcacttagacagtaattggtatacattctcagtaaatatttgttgagtgaatgaataaatatgcactctcttagtgataatttgctgattgagtaactttaaagagttaaaggaggatgggatatgaaactatcatagtaagtatctactgtgtgccagagattatgctaaggacttttgtatcatcttatatctgaatttctcaactctggcactattgacatttttggctggataatcctttgttgtaagggtatgtcttgtgcattgtagaatatttagcagtatctctgcattccacccattaggtgccagcagcacccctcctagatgggacagccaaaaatgtccccagacactgccaaatgttcccttgtgggtaaaatcacccctggtggagaccactctctgagataatgctcacaagcacacttttgggatgggcattattatcttgatttttacagttaagcaaactcagtctcaaggaagttaaataacctctatacaggctcacttagccagtaaggaatagatgtacagttatgccccagatctgctggcagcagtttctgttgtttccactctaccactgtgtctcctggcagctttttaagacgagcaggcactggcagagatctctgaaagcactctgttaaaaagaagattaaaccaa

SEQ ID NO: 126016 - DNA, 1029 bp, Homo sapiens
gatcaactgtttacatgtgatacatcgaaaactgtttacttcaacttttatagaaacccaggctcatggaatcactgcaaatctatctgctcttcagacaatacgaagaccctctgagatgctacagaggagaggaagcggagtttcacatctggttaccattttctttttgtcattggcttaggatttaactaaccatgaaaagaactactgaaatattacactataacatggaacaataaaggtactggtatgttaatggataatccgcatgacagataatatgtagaaatattcataaagttaactcacatgacccaaatgtagcaagtttcctaaggtacaatagtggattcagaacttgacgttctgaggcacatcctcactgtaaacagtaatgctatatgcatgaagcttctgtttattgttttccatatttaaggaaacaacatcccataatagaaatgagcatgcagggctaaggcatataggatttttctgcaggactttaaagctttgaaaggccaatatcccataggctaactttaaacatgtatttttatttttgttttgttttttacttttcatatttatattagcatacaaggacaattgtatatatgtaacatttttaaaattttaaaaaaatgcagctgttacacacaagtgtattttgccaaatgcctaaaaattccgtcacaatcacatcatcgtcatccatccagtgatcttcaaagactataagcaggtaatgtaaatatagtggtcaatgctgtaaatgtgtctctccataattcgtatttgtccaaaacatgtgatatccctttaacctgtgcacagtctggaggcagttttattgagtgagtagttgagtgagagaacaaaatgcccagcaaaacttctggcctccacagtttgctgatgcaggagcccactctgctgccgatgggctgctccctggaaatcatctatcccatccgtccatcccatctcatcccagtgagccagcccctcagcagtgtgtgctgc

SEQ ID NO: 126017 - DNA, 1318 bp, Homo sapiens
caaaagaaagctagctaccctagtgaggctggagattgatgggctcaatcacatggtctgctctgaagtatacttctgatttcctcatttgctgtgtgttcttaagaggaatggaatctgcagacaggttttcagatatactctcttaaatttgatcctctcccatagtatccatggacaaaatccatatcatcttcatatgtaatcaatttgattacatatcatgcccaaactgaagggccgagttagaaggcagcattttatactgtgtgtttatgtcttctgtaatggacctctcttttgaaagtctttgaaatgtttggaaagcaatttaatgatccaaaattacataatgtaaaacagcatttttcatgacaggaagggatgtgattgttgatatgaccataaagcgatccatcaggccaaggtttgggtgagtgttgggcagtgttgccacatagctcaagccaagaacagaagggcagacagattgaaagatgtagcaaataaagtgactttttaccaagatcactgtaacgtgcactgaatgtttcctggtactgagtgtacaaaaggctaatgctataaggtttattttgactataaaagagtttatagatttgaatataaggtgcctcatgtaaatatgcttcctagttacaggtacacaaactctaatttgaaagaatccacaaatggctagctgagaagttaacagatctctatcattcgtctgtgtgtctttcttccctcacctatttttacatgaaattattatttcaaatgaaaatcatgatcatgtgccttttgggagacatggtttctctagaggtatatagtttgtaattacccgccttggtaataaccttcctgtggaactgactaaaaatttttgttttatttgtagagattatgatttgaggtatacagtaactttaatgttctattcttggaatctactctatctcccatgtttaaacattcttagagccatttgtgggattcattgacaaatttatagtctcaagggagagtttcaagaagtatctatatgtatactcatggttggggttctagaggcattacatctaaatatttatgacttttcatccaccgaggtaggtagcattaaatatacaagcacagcattatttctctttaaatatctattttggagagaaactttgaggccgtatcacagtttatatcatgcaactaatatttatatttcccaatccactacaaaatcattgctaagcagaagagagcagttatttggcctttatgttccattgtatgcctttttcccctcttccag

SEQ ID NO: 126018 - DNA, 1041 bp, Homo sapiens
tatatatagtactttaaatattttcttatgttattatttaacacaataataaattcttatctaaagaaaagattattttactttattttacttaaaggaaagagaatttattggcaggatattgagtagcttgtagagtatatggaaggggagagccaagttaggaactggcaggagcgaggagggacaagacagctgcctgcacagtctgataggacacatctggctgctgccactggatgcccacatgggcagcgtgttgtaaatatcaccctaccagttggtaagttggcatgaattttccatgaaacacttgactgccatttgcagcatcatatctactttttatgcacctaattatatttttcctttcacttttatgtttttttctaaaactgccacctaaatacctttccactccgttaaatgtatggagtcaagataaatttctcattcttgctctacagtttaagatgtataagaagtaaacacttccgtggaatagggcttaatttggggctcaaatgttttgttttcctcctgagatgtttttgaatggataagactactctggttttggatgcagcaacttttctcctggcatggaagaactaaggactttgataaacagtttcccattgatagtataatataatgaggggcccagtctgctcttgtgaaaattggctgagcggcagcagcccatcccagctgtgtgtgagtagccccgctgttaaaagtacacctgctgggaattgttggcacatgctcatagcatatgctctgtgggggaggtgcttttaattccaagaggagcttttctcccacatctgcggatgcagaacaaagatgcagcaggactttagaaaacaggagtgtttctactgacattttattcattgctttgttagtcccgcaaatggagcaacttctggttgtttgtaagcagaaaaacaaaacattcaaaaccaaaaacctaattagtacttttgtcctttatatccctaggatgctctagggagtagaggtggcaggcatctt

SEQ ID NO: 126019 - DNA, 1020 bp, Homo sapiens
tcttgatttaacagcttttaacctggagacttgccggcttatggtttcaatgctggatgtatcctttactttgattgttgtctagaataattttttctaaaattctaaaggaattcatcttagaattaatatctagtaaacacaaagtaataaatgatcactaaaaagctttctgaaataattagcttctattatagggtggaatttggtgtgaataaaggaagaaaagaaatttagtaaacagaatgttgttcaggaatttaaggaaacatcagagtattatagaacaagtacagagtccagagtgtcaggacagctttttttctttaacattgattcctctgcaagtgatgggatttttcacatcccacttgttggactgagtttaggtagtgctgactatccagtgcattccatcccacctcatttgtctgggggcactaaacaagggaatattagtaccagagatgatgctaggacagaagggcaaacagcatagcctgaagcacccacaaagtacagcctagttccagtaacaagaccgctttttataagtggttcacaatggcaacgctatttccttataatcaagtcatgtaagttatcttttccccacagtaaaaattggcacttgagctttttctccatagcccctttctatttttaaatcattaattttacatcataccaagaataatctacaataacttttttagccattgaatattgaattccccttatccttgatctttcatttaatccttagaaaatatcgcaaaatacagctctaatccttgattacagttcagagagatatgtctggcacaatgggtttcaatgaatttaaagaactctgggctgtactgaatggctggagacaacactttatcagttttgacactgacaggagtggaacagtagacccacaagaattgcagaaggccctgacaacaatgggtaggtatggcttactagaactctccattcattggtagaagtaagttgatttttatttttaaa

SEQ ID NO: 126020 - DNA, 1011 bp, Homo sapiens
gtggcatctatttgtgtgtttccttaagtatagttcttatttcttattgtttgctctttgaccctcctaattctttcttggcatttgttaattcttattttcttttcttctataaacttgtggcacaactcctaggtataaggaatgctacaattttttaattttgtaagtcagaataactttttgtggagctactgtgcacctagccaatatcacattcaatttaagttaatttttgtgtctttttttctctcatccttctctcaaatcagggtgcagaaattgattagggctagaaggtgggggagggttctggtctgtgcctgtggtggttgacatctttattctggctcttctggccacatgatactgctgttaagagttgggtcgatgtagtcactttgctttgcatggcctttgaagtgtttctcagagaactttactgtattgactgaagattcttactaaaagctttgtgtcttactaaagtaatgagtcatctctcagcatttgggatacttcattctgcaatcctcgttcctctgcctcagattcagggtggtggagggattaaatccatacctttttctcagattcagccattttcaacttttgctccccaagcatcttttcttcactatctctttaccatgtttagcccttctctgagactagcagcttcataatgttcagtgaaacagaaatgcatttttttctttcgtatgtatttttagaccttaagaatcacatattttcttctctttcataggtaggggattggaacttggaaaaagagatatgcttccctaacacactctgtgatgtacatttgtcacttatttatgcttaacatcttaggacataacaattggcgaaactatctgttgaggattatatttgagtgaaagggttaataaatgtcataattattatctaatgttattaacaaaagttatttattttgctgcttttctgcctgtgatgctttgtcagttaggttctccaagaagc

SEQ ID NO: 126021 - DNA, 1075 bp, Homo sapiens
gctctcccctctctgagggtaatactgaagcacacacagcatactggactgtgccaccccgctgagctcaagcttacattgcaagaagctgcagatctgttaatgcactttcaaacccatgcactgccttctcttttgcttatccctgaagggaagtatttttagtcccagatgctggaactactgtgattcaaaaccttttagtaactttatttggaatgctgatgagttaaaaccagaattaaacaaaactaggaaatatttttaaagtaacatttaatgaatacacatttataaaagccatcatcccttaacatggggaaagtgtacaaaaataatgtgaaagtgtaaaaatttttctagaatacaggaaacatatcagcagtaaagaagtttagtttaactttttttttaaatgtaaaatagtttggatctgttaaaaggaatacagttcgcccaaagcacttattttcatctgttgtaaactcattctttctaccttaagtaaactggaggagtcagctgtgttaatatggtcaaattaatttcatagttttgggagcagggaggttgtgggaaggacagaaggagaacttgggctttctttggtcagctggtggggcttggagcacttgtggttggggccaaaggtcaggtctggaaatgcagctattatgccaaaaccatcagagtgctctttagcttcaggcttcatgaattgcttttaactactcaggtagagcatttttactaggctataaaagtagagttcatttttttctataggtcagcattttacctatggatggcattttctattttcggtgacggactatgagccaggataaacacattactctcttctttaacaaaaagagcatggttaactccaaagacttctctagaccagcctggatggtacctaaactttaatcaaccaatgctcaagtaaaagagcagtatccagccccagcacacctaactgttttgcataacataggtgagtagtgacattttccttatcttttccactgatactgtagggtcagcaccgtataccatgactctactcaat

SEQ ID NO: 126022 - DNA, 1007 bp, Homo sapiens
tttaaaaacagttaattaattctgtatttactccttttccttatttaataattattttgaaaggctacaacagcaccatgccaaatgatgacgtaaaacagtgaaccgattttaaaataaggatgtagaattaacatatgtaacaagatgttttaaacttgtatgtggtgtcttagataggtaagtaccagggtttttagttgatgatggttttaggcacatcacacttataaaagacatggttctccacactgtgagtagtttgatcttctgtgtttgtggtgccgcatcacttatgaatgcttctaatctcagtgtataaatggaaccagtttcatacaaggtaatggaagcagaaaaggatattcaccaagtattagtttctagtactgacaagaagcctccagaggctgacaccatggggttccatcaaactaaaatctgagggtgcagacagtgggagatataacagttgaccaccttatttggtcaagctcaagaaaattattcacagcacatattagcaaaatgtaatatttagtgggcatttcatcttggaattatattttggaatctttgaggcaagtgcacatttaatgattcatgttttaaagattgagtgtaaatttgtttattcttacctgccgacttgcatccagtgctcctgactggagagcccaggctgagatggtgttaaatgcttttaccacgtgggctcctggcaccaaatgagcaaggtactctgcattagattctggatattgattgattttgaggttgttgctgatgtctaccaatatttttccattgagaacctcagttaattctgtgagaaaatcataatgctctctgtggattgctatgattatgatgccagacttcttggctgcttctgaatagctcaagacttctgcaccactgggcagtagggtggtcttctgggggtttcgacttccaaaaacaacagaataaccacactggagcattttcaatcccagtgatcttcc

SEQ ID NO: 126023 - DNA, 1085 bp, Homo sapiens
cagctttctcatctgtgaaaaatataatgttgactagaatagatgatatttacatcccatctagttttaacattccaagaacacaatgcccatatgctacttttacaattaaaaaaacaccccagaatccacacttacatgtggcaggcaactgtgccttctctcttctgtgccgaccccaccaagtattcataatcattcctttttctgtcttgaggcagcagtatatatattttctacaggaatatattataactatttgtaagcatttgcattaaaaatcttccaggacattaaatattcaacatttatgacatatttctgttcaaatatatctaagtgaataaaatgtcaccaaatataaacctcagtagaaagcctgaacaatagacagattctggagaagccaaaaataactagagaatggattagaagaagactttacaatgttggcctatgttgtttaggaccattgagctcctccaagaagggtcatgaccactggcatgcaggtttaactctttatctagaacgaggttagctgcctacgaacttggaggtggtgaatttttttgaaacatgcttaagaatctcctacaaaattatgttatcaagtcatgcttacctctgctttgtccatatccttcttttattaaccttctctattatcttcacccttgggtattcttcaggttgaataatttcatctgtcatagcagtaggtcaaattgtaaactcaattttaaaattatcctctttcaataactctcttttcttttcttttcttttcttctcttgtttcttttttttttgatggaggcttgctctgttgcccaggctggagggcagaggtgccatctcggctcactgcaacctccaccttttggggcttgagtgattctcctgtctcagcctcctgagtagctggaattacagatgggcatcaccatgcccagctaattctttgcctttttatttttattattattattttttgagatggagtctcactgtatcacccaggctggagtgcagtggctcgatctcggctcactgcaacctctgcctcccggcttctagcaatt

SEQ ID NO: 126024 - DNA, 1020 bp, Homo sapiens
aagtggtctaacctgtctgctggttggccgattgaaacctatgtggcctacattgaatgaagttgatggccaaaatttcttgccaaaatgtaaagaaaagagtccaaagacttgggagaataggaatgttggagtggattgatcaccggcaactgcttatctcccatgctatgaccgccaaatagccagtaatttaccattaatgtaatagcaacttttggaataacaaggaaaaaagaaagaaaaagaaaggaagaaacgctacaacaatagacctattttttttccttcagtgcatttcatccagagtttatatctaggtcacacaatcaataacctaaagatttttttgaggggggatttacttttgaccagtactggagtattgggcatgactacagctagtcaaaagtaattcctctccaaaaagccacaactctgtgatatcagtttttgggattatgacttttaaagcacctctactattgcaataaggcatatcaaaaagcacttgggctttcttggcattgccatttagttaacttgtggtttcattttttccttaatggaactgtgtcttcttggacagtaaacatcccttgaaagtcagttggaagcttttgcttaaatagatgttcaatgctttgtgacaggctttcaccacatataaagtagacataccaacaactcctagctttagaataattttcacacaatcactttcttccctcaagctttatagtggtgtaatgtttttgaaatcatttttaggaagtacacaggatgcaatctttggaaaaaattcggtggtacaacaaataaccccaacaaacaaatgaacacctcaattgaagtgacagttggatcaacagatactgtaaatgcctggcagtgacagttattcttctgcatggatgcattcacttttttaaaagtgttaaaataaaaaaaattattccagatttcagaaatcataaatgtacctcctatgattaaagaaatagttgacatagaatatat

SEQ ID NO: 126025 - DNA, 1049 bp, Homo sapiens
cctgagtccagggagattaaagtttcagtaagctgtgattgcttcactgcactctagcctgggcagcagggcgagaccctgtctcacatttaaaaaaaaaaaagcataaaaaagtattaaagcgtaaacaataaagcaatagctttatgtttaatggctgcataaattccaatgtacaaatgcactttgttaaataaccttccaatcttcagcattttaaattgcctacttttttgttaaaataagcaacagtctatgaacatctttgaatcttagctaattcattttacaatttaagtaatttcagatgtaaaatatgtggcaaaatgattatgtattttgtaagagtttgacaaatattttcaagttatcctacagaaagatgaaccagtttatgcccaggagttgcttcttagttaaaaccttgataggataaactgagaaacccaccaaaattagaatgcccatctcagaattaaaaaaaaaaaacattaaaaaacagactaaatagatactagttttgttatcagaaacagttgagtttaaggtgtgaggtgctcttatgttaattctctgaccaaacctagcaaagatcctgccattacatcaaagtgttgcactggggttgtcagaaataccaactgtatggctgttggtttgcagccaataaacaagcaaaaaagctcaacatcactgatctttagagaaaattaaaaccacaatgagatacaatttcacaccagtcagaatgacaattattaaaaagtcaaggaacaacagatggtgcggagagatacgaacacttttacactgttggcgggcatgtaaattagttcagctattgtggaaggccaagaaccataaataccatttgacctagcaatcccattactgtgtatatacccaaaggactataaaacattctattataaaggtacatgcacatatatgtttactgcagcactatttacaatatcaaagatatggaatcaacccagatgcccatcagtgatagattggataaagaaaaggtggtacatatacacctg

SEQ ID NO: 126026 - DNA, 1050 bp, Homo sapiens
cttggttgtcagtcggttttatattgagaaatgttttttaggctgaaaataaggtacaactttagcaacataagaaacattttgttcatggacgaggccatatttcaaacttctaccaccctcacaagattactttttaatattgttgttcttctccttgtttaccaatatgcatgcacattacagttctatccaagtaaaccatcaaataattattagaaaattaatagattatggaagtgttgcattcaagaaaaaaagtgatagctcctatgtcatttgtcttagaggaatgcaaaaaaaaaaaaagaaaaagtcataaatttgtggagacctgttatcagggcttcatagtaggcacagggaagagtgtagaaggagattcacattcaggaaataactgttgtttgcatttcttctttctttatttaccttctggtaggtccaacaaaataaagaagatgcctggattgagcatgatgtttggagaatggagatttatgtgtctctgggaattgtgggattggcaatactggctctgttggctgtgacatctattccatctgtgagtgactctttgacatggagagaatttcactatattcaggtaaataatatataaaataaccctaagaggtaaatcttctttttgtgtttatgatatagaatatgttgactttaccccataaaaaataacaaatgtttttcaacagcaaagatcttatacttgttccaattaataatgtgctctcctgttgttttccctattgcttctaattaggacaagtgtttcctagacataaataaaaggcattaaaatattctttgttttttttttttgtttgtttgttttttgtttgtttgtttgtttttttgagatgaagtctcgctctgttgcccatgctggagtacagtggcacgatctcggctcactgcaacctgcgcctcctgggttcaggcgattctcttgcctcagcctcctgagtagctgggattacaggcacccatcaccatgtccagctaatttttgtatttttagtagagacaggg

SEQ ID NO: 126027 - DNA, 1004 bp, Homo sapiens
agtccagtggcgcgatcttggctccctggttcaagcgattctccttcctcagcctcccaagtagctgggattacaggcacctgccaccacccctgcctaatttttgtgcctttttagtaaagatggggtttaatcatgttggccagtctgatcttgaactcctgacctcaagtgatccacctgcttcggcctcccaaagtgctgagattacagacgtgagccaccatgcccagcctataaatgacatagttttatcagttatttaatttggattccttatgaataacttcaaaagaaaaggtatagacactgtggacatcacctgggagcttgtgaaaaaatgcagaatgtctaacctccctctagacctaaagaatctgagtgtgcattttaaagaggtccccaggtgatcatatttgcattaaagtttgacaagtgcctttctagtgagtcattcccttggaaacagtggtctgctcaggtcagcaggatcatgatgcctggagaactggggaggggatccccttgtagaacagaaagaagagatacagtcatggaaatattccgaattttgaatattatgaaacaacaggaacaaagtatgttgtgcaaggagtgacgcattttaaggaatggcattgcctttcccagaaagtgaagagaggaaattggaaaattgtgagtggaccttctgatactgctcctccttgcgtggaaaaggggaaagaactgcatgcatattattcagcgtcctatattcaaaggtaactactactctttcgcaagtgtaatttttcattactacaaacaacaacgtaaaaattaacataagtgagggtcagaaagccacatctactatcgccaaatgatgaaagtattagattgaattctgaatcttttactagagtgattttcaatcttggttgcataataaaacatctgctaatcttttttaaaaaatgctgttgctcaggatgaaccccagaacaattaagtgaaaactg

SEQ ID NO: 126028 - DNA, 1011 bp, Homo sapiens
cgtaagtggagcatgcgattgctaccatttttataaacaacaatggtaatgctgagtctttttgttttttccacaggtttatatatgcagcaacaatattcaagcgcgacaacaggttattgaacttgcccgccagttgaatttcattcccattgacttgggatccttatcatcagccagagagattgaaaatttacccctacgactctttactctctggagagggccagtggtggtagctataagcttggccacattttttttcctttattcctttgtcagagatgtgattcatccatatgctagaaaccaacagagtgacttttacaaaattcctatagagattgtgaataaaaccttacctatagttgccattactttgctctccctagtatacctcgcaggtcttctggcagctgcttatcaactttattacggcaccaagtataggagatttccaccttggttggaaacctggttacagtgtagaaaacagcttggattactaagttttttcttcgctatggtccatgttgcctacagcctctgcttaccgatgagaaggtcagagagatatttgtttctcaacatggcttatcagcaggtactgaatgtgcttgttatttatctgatgctagtaaaatactttttattagtataaattgtaaaacataaaattttacatgccctgtaatggaaatttgattttggtatactgcgggaggggaaagaattgttctttaaacaatgtttttgcaaaataattaggtggctaattcaaaattatttaagtaaaggctgctaccatccttttccatacagaataaaagcagaaaaatagagggttgggttctccccctttttcaatgttataattgcaatgagtgctttcagtattcaacaattcattattttaatgttttataattggctgtgctccacaaaatgatgaggcaattctcagtaaatatatacaataaaattagaaccagtaaaaatacaaaacagaac

SEQ ID NO: 126029 - DNA, 1027 bp, Homo sapiens
ggaaagtacttatgagcagagcgacatatccaagtgtagacttgggccaggagaggaaggaaaagaaacaaagaataagaaacaaatgactgaaactcataaattaaactatcaagatacaccatgtttatattttgataaaactattttgtcttaaattatcaagttaacctttgtcctctactgaattaaataatattaatatttttatatatgcatatatatgtattatttatatgcacaccttatgttacacaaataaggccctactgcatacagtttaatattcttactacttcatttattttatcaagaacattttcctcatgtcattaaatatgaaaatgacattaatactgtataatattctattgaatggatgtgcataatttattaaaccattcctttttgttgataattcactgtttccaactttcctcaactataaatgtcatgttaggccattttccatattttgatttattttcttaggactggtttctaatagtaggattattggtcaaaacatctagcttttccttaagggtactgatacatactgctagactcttctttataaaaattattcacattcccaccagttgtgtattaaagaaatgtgtatgtatgtgtgtgtgtatacacatacacataaatatagtcatgtgccacataagggcattttggtcaactatggactgcatatacaacggtggtcccataagattatatgccttatttttactgtaccttttctctgtttagatatgtttagatacacaaatatttaccattgtgttacaagtgcctgtaatattcagtacagtaacatgctgtacaggtttgtagcctgggagcaataggtcatggtttgtataaatatgctctatgatgttcacatgataaaactgcctaacgactcattgctcagaacgttccctactgttaggtaacacatcactgttaatacataaacagacatatgataaaattaaataaactaatttaaaattattaaaattaatta

SEQ ID NO: 126030 - DNA, 1071 bp, Homo sapiens
caactgtatgacctcactttacctctttaaagatcctatctccaaatacattctgaggtagtgtgggagttaggatttcaatgtatcaattttgaggaaacacagttcagcccataacagatcccagtatcttttgaattataacttcaattcttataaacagcagattcaagaataaagtatgtttaatcaaggcacaaatggtattctcgcctacaggacactgatatttcacacagtagtgctgagttactattttgatttaacagtgtatgactgtacatttgatcaatgtgaatctgcccctgaggggtttttctactctcaggggtctcaacaaatctggattttgagtctgcagggtcccgtgcctgactttctcaaagtcatcatttgtctcttgtttcacttcccattagaagaatccactaccaaaagtactgtactagtctaggttccccaagcctgccataaacaaacaacaccaacactcacctgctgccactctatggggagtactatctctgagaaacagaagtgaggaaaaacatggaagtgaggcagtaggagaagggaacacaaacacaggtgttagtgagcttgtcatagctttgcaacaagtgcagttaattgctcggtctttgaggatattttcatgaaggtcttatgaattattgcactttagaacagcctatctgggggaaaggaagggagaatttatctactagcttcattttgtgctgtacctccttgatcaaagttcactccttaagtagggttgccagatttagaaaaattttaaaaagcccatgcttataataaaaagtaatttattgtttgtctgcaattcaaatttaactgagagtcctgtattttacctgacaatcctcctctcaggatattagcacctaagcatttccaggcagcagctggggaagccagaacctccacagacagatctggtgcacaggcacaaaggtcagttactccttgtcagtggcacagtgtacaggactcctcaacatatagcagtgtggtggtggtggtagtggcagcagcagcagaaactct

SEQ ID NO: 126031 - DNA, 1259 bp, Homo sapiens
tgattgaatgtgttatagagctgtcactttgaccaccatgtgtaatagactggtttagtggattcttatctggtacatagaggattagaggcagatttggaagtgtaaaaaatattagaaatatgttcaaatgaatagtataatataaaaagggagattttgttgatagacattcaggaagtattttcataaaagtgtgtgttttagtttgagctgctataataaagtaccgtaaactgggtggtttataaacaacagaaagttatttttcagtttgggaggctagaattctgatatcagggtgccagtgtggttgggttctgatgagggtgctcttctgggttgcatactgctgatctcttgtattcttacatggaggaaagagagcaagacagctctctggagtcccttttataagggcactaattccattcatgagggctcattacctccctaaggcctcactcctaaaaccatcacattgggggttaggatttaaatatatgaattttggagggacgcaaacatttagtgtataacaatatagtttttaaaatatgattttactttctagggctttgaaggaagtatttaaaaatctgtttatgagaggtttcagtcattatgaccgtcagcttagaaatgacatattagtgatcactacaattatagctcaaaatcctgaagcaccaatgattgtaagtatgaatcaaattgcattaattttaattgtggaagtggtgggcttgggtgaaagaagtcctatattatgttggaatatttgtgtattttcttgtaatgctaagttatgctgtaatatcttgatggtcaccagtgtgcttatcactctgccaattcttctttgcaatcctttggaaatttggaatcttcctcatattgtgtgatttatacatgtatttaccacttatgatgcttttctttccttcctgatgatttgagtttccatctggcatcatttctctttcactggaagaactttgtttacaatttcttgtggtgcaaatctactggctgctggcaacaagttatcttagttttcttttatctgaaaatatatttaattcatcttaattcttaaagtctatgctcattgaatatagaactctaggctgaaaaatgtttttgtttagcatttcaaagataaagttctgctgtcttatggagtctgttgtttctgatgagaaatattcattgtgaggttccatggtgtaatggtgagcaccctggactctgatgag

SEQ ID NO: 126032 - DNA, 1706 bp, Homo sapiens
aaggtttcctggcctgttgcagccatggtgcattgcagttgcgtgttgttcagaaaggtccgtgcgggtcccctcagcctggtccccttagcgctgacagctctggttcttctttgctcccctgtctctccactactgtcttcgtggcggccttttccttgcttggttttcccatagacttctccgcccctcctgtagtggcgctttgtcagtaagcggtgacagtggtgtgtgtacctggcgtggtttggacggttgtttgggggcaggggcagggtttgaagttctttagagacatagtgtgcacgtggtatgaggaactgggatacctgcctgctgtggcccaaatgttgtggtggttttttttcctttaatgtccacagcctgtttttatatatttctccttgagtgcgctgtttaaggtttttctaatggatttttatgaagacacgaaagcgtgtaattgatgtgccttcctgcagaacatttaggtcgatttttgtgtggtgtcggtcttaagaatcgtttccgtaaaaatttacaactgctttgaatttttattttttaaatcttatcctatcagtaatgctttttgaaacgttgcctgcgtcatatttggccattactttatttctaacgaccagagtaaaatactccttttaagtaaggctcctaaacccctgaatctgattaatctagagcaggaaaaaagtgttacatatttaatggaactgtagaaactctcctcgagtatatcagaatggtcaatatttcaactttcttgaaaaaaaaatcccatttgttttttataatagctatcctaaatgactagagatgtggattatgaatttaagaaattactccttaagttattttgattttaatagcctaagaggttaatacgtaagtcctttacctacaagaagttcttgatttagtgaaggaaacaggtaaacactaaatgcagcgtgagatttataaaggtgtaataatagagatataatcaaattgctgggagagccagcaaagtcagagaattgattagaggaatttggaaagacgttagaaaatatgacgtttaggtggatttatgataggaaaaacaaatgacattctaagtagaggaaaagcatgagcagaatggcatgtagaaatggcggtatttcatgtagtacagagcaaagaggaagagaggaagggttgagcaagtgaaaaggatacaggaaggaactaggcatggtaggtgagcctattgttcttgctacttgggaggctgaggtgggaggatcccttaaggccaggagttcaagaccagtctgggcaacatagcaagaccccatctttaaaacagtcggggtggtgtggtgcctgtagtcccagccatttgggaggctgaagtgggagaattgcttgagcccaggagtttgaggctgcagcaatgatagtgctatgatagtgccacggcactcgagcccaggcaccagaaccagaccctgtttcaaaaaaaagaaaataaaagataccagaagggtattttagtagctttggatatacagttgacccttcaagaacatgggggttagagatgcccccgccacagctgaaaatcttcatgtaactttcaactccccccacaaaacaactactaataatctgttggctggaagcctcactgataacataagccgtcagttgacacatataaa

SEQ ID NO: 126033 - DNA, 1121 bp, Homo sapiens
agagataatcaaatgggaaagggggtcagatcggagatgtggaggtgagctaagaaaatgttatagaattggcatgtgaaaagctattaacgacttttttagaagaagttttagtggaagaaagaactagaaaaaggttctaaggtgatacacttttggtatacaaatattctttctcttttttttttaagtatggaaatttcatcgataagctaagactcttcaccaggggaggatccggtggaatgggttatcctcgtttaggtggagaaggtggaaaaggtggtgatgtctgggttgtagcccagaacagaatgactttaaaacaacttaaagacaggtatcctcggaaacggtttgtggctggagtaggagcaaacagcaagtaagtaattactgaatgacttaaattttagaaaatcaaacccttctggaaattttttttttagttacaaaataaaaacttaattgttaatttgaagtaaattatttcctgtatttataaccaagcaaaagcctaaaatgtctcaactcataaaagactgatactaaagaatatttcagagttttaaaactttctgtccgtttcttttcccaatgtctatctgtattctttttgcacttcccctgtagaaaccgataattatctgaattcccactgttttcttctaaaattatctttgacaaccttttagaaaactttcagtcttaaccatgctactctaccccaccaccattagaaggcaagataaccactattaaccttttcttgacttttctaagacttttctgtgtgtttacacaaatgcaattatgtgcctaaaagtttagaatacaaaaatgagagtacagtattttacaatctgctatttttactttttttcacatgtcaaaattattcagaatacctgcataataaataactattttgtcatttgtctatttaggttattgttgatttttttttccgattataaccacagtgcagcattctgtgtagatactattttacatgtttgttcaattattattttgataaattcccagaagtagaattactaaaacatttgtactaattttttcttttatgagcagtttaagagtagccagatttgccttct

SEQ ID NO: 126034 - DNA, 1044 bp, Homo sapiens
ataaataaataaataaataaataaataaataaataaatagatatgagctattaagctatgaaaagatgaaaaaagttgcaaaagtttaaagatagtcattgcattgtttaaagttattttaaaaaaacaaataatacacacttgtttgcataaagaaaaagttgtctatgaattccaccacccagagatgactattaacagtgtctgtctacctgtatacacattttttacaatgttgtttagagtgaaaaattgtagacaacctgaaagtctgtcaataggaaattagttaagtaaattacacttcaccattgaaaagtgttcaccttatatgattcagtttaaagagtaggccaagcaactataaagtagttttcccctacttccttcaaaaaaatatgaaaacttgaacattaagactctataaaaactgccaattttttgcagacaatagagggaaaaagagcatgttaagtgtccatgtaggtgctagtagaaaaatgaagactttggaaaagaaactctgtaggacaactgacccagtttctttaaaaataaaattgcagataggaaacaagatggtagggggagcttgaaaatagatttgagacacaccgggtatttgtaacgtacagaccttacttggatttctattcaaaccaaattttaagaagtatattgccaatgtattaatatttgttgaagctaggtgatagctaaatggaattcattacacctctctacttttgtatatgtttgaaactgtctataaaatttttttttaaagcagtttacaaaacaaggtaatgttttgtcagtgtatagctggagttagaaagttacaggtgtttttcttttttttctttaatttctgttttttctatgacttccaatgggtttttatttttaaatcataattggaataattattatacactttaaatattgaaacatcttcagtgtccagcatgaatttatctttaccttttatgtaagtgtatgttctcaagtttttcaagattatttataatacatttatattct

SEQ ID NO: 126035 - DNA, 1024 bp, Homo sapiens
ggtatgtgccaccatgcttggctaactttttttttttttttgtggggacaggggtttcgccatgttgcccaggctggtcttgaactcctaggctcaagtgatctcccaccttggccttctaaattgctgggttataggtgtgagccaccctccccagccatattttccattaatctttgaaacctctatacccctcagcaaagttgcttaaacaggttagacacttactttattgcatttatttttctgtcacagaatcgtttatttggtttagttaggattttatgaaccacttaccttttatcaggcactgtgataagtaccaggaaggtacttatcattcatttagcagatacttatttttggagccacattaggttctgggattacaaagactgataaacagaaacagctcctgttttgacttgtattgagtttgtagactagtggagtaaggcgtacatatcactaataaatataagggaatatgaaagggtactatgaaagagtatagatgactgctctaggcttccttaaggatgtgtgatttttggactgggatatgaggaataattatgaggtaattagtaaaatagagtggagggtgaagggtctttaatcagaggaaatagtatgtacacaaagccttagtggtggcagggagtagatttgtgtgtctagagaacatgaaataagggaaagaatcgagatgagcctggagatgtaagagagcatgtcacatagaccatttaggctgtatttgatttttatatcttaagagcaattggaagcatttaagcaagggataaaatgcttaggtttgctcctcacagagatctcggcctgtaatgtagaaaatggattggtgtgggacatgaagggtctgagacaaccagttagtaggctcttgtggtagctagatgagatataaaagaagctttggttaaaagtagtgagtatgataagatctctgccatcattaaaaggacacagaatgccattaacttggaaaataaaatcaagc

SEQ ID NO: 126036 - DNA, 1036 bp, Homo sapiens
gataaggcaaagctgtggagacagtaaaaaaaaaaaatgaatgatttccagggttagggaggaaggagagatgaataagcagagtacagagaacttttagggtacactataaagtacaatacatatagtaaagtatgatactatataatattacagcaacattgtgttgctgtaatggtagacacagtatacatttgttaaaatccatagaatgtacagcaccaagaatgcaacaatgtaaagtatagactttgggtgctaacgatgcatcaatatgggttcatacagttttatgacataatttaaagaaacataaaaaagtatttggttataatagtgataataacagtaaaagataaaaccagttataatatagaatgttaactgtaagtaaaattgtattaaatataggataatatgaatatatagaacaatatttagaggaaaagagaacatcatttataccgaatttttaagggaaatcagtagaggaaatttcaggacatgagacttctgttgtgcatgctgctttgtcagcttcctttaagaccctgaattatttatctacactgggcaagggatgtcgagtactgcctctcattctttattgcacttcagaattatctgggtggtctaagaacagcaatgatgagtgatgcttaggccccagagatttgaaactaaatctcttgggggtagggcctgggcatttgtagcttctaagagttccctacgtgattatgatgcacagtgaggtttgaaaagcacaagtggccgggtgtggtggcttacacctgtaatcccagcactttgggaggccaaggcaggcagatcacgaggttaggagatcgagaccatcctggctaacatggtgaaaccctgtctctactaaaaatacaaaaaaaaaaaaaaattagatgggtgtggtggtgggtgcctgtagtcccagctactccagaggctgaggcgggagaatggcgtgaacctgggaggtggagcttgcagtaagccaagattgccccactccactccaggc

SEQ ID NO: 126037 - DNA, 5794 bp, Homo sapiens
ttctagaatttttttataaataagaaagtggtagcatatgttactccactaagtcttttataatatggggatggaagtgacattgtttactatatcatatgtaagtttggccatacttgccaacatgtatttccttaagatttccagcatactaccatattatatagtatcatagtatctctttcattcttcactgatgatgctagagttatatatgagattgtcttcatacaaattgtcttatcctagttttttattttattaataactgtaattttatcagaataattaaagttatcttaacacctcgatttctgttacttattttgaattactaagtaacaagtagagtatagagaaattgtttttagcttgagagagtaaaacattttaaaacatagaaatgtatagctattcttcgtatgttaaaggctgtctctttccttctcttttttttaggttgatatttctggatttcagctttcttctcacactcaatacaggacagcttttgaaaccataatactgcttacaaaagtaggttttctgttttactgtgttctgtatttggtctaatacataggaatgtaagactatatgaaataacataattacagtctatacatactccacctttaaagctttgatgtcagttaaagaattacttaaacttgttgtctccatttcctctacattcatttgctcctcaaactactgcagtggataaaacactcctgggcttccaaatccccattacatacttcccaggtttttatcttgcttcagctttggcacattgtttaattcctcttgtttctcattcttagttttgtgaccggtaatcttctggttctatttctactcttacactatttctccgtctactttttaggctcttttttctcatcctttaagtaacattattcagagttctgtcctaaccttattttctatcttactcactcccgttgctttagttacaattaataatattgatgactgccagatctgtagctgatacctaaatcttttcattgttctttctttttttttgagacagagtcttgctctgtctgccaggctgtagtgcagtggcatgatctcggctctctctgtctcccgggctcaagtgattctcctgcctcagcctcccgagtagctgggattacaagcgtgtgccaccacgcccggctaatttttgtatttttagtagagacagggtttcaccatgttggccaggctggtctcaaacacctgaccacaggtaatccacccaccttggcctcccagagtgttgggattacaggtgtgggccattgcacctggcctttgttgttctttagaccagatgcccatcggacatcttctttgactagatgtcccattagtcacttaaacttaatatggataaaagtaaacttttaaaaaacttttcggccatccccataacttagtgaatgtgtaagctatgatatactgattcttctcaccacctacacaagccctgtcagttttttatcctaaatctctctgaaatccatcctcttgtctttatctacgctgttataatcatcagcccttcttattggaatattgaatctggtcctttccattctccctgtgtcctgccttgcttctctccagtccattttttatatggcagctagagtgatctttgtaaaagcaccaagctgatgctgatgttccctgcctaaaacactttgatagacccccatagctgttaggttaaagtctaacctgagcatgatttatgaaatctgcaagtttaggcccctacctagcagtcctcctctgtaaccctctcccctagatgctatatttcagccatgtgatttctctctaagacaacatggtattgccttacctccaggattttatagatcctatttcatttgccactttttgtctataatgaataatactgctgtgaacatttgtatgcaggtttttgtatagacatgttttcatttctcttggatgtatacttaggagtggaattgctggatcagataataatgctttgtttaacattttgaggaactgccaaactattctgaattggtagcaccattgtgccattttacagtcccaccatcaatgtatgttccaatttttccacatgaatgtcaacacttgttattgtctgtcgtttttactttagtcatcctagtgggagtgcagtggtattttgttatagttcttatttgcatttctcttaagactaatgatgctaagaatctttttatgtgcttattaggcatttctgtgtctttggagaaaagtctgttcagattctgtgtgcattactatttgtattatttgtcttttaattgttgagttataagcatgttttgtatttttggaaataagtcccttctcttttttttttttttttttttttgagatggagtctcactctgtcgcctgggctggagtgcggtggcacagtctcggcttaatgcaacccccacctcccaagttcaagtgattctccagcctcagcctccccagtagctgggattacaggcatgtgccaccacgcccatctaatttttgtatttttagtagaaacagggtttcaccatgttggccaggctggtcttgaactcctgacctcaggtgatccgcccacctggcttcccagagtgctgggattacagacgtgagccaccatgcccagctggaaattaagtcccttctaagatacataatttgaaaatattttctccccttctgtgacttgtcttttcactttttcagtgtattttttctgtattctttgtggcacaaaactattatttatttatttaattttccagttttattaaagtgtaattgacataaaaattgtgtgtacttaaagtgtacaagtgatatttggatatatgtttaccttgtgaaatgattgaatcaagctaattaacatgatccatcatcttacatactattttatgtgtgttgagaatatttaaaatctgttttagcaattttcaaatatataatacattaactatagtcatcatactgtaaaatagatcttcagggcttattcatcctatttaattgaatctttgttccatttgaccaacacccctccatcttcctcccccaagcaccctggcaaccaccattttctctgctactatgaattcaaccttttaagattccacatataagtgggattatgcagtatttttttttctgtgcttggcttatttcacttagcatagtgttctccaggttcatccatgttgttataaacgacaagattttctttttttaaggctgaataatattcagttgtgtgtgtgtataccacattttcgttattcatccattgatggacactgaggttgattccatgtctcggctattgtgaataatgtttcagtaaaaatgggaatgcagagatctctttgacatactgattttatttcctttggatatatacccagaagtgggattgccggatcatatggtagttctatttttaattttttgagaaatctttatactgctttttacaatggctgtactaatttacattcccactcaacggtgttcaagagttcctctttctccatatccttgacaacacttgttatcttttgtctttttgataatagccatccttccaagtgtgaggagctatctcattgtggtttttcttttcatttccctaatgatcagtgatgttgaacattttttcatacatatattggtcatttgtttgttgttgagaaatgtcaattcaggttctttatccatttttaaatcaggtttatattacccaaagtgatctacggattcagcacaatccatatcaaaattctaatggcatttttcacagaaatagaaaacaaatcttaaaatttgtatggaacatcaaaagaccctgaatagccaaagcaatcttatcttgagcaaaaggaacaaagctggaagcttcacactacctaatttcaaaacctactacaaagctatcataatcaaaacagcgtggtactggcataacagtagacacataaaccaatggaacagaatccagagctcagaattaaatccatgcatttacagttaattttcgacaaaggtacctagaacacacagtaaggaaaggacagttttcttcgtcaataagtgatactgagaaaactgaatatccacatgcagagaaatgaaattagatccttacttcacaccatataaaaaatcagttcaaagttgattaaagacttaaagcctgaaaccataaaaccactagaagaaaacagagaagttccatgacatttgtctgagcaatgatttttttttaatgtgaccccaaagcacaggcaacaaaaagaaaaatagacaagtaggattgcatcaaactaaaaagcttctgcacagcaaaaggaacagtcagcagagtgaagaggcaaccaagggaatgggagaaaatatttgtaaatcatatatctgataagtggttgatatccaaaacataaggaagcaaaacaactctcaatagcaagaaaacaactcaaaatttttaattttcatgaaattccatttgtttcattcttttctttccttttttaaaattaaactaaaattttgtatagagatggggtctcgttatgttgtcaaggcttgtcttgaactcctgggcccaagcaatgctcctacctcagcctcctaaagtgctgagattacaggcatgagccaccatgcccagtcttacatatttatttatttttattacaaacagggcttcgctctgtcatgtaggctagagtgcagacatgatcctagctcattgtagcctcaaactcctggtggccttaagcagtcttctgccttttatctattattttacttgtgcttttcatgttatatctaagaaacagttgtttaatccaaggtaacaaagatttattcctaagtgcatttactttttccaagaatactacaggtataacattcagtgatcattactgacttctgaattttatctgtgtgaagtccagatacccatatttgactctagacgcaaaattacaactgtctctaggatatcatttaagctaaaacatactaacacatgacttaaccagagtcattttctgaaattcttccttttgttttctgttgttgggatttattgcatttcggtgatgtgaatgggttttagatcacctgggtcattaattaccaaataagtagtttatacagaaaccagtactaaaattattgggttttctcttttgatttaaaggagttggaattgtacaaagaggaacttcagacaaaacctgcactcttggcagttaataaaatggacttgccagatgcccaagataagttccatgaattgatgagccagctccagaatcctaaaggtaaacctatttattcatttaattctaatttaaagaataattacaatgtacagagaatgctgttataatcagtggaaaactgacagtttctgctcttaaaagtcaagtttgaagaaagaatatacaaaacatgtaaataacattgtaacataataattaccaaattctagaatgtttgatatggacagtaaattaaaggagacaaaagaaagattaatttgaactaaaaaggtcaggctacatgaagaataaaacttaaattgggcccataaggcatatgtgggatttgaataaaaggaggaaaaagtcagcatctacctgtgaagtctttcactttcattaacatacttcacaagctcttcattcgtctagtactgtacatcataaaa

SEQ ID NO: 126038 - DNA, 1008 bp, Homo sapiens
tttttattatttgagacagatcattgctatgtcatccaggctggagtgcagtggcatgatcatgactcactgtgtcctcaaactcctgggctcaagtgatccttccatgtcagcctcccaagaaactgggacaacacgtgtgcaccatcacacctggctaattattattattattattttttgagccagaatctctctctgtcaccaacactggagtgcagtggtgcaatctcagctcacggtaacctccacctcccaggttcaagcggttcttgtgccttaacctcccacatggctgggactataggcatgagccaccatgcccagctaatttttgtatttttaggagagatggggttttgccatgttggccaggctggtcttgaactcgggctcaagtgatcatcccgcctcagcttcccaaagtgttgggattacaggtgtaagccactgtgcccctgctaaactgcctttttaaaaaacttactgtctgccctttttagtataacatttcattggttttaggtgattactaatcatttcttctaatccatgggaattcaagcagggtttttagagaagtactatgttaatttggagtatttttcctatttctttaggctcagattattgctactctgtattcagatcttcatgtgtctcttctaagctgaataaagctgttttggaactgtcaggtacctcaaagcgtaagtacgtcctttaattatatcttatttccctccctcctgctaccacatctgccaacaatgactctttttttttctcttgttcaacaaaatagaggtataggacagacctctcttgtgagtacaatgactgatgacttacagtttctaagaaaacccaaattataggtagaaggaactctcaatgttaccatcaagaattaagttagggctgggcatggtggctcagccctgtaaccctagcgctttgagaggctgaggtggaaggatcccttgagcccaggagtttgagaccatc

SEQ ID NO: 126039 - DNA, 1033 bp, Homo sapiens
tacatttcaggaatcagtgttacagggcagtttgattggagaaatctcaattacattgaaattccaattatttctatactacttttgttttttgttcctgtttgtttgtttgtttgtttgttttgagacagagtctcgtgctctgtcacccagactggagtgcagtggtgtgatctggctcactgcaacctccacctcctgggttcaagcgattctcctgcctcagcctcttgagtagcagggattacaggcacgtgccaccatgcctggctagtttttgtatttttagtagagatggggtttcaccatgttgaccaggctggtctgaaactcctgacctcaagtgatctaccagccttggcctcccaaagtgctgggatttcaggcatgagccaattcgcccagccagtatattacttctgaaagcaagaaggaattgtgattgcattaggactttgagtgggttatctgaagacttctgaagcttgaaagaaacgagggaacctttttcctatgtcttcacaactttaatcaaatccttattctccttcatttctcagtctttaactcctgcctgataaatttttatgaacaggtaccttattcactttgcttaacacctaacaataatcacttgatacgtagtaattatacagttgattcaccaccaacactttgagtttacataagacagccgtttctttccacaagtctctataaacacattgggagcaaggtccagttatcagtggtcttggtgtctttccagggcctaacagagtgttttgcatatgctagacactcagcatgatgtaagtacttgctgaatgaatgattgcttcttagtaatagctacttccttgtacagttcttcattaccagtggcccacctttgtgagttactggggtctttgtacagagcccaatactcgtttattcaaataatcctagaatcacttgtgtgccaggcacacaagttgtatgggggagatagacagatgaataagcaaagaccaccagagagctgtatcct

SEQ ID NO: 126040 - DNA, 1033 bp, Homo sapiens
taggcaacatgagaaaaccccgtctctacaaaaaatacaaaaattagctgaacatagtgacgtgtgcttatggtcccagctactcaggaggctgaggtgggaggatcgcttgagcctggaaggtcaaggctgcagtgagccatgattgtgtcattgcactctagcctgggcaacagagtaagacttgtttcaaaaaaaaaagaaagaaaaagaaaaaattattcctatattatatgactagattaaatatacaaataacattgttttctaaagaacattgtgccctcccactggaattcatgcaacaatcacattctaagccagcttcctagcattttggtcataattgtctttctgatcctgaaagcttggaaacacaacttcaccatcccagcagatgtttgattctgcaaaggttgatggaactgtattcagaaataaaaattattctcaaccttgccccttcatcatgctctgaacaaaaaagtaaaccttactgaagtagtctgctctattgcctcatagtaggcattatagaaggcagagaaaatacatttgagtcctgctttgagagtgaatatcagacccttgaggaaattaaagctgaataagatgcaagctttttatagtttgccatatacagaaaaagaacatggccttttaatttggaatgaaaggcctggcgactgtttttcttataatagcattaatagaaataggttgtcgttacttgaaaaatgtttgcattcgtcttatatgaacagtagtagtaataaccaacaagtgctgtagatttccctgaaaatctacatcttgaatcaacaaggaagtaattgggtcatgttgaatcaacaaggaagtaattaagcagaataatttcagggaccattgttctcatcttttcatttgactgactcattggagatgagctcatttactttttataatttcctagtgtgcctagtacataggaatgagatcagtttgttttttcttatttaacattcattcaatgaatgttctttgaactcct

SEQ ID NO: 126041 - DNA, 1976 bp, Homo sapiens
taagaagtagttaacacttggcatagcatttgttgtgttctagacatgttttaagcacttgacattatattatctcattgaacccatagaacaaccctgcaaggttggcactgttattttttccatttcacagatgaagaaaacgaggcacagggaagttctgaatctggcccaaggtcagtgagctagtaagtgaggagatggggattagaattcaagcaaccttgctaagagttgactctcaaccattcccctgtcctgtactgcttctttccctacacctttgctttttatgagccaccttcacccctgctgcatgagcatttgaggctgaatttgtggtgtttgtagctaactgatgattgatgagtgggcccttgctgtgtgagtgcctgacacatacagagtgcttgatgtatatgtgttgaaagaacgattattgacaaaaagaagattgaaggtgtgattgtaagagactttaacattatcttggttgtttttttaattgtgaagaaaaataccgatggctaaagattttagttgctctatgacccagtcagtaataaccaaatgtgtgtgcacctgtgctctgaggtcacacacacctgcatgtatatacatttgtactgtacagagaggaaacaagggagagactttccctctttgcattgacatttcatcattagatgtgttgccagttggcaccacccttcctgctctgttctgctattgtcccctcatgatttgtcctcttgtgtgtcaccccctagtctgactgacagtactccacaagcttgcctgccatgggctgtcgggatgtccacgcagccacagtcctttccttcctgtgtggaatcgcctcagtagcaggcctctttgcagggactctgcttcccaactggagaaaattacgattgatcacattcaacagaaacgagaagaacctgactgtttacacaggcctgtgggtgaaatgtgcccggtatgacgggagcagtgactgcctgatgtacgacactacttggtactcatcagttgaccagctggacctgcgtgtcctccagtttgccctacccctcagcatgctgatcgccatgggtgccctgctgctctgcctgattggaatgtgcaacactgccttcaggtcctcggtgcccaacatcaaactggccaagtgtctggtcaatagtgcaggttgccacctggtggctgggctgctatttttcctggcaggtactgtgagcctctccccatctatctgggtcatcttttataacatccatctgaacaagaagtttgagccagtcttttcatttgactatgcagtgtatgtcactattgctagtgctgggggcctgtttatgacttcccttatactatttatttggtattgtacatgcaaatctttgccttctcctttctggcaaccattgtactcccatccacccagtatgcatacttactcacagccctattcagcacgctctcgcctctctgccattgaaattgacattccagtagtttcacacaccacttaatggggaaatagttaattgttaaagaaaacttcttgtagcctcacattccccttgtgcaaagagctcttttggacctacatacattttcctttgtttttgaccaatcaatgaagccaaatttatatgtcctagtagaatgaagtgctgctagtttttatgagaagtatattatattaaatgtgaattttttaaattttgcttcttatactggaaggaattttagccttcatattgatatctaattaattatttaagtggaagaggcctgcatcacaattgaggtaatgtagagcaacatgttaaagaatgatggttagcagaagctgttgtatacaatcttcatgaaaatttcagtgtgtatttttctttttctataatacctttaactgcaaagaaaaggcagtttcaaatataagaaatttatttcaggtaagggta

SEQ ID NO: 126042 - DNA, 1595 bp, Homo sapiens
acctggcagttggggaataatctgacttcgttggcagttggccttaacttcttaatcattgatccaggaatatttcaaccagagacacaactttctggcagacagacaaattgtacaacaccaacaatatcctggaccttgaaattctgtttacttcagtccattgtatcctttaaggcacctgtgctagcctagattttgtaataacactgatttatgagaatggacaaaagtggtagggaaattgttccctctccacttctgaaagtatgatgatgtattaaggatggaggagttattaaaaatgtctcttctgatgaggtaacaattagatgaaaccatgttaaagctgagatgaacacttagaaattcagggatattgggtctttagccttatgaatttgagctgcttatttaattggtgtaatttactacatattagtactatattcgtaaggattttttattaaccattacagattttacaaacagctagttatatggtaaacagattattatgcctttttgcaattctgaatatgattctagtatttgtgtagatgtatttggtactttttcccctaattccaacactagtttatatatatagcgaataaatctagttgtataaatttttaaatgccgtcagtagaaagcacacaaggttatgatttttttaattactggcttctgatttctttcacttctgatccttttcctttttctcagatgtagctgagtcttgatcattttaagacaacgatgggtagaattttgagattaatgttaattttccctttttgttaatttcagtcccctctcactatgcttttgtccagaaggatcaagaattctaccatcccttgggtctttgtgtataaacaatgttaaataaaggtagactcagtctttaagatattagacagtttttttagtccatgggattgtaaatataaacattaactttcctataagaatattttggctttgtaatctatagcctcaaattggtatttattatggattcactagacaaacagctgtttccttattgtcttttttctttagtgtttctgatttgctatcagtagctgtttttaaagccgtccaaggaaaataattatttacagtttttgaagtcacttttgagccctcatcaagctctcattgtgatgggagggatacctttttgttgttaaaagcctattattgttaaaggccttttatggaaaccaacttggaaaacaaccttaaatgtggatgtatcagatttggtttatccagccatgggagagaaaacaaacctaagtttactttacttgtacatatacactacaatggatagtatatttgctgtaaactacaatgtaaaacctcaataaaagtgcgctgtacttcttaatgtttattaaaagatgtatttttacaagtttctgcttctgtttttttcctcagtgttttaaggtgaaatattttgagaaatgtttctcagatatatgtaaattgaaaaagacagttccatttaaagctctaaaacgtgtgaactggaaggctgggtgcagtggctcacgcctgtaatcccagcactttggggg

SEQ ID NO: 126043 - DNA, 1139 bp, Homo sapiens
ttgtttttgtagagacagggattccccctgttgcccaggctggtctcaaactcctgagctctggcgacccatccgcctcagccttccaaagtgctgggattacaggtgtgagccactgcacctggtggggtagtgtcaactgtagttcttattggatgctttgcttaagaaaacacatggctaaatttccagaacttttataatgtccaaaataaagacagtatatttaaaagtttgtgccgtgaattgtaagtttgctgctgtagctttgcatcttgcatggcagccacatagtgcgcgtgttccattaatctttgttaaatgagctaggtatgaggctgtatggcaatttgcttatgttagactttgtatttgaaatcaatgggctattaatttcttattcctaaaagtttagtttttcagatgaagcaacttgtctctatttagaattacattactaatgttttgtaaaggactcattagtcaaagtatgttaattaaaggacacgccttgggttgagggagtagacagtatggtaatattgttgactggtatttatacagagccttgtagcctagaagttaaattctagtgaaaatgcagtcattaggaattagctaggatcttaatatggttctatcaaaacagattattttagatttaatgtaggttattttagttttaatgtaggttaagttaaatacataattaaaacatgtgcaagtaattgaatgcaagataagccattcacaacaaaggactatctttttattttccattcactttcagaagaaatggttatccaataaagaaagattagtttattaggcaaaagggaaaaataagaaacttttagaaacgttttatttccctcagcctacctgcatcccccttaactcaccgcaatcacattcttcttgaaaacacaaatatatgaaacagagaaaataaccttttcacgattgttagagtatgtatcctaagcttttctatgatagcttcagtttaggcacattacttttctcagagcttaattgccagaataatttgcttttcattgcttttgtcagaacaaagctttccaatagctacccaagtgcttctatccagactaaatcatgtataaagcagcaaacac

SEQ ID NO: 126044 - DNA, 1101 bp, Homo sapiens
tattgaaattgtgacttgctcagagtcccttagctagaaggtggtggtttaatctagtattctaacctagtctctctgcatccaaactacgctgcctcccaggagaagggagaaagggagaaataacatctaggtactactactacaggtgcagcatatagttgggaaaacaaagttcttacaaagaaacaactgattttggtagtaattctagcagatgaattactgctagaattaggcctaaaaaaggcctaaaagtgaaccttaaagattcctgccatagatctatgtcatttttgaactgagttacacacattttacagagaggaaactgagacccagggagattaaatcattatgttactaaataatgttgctgaagagaacatggttgattagtcgttgtgaaatcaagggagtttctttgctgaattactctttaggttttagatttcagtttcaaggttacgttaaaactaagcttgtattgccatttttatctggatttaggtggggagtgggtggattgtttggtgagatgtaaacttgatccttcgggtagtaatttgtttagtaaaaatttcctgctagacatgagggctctgtagtcaatgaagattatggaaggttaactattggttgaggtaccatggaccaccttgtgatatacagactggtttgagctggaaggcatgatgagaaaactgctgtgttttaactagcatgttctgaaaaaagtgtcagaacatctttcaatgggtgtaaattgccttcactgagcaaggcaaatggttagtattgaacagaaaatgtcagataataaattcattcattttcttcgaatcctgaatatatacacttggattattagcttgtgcgtgtgaagccactctggcttcatttttatttcatattatgacagctaaaatctttgtgaagattaaaaatatggaggaaacagacaggtttttaatatttacatcttagaaagatgaagactttaggtgggtatagggagaaacattcaatactttggattcttttttattggtagagtgagtgctaagaaaagggatagaccaattttttttctctctttct

SEQ ID NO: 126045 - DNA, 1074 bp, Homo sapiens
agatttttactcttattttgtattgctttaaaaatctgcttgtgtactttattatacatctcaatttagactagccacatttcaggtgctcattagccacatgtggctagtggctactattggtcagcacagattttttttttttgacagggtctccttttttgtccaggttggggtgcagtggtgcaatcatggctcactgtagtgtcaccctcccaagctcaagtgattttcccacctcagcctcccaagtagctgtgattacaggcgcatgccaccacacctggctaagttttaaaaattttttgtagagacagaggtctgactgtgttgcccaggctggactcaaactcctgggctcaagcaatcctcgtgttttggcctcccaaactgctgggattacaggcatgagccactgtgcccagctagcacagatctttactgtaacttttcttcttactataaaaagcattgcgttatactggcaattattttcccatcaaagtggcctagaaaagagacatgaatctggcctcatgtctttgctcataattaacacatttctagagagatttcctttgttagaaaaactaattgtgggattaatgatctcagaacgtgaattcaactgtagcacctaaacaggtgctactgaagtcacctaaacagcaggctgaattcttgaccaatagtgataaaaactgctttgtcttatggtaggagtagcagtcaggacaagactcagcatttagcgaaatccctggagggattctcccacataggagccgtgcaactcagttttatgctcctaaaatctactgcaaagctgtgaatgctttttgtttgtgatttgcacttcatttttttcttctcaattattattattttttgagacagggtcttgctctactagtccagagtacaagtggtgcaatcatggctcactacggccttgacctcccagggtcaagtgatcctcccacttcggcctcccaagtagttgggaccacaggtgtgtgccactatgcatggcaatttttatttttatttttgtagagacggggttctgctgtg

SEQ ID NO: 126046 - DNA, 1027 bp, Homo sapiens
agagaccacaccttttatttataaaaagaaaataaacatttaaacctaacatgaaagatgttgaaaactttataaaatgttggtatttttgaaatttttggaaataatacttttagtaatttattctggacttattttgcaggtatgatgaggaaaatgttagtatactattataacagcattaatattcacccagtgaaatctactctgtgccaagaaggtcctagatactgagcacatatcagttgataaaacaggaaaagtccccttcatttctggaacttatggtgtagtatatattttaaggaaattttagtttgaagtgatgtaatacataaaatctcagtgtcatgaactgttgagatgatcataacttattaaaaacaaacacttggaggttcaattcatggagaattcagaatatgaattccatgaacctaggtcttgtttttttatgcagttaccatagaaaatattttcaaagacctttttcactatgaaaataatacaaattagtcagtgaaattacttagggggaatccatctttagttgcacttaaaaaatgagtgttgattcaattaaaggctggtgtcctttcagtgtgttacaaggcaaacatagtttcatgcctgagaatgtacttcaagtacacaacctacagaagcatgcggttcctatattccagaactcagttcacaatacgtgatatataaaagttaacgctctcaagagaaatggaaagctctgcgggaaaaaggttgtgtgtgtgttttatgggtgaggggaaaatatctgtaaatgaggggaaaattccaagcagttcctggaatcagttactgcctcctcagggagccagtgatgagctcaactgggctgagaaaaattcatgcagttatcagcactaactgcatcccagcctcaagccctgccaaagtgcttagtcctaaaagatgaagtgaagagtacaaggtgcagtctccagctgaaccccatgtgcatagtaattttttttgcctgcatctgggt

SEQ ID NO: 126047 - DNA, 1088 bp, Homo sapiens
ctgggcgtggtggtggcatgtgcctatagtcccagctacttgggaggctgaggtgggaggatggcttgagcctgggaggctgaggttgcagtgagctgagattgcaccactgcactccagcctgagtgacagagccagaccctgtctcaaaaagtaaataaataaaataaaaagtgttcaagtaactcaaaggatatatgcagcattgcagtagttcctcttccttcctccctctcttagtttgaaatatgttaacaggctaaattgatagcatggtaaagagagcaaattttaaactgtacacattgtcttgtgggtaatctgccagtatcttgagctacttctggacttagcttttgaataccctcaacataggggtcaattttggcctatcaggggcatggtggaaagttatgaatgatttggagataaaagatctccagataaagtatgatgtataaatgacagtcagaagatgttactgttaaacttgccactccataggtaagagtcttcattcttcatgttatttctccctgttgaataaaaagcacaactctcggttgcatttgtactcccactctgaatttcaattggtcagacaaagagtggggctaggtttttgacaagctacctcctggtattgagaatggttttaattcatgagggttacagcatatgcttttttaaagtatttaacctgcattatcataatgagggccctggctttataaatcccttcaccaattcagtggaacaaaacaaaaagtggactttatttgtgctgctacctcatacacacatgcacacaagcaagcctgaatttcaattgcaaggctgtgttcctcttcttggctcttttgagatcccctgacctgagcccagccagtcaaagctgctagaacgtgtttcagctcagctcctctttgggaaatcaaatcaagctcacaggacagaagggttgctcagaaagtctcaaaggttgctaattgaaaagagatttttttaaaaggtgctcagaactacagtcatcagtatataaaagcctttacaaaaatgtaaaaatgtattttcttcacatatatttt

SEQ ID NO: 126048 - DNA, 1973 bp, Homo sapiens
attatttttagagataattgttagcagtcatacttggacaaaaattgtattacaggtaactgtttttcctctcttcctttctcttctcctcacataaacaaaggaaaccaggttagtgatttattatcaatgaagggccataccgcagagatgcagtgatagaagctcaacacaagtttgttaaatgaatatatatataaaaactagcttcatatttctaaaatatagttgactttcctataagctccctctatttaagatcaaggtttaaatgcttgtatatagccaggtaaatttttactttcgaatctataaatggtgggaaaggggaatcagggtatctttagaagtccaaagcctacacttgtgcaatctgaggggctgagcaagctctatgcatctacggaagtagtggaggtgaagtgtgtgcccctccaaaagcattgaagatctgattagatgtcttacttgtctgttacctcacaatttttattgcctgcccccagaaatgtctttcctgaatatatgtgaagcagtcctacaaaacatggtttactttggacatacacatttcataatagaggatttatttaaattgcttgcagttgtagttgatgtggcaaaatacaattctagtttctttgtgtgtttctttatctttcagaattctatgtatggggtaaaaacctgtttaaggtgaatttttgttgtaaaagattatcttcttttagaatttagccctttttccagtaagatataaatctatgagacttgtaaggcaaggtgtgtttgctgcaacattagctatacaatataaaaatgctgacattgggagcctggggcgagaggattgcttgacaccaggagttcaagaccaacctgggcaacatagtgagactctacaaaaaattaaataaaaaaaaaaaatagcagggcatggtggtgtgcgcctgtatgtagtcctagctactcaggagtctgaggtgggaggatcacttgagcccaggagttcgaggctgcagtgagctatcatcatgctactgcactccagcctgggcaacagaatgagatcctgtttcagaaaacaaacaaacaaaaaaaaacccctggaaataacttttaaagacaacacgaagggaatcattttctaagttatataaatatgatggaatattttaaagccattaagattatgaagactgataggaatatgaaaaatagtgtgaaaagggcattatcaaaaatagtatgtacattatttcatttgtataaacgtgtgctttcagattagaactgaaaaactctggattataattttattcagcaaacgtatattgaatccctattttatacctagaggtggtgacagtgtctgctctcaagttgctcactgtttagtgggagagacagactctgggtgataagtacaaagagggatgagctgcagtaggatttgggggatattcttccacgttttgttaaagtgttttaaatactactatgtcattttatagaattactaagaaagctttactattgatattaatgcaccataatataatgcctttcaaatagttattcatacatatttgcttaatgaatgaacagaatgattaatgagtcattaataagtgttactttcctagcacggttgtaatttaataacattaatctagaattctcttaatgtgaaatccatattgctggcatcagaaacaactttaaatgatcattttccaaagtttatctgagacttcattctgcaaatgtctcatttgttcactggacttaagtattgtatttgataatctagttttgcaaaccacaacttacaaatctttttgggggtaatttattgataaacagttccattggaaaattccctttctgtatctaaaccttataaatgatcactttttaaacagtttgtcatgtatgcagtataatatatagtatactgtataaaatgtttt

SEQ ID NO: 126049 - DNA, 1047 bp, Homo sapiens
tagaggctcccaaattttgctgcatataggaaacacctgggaagctttacaaattttttgatgcctacattacatcccataccaaaatcagaaaatctgcagtgtcaggcctcactattttttgtaaagatccccagtgagcaatagactttaggacccactaacatagccactttacttgattctacaatactgtgccagctactttacttggtgtggaactaaaggaatagggatgattcaatgccagaaggaaaattgactatgttggatacaaagagaagtgttttatagtctgtaacatgtttaataggttgattatataaactgtactttatagatgattttaggagtatctgtagattgatatgattattgtatgacacactcattttagaatcctttatataagatgaatctcctcgtgttatctttctggacagcttcttacctccttgttccctaattctaagagaagaatctaagtgactgacctttctttccttatcaaacttagggtgggaggagaggcaggggtgtcatggatgggagaagctatgagcactgaccagttccctcagaaggaagttctacttactttaaaaatacttaaatatttcttctaaaaaagaatatatgtaaaatgtatgtataaaataaagactgatgataaaaagaacacctctatacctatcaccctgctgaagaagcatacacatacgaatatatttgaaacctttcctcatctaatcccaacccctcaccacttgaggtacctatagttctaaatttgtttatttccttgcttttctataccacatatatgtacacatacaacatactagttttcctgtgcttgaacttaatggtatcatatgaagtcatcagtgatttgccttttgttcagtatcatgtagagcatgttcacgtctgcatagtattccattataggaatttacgtcagtatccattgtgaggtcagtaagtatttgggttgtttccagtttttgctattgtaaatactgccactaagtgacatgatcttgg

SEQ ID NO: 126050 - DNA, 1024 bp, Homo sapiens
ggctgaagtgggaggatctgtggagcccagaaagttgaggtgagctgtgatggcgctactgcactccagcctggatgacagagtaagaccctgtctcaaaaaataaaataaaatcttggtgagattatattctcactaagcagtgaatgacagtgcctgatttcccttattctgcctaattctgggcttattttcttttatttagacatgacattttcagttcttacccctcaatatttcagtaggtttattcagaaatgtttctttgcattccagtagttacattaaagactgtaataattgttctttattttttcatttttatttagtgatagtttgatctttaaaagagagactcccaaagctgcttttttcttggtggcaataaagaaaaattatctttgacaataacggttattttcttttttcttagcttgcccagtttcgacaaagaaaagctcagtcggatgggcagagtccttccaagaagcagaaaaaaaagagaaaaacgtcaagcagtaaacatgatgtgtcagcacaccatgatttgaatattgatcaatcacagtgtaatgaaatgtacataaatagttctcagagagtagaatcaactgtgattcctgaatctacaataatgagaactctacatagtggagaaataaccagtcatgagcagggcttctctgtggaagtaagtattctcccagatttttaatcattatggttctcgatggaaagtagtcataacaacagtcattagcaactgtgcgcaatttgatcatgatttttatgtcctcttgaaagttttagtagtatggtaactaaacagtcataactaaaatatttgatcatctcagagagggagttttgtgagtttaatttaatatatgttgaacaactgcagtacaccaaagactgagcaccagagttacaaagatggatatgactatctctgccctttaggaaaattattctagtggagaaggcagacttaaaggtatgcagtgtgctatgattagacctt

SEQ ID NO: 126051 - DNA, 1024 bp, Homo sapiens
cagccgcctgtagtcccagctacttgggaggctgagacaagagaattgcttgaacccgggaggcggaggttgcagtgagctgagattgcgccactgcactccaacctgggtgacagagcaagactctgtcaaaaaaaaaaaaaaaaaaaaaaaactcaattgtaacagaatttgcggataacctgtttatgttcttgaggtaaatatgttaacgaagtaggttgccataccataatcttccaggtggtgagtgatgttttaaagtggaccttgctatggatttcagtatttgaatctctctccctaaggaatattgctaatactgaattctttaaaatcttggattgatttaggaagaagaatttggtgttgatgattcttattctgaacaaggagcacaagacagtccgactcatctagagatgatggaaagtgagttggctgggaagcagcatgagattgaagagctaaacagagagctggaagaaatgagggttacctatgggactgaaggactgcagcaggtatgtttattttctgtggcttttgatttgctactcacaaaaacaaaaacaggaaatgtgaataatagtagtctttaaagatggggtttttaaaatttttttttaacttttttcttttcttttcttcttcttcttcttctttttttttttccatacagggtcttgctctgttgcccaggctggagtgtagtggtgcaatctcggcccactgcatcctctgcttcctgggctcaagcgatcctcccacctcagccttgtgagtaactgggactacaggcatgcactaccacacccagctaattttttgtagagacagggtgtcacctcagattcctggactctccttggcctcccaaagtgctaggattacaggcgtgagctactgtgcctggcctaaagaagggggttttaaaatggtaacttagtgggacacagtggcatgcacctgtagttctagttattcaggaggctgaggtgggaggatcacttgagcccacgag

SEQ ID NO: 126052 - DNA, 2042 bp, Homo sapiens
ctgtctcaaaaaaagaacagaaaaacgatgtcagtgggtccttgtaagtaacctcttgtggttagactaacatctgtggttagactgccataactgtctatggcagtcagttatgaaaacaagatgaagtaggacattgatgaggatgacaaaaatacatatcagtttcatcctcttcagaaacaagttggaattaaacatgtctagggtggtgttgcctgggaacagattaggggcacccctaaatataaaggcacttgtccttctataagtaaatatatggataagccagatcaattttttccttagttcagataaattttttgaagttgatttggaagcaccaatttctgtaagttaatagttttcaaatgtggaaaatactgattacaaagtgtaagaattatgccaatgtgttttgaattcttattttgaaaaagttacctgtaataatagtcaattaaaaaaaataaatctagcacttactattttctttcagttacaagaatttgaagctgccattaaacaaagagatggcattataacccagctcactgctaatttacaacaagcaagaagagaaaaggatgagacaatgagagaatttttagagttgacagaacagagtcaaaaattacagattcaatttcagcaagtaagtattactaatgcaacaaaattcattatttttttagtaatgaattttaaaaattcactttcaagaacaaatctaaatttgttaaaaaagccatttcgtattatatcatgtatgaaaaattagtgaatatgtgttgctatattaaccaggaatttaattcatacttcttaaatggttctctactaatattttcttttcatttcctccctgtctctattttgaaatcttacaaattgtgtaaggttgattgagggtatttctgcagaaattaacctgtagtcacatcctacctttgccaattctggtatggtttattttagttaggttctaaatgataacaaaactaaatatattccattttcctttaattagagccacaggaatctaactgcattaatcagaatttctgatggcaagtagcaaaacaatttgaaatagtttaagcaaaagggaggtacttagtgtaaggattcaggctgtttccagaacccaagggcagaaatacaaccaggcctctgaaagggattggaactacaaactggaaagccatagggaattcgggaagtactgtctttgatgccccacttttcttcgtatatctgcctcagtctcaggagacctaggttctctgctgtatcatggaaaagataagtttattggctcggcttgggtatacctatctagtcagccaaggtagcatgtttgctagggtctcaagcctgcagagttcccagagagctattgcagggacaccccaaaggtgtctgttccctaatacagtcacttcagaatttaacgttttgaggtttctttctattttcagttacaggctagtgaaactctgagaaacagcactcatagtagcacagctgcagacttactacaagccaaacaacagatcctcactcatcaacagcagcttgaagaacaagaccacttattagaagattatcagaaaaagaaagaagacttcacaatgcaaattagtttcttgcaagagaaaattaaagtatatgaaatggtatgtttattttaaggaagtcagctaacttgtagaagctttagagtttcaagttttttatgcaagtggtttttttttgttaggcacatgaatcacaaaatttcataattaagctctttgtgtaatttatttcaaaagcaaatgggaatctcagtaatgtagtttttaagataatagtcattactgagttccctaaaagtgatcagcctatgttaaactgaattagcaggaaaatacaaatttatagctatagttttttttgtcatttataattatttccacttattttagccatggttgtgaaattcagaaaatattttcacaacagagagaaattttatggattttaatgagaaaaaaatt

SEQ ID NO: 126053 - DNA, 2825 bp, Homo sapiens
tagaatgttgatcagttaataagaaaaatgaaaatgtaacagtttggagacatctaaaatcagactgggtttttaaactaaaaattttaatcacagaaatgttaagagaaatttcttctaagaaggccaaaactactgtagtgtttgctcacaagtagtgttggttacacgagttctaagtgtcattattgtggaaaaaattgaggggcaggaccaacatttactttttgtagaattttttaaaagagaaacttctgtcagtcttttggtaatgagatgaagcagtataatttgccagaagctaaaaatgccattcttacattttcattttttttcctaaaggaacaagataaaaaagtagaaaactcaaataaagaagaaatacaggaaaaggagacaatcattgaagaattaaacacaaaaataatagaagaagaaaagaaaactcttgagctaaaggataaattaacaactgctgataaattactaggagaattacaagaacagattgtgcaaaagaaccaagaaataaaaaacatgaaattagagctgactaattctaagcaaaaagaaagacagtcttctgaagaaataaaacagttaatggggacagtcgaagaacttcagaagagaaatcataaagacagccagttcgaaactgatatagtacaacgaatggaacaagaaacacaaagaaagttagaacaactccgggcagagctggatgagatgtatgggcagcagatagtgcaaatgaaacaagaattaataagacaacacatggcacagatggaggaaatgaaaacacggcataagggagaaatggagaatgctttaaggtcatattcaaatattacagttaatgaagatcagataaagttaatgaatgtggcaataaatgaactgaatataaaattgcaagatactaactctcaaaaggaaaaactcaaggaagaactaggactaattttagaagaaaagtgtgctctacagagacagcttgaagaccttgttgaagaattgagcttttcaagggaacagattcagagagctagacagacaatagctgaacaagaaagtaaacttaatgaagcacataagtcccttagtacagtggaagatttgaaagctgagattgtttctgcatctgaatccagaaaggaactagaattaaaacatgaagcagaagttacaaattacaagataaaacttgaaatgttagaaaaagaaaagaatgctgtgttagacagaatggctgaatcacaagaagctgaattagagaggctgagaacacagcttctatttagtcacgaagaagagctttccaaactgaaggaagatttagaaattgaacatcgaataaatattgaaaaacttaaagataatttaggcattcactataaacagcagatagatggtttacagaatgaaatgagtcaaaagatagaaaccatgcagtttgaaaaggacaatttgataactaagcagaatcaattaattttggaaatttcaaagctaaaagatttacagcagtctcttgtaaattcaaagtcagaagaaatgactcttcaaatcaatgaacttcaaaaagaaattgaaatactcagacaagaagaaaaagaaaagggtacacttgaacaagaagttcaagaattacaacttaaaacagaattgttagaaaaacagatgaaggaaaaagagaatgatcttcaagaaaaatttgcacaacttgaagcagagaatagcattcttaaagatgaaaagaaaacccttgaagacatgttgaaaatacatactcctgttagccaagaagaaagattgattttcttagactccattaagtccaaatccaaagactctgtgtgggaaaaagaaatagaaatacttatagaggaaaatgaggacctcaaacaacaatgtattcagctaaatgaagagattgaaaagcaaaggaacactttttcatttgctgaaaaaaactttgaagttaactatcaagagttacaagaggagtatgcttgccttctcaaagtaaaagatgatttagaagacagtaaaaataaacaggaattagagtataaaagtaaacttaaagcacttaatgaagagcttcatttgcaaagaataaatccaactacagtgaaaatgaaaagttctgtctttgatgaagacaaaacttttgtagcagaaacattggaaatgggtgaggttgttgaaaaggatacaacagaactcatggaaaaacttgaggtaaccaagcgagagaaattagagctgtcacagagactgtctgatctttctgaacaattgaaacagaaacatggtgagattagttttctaaatgaagaagttaaatctttaaagcaagagaaagaacaagtttcattgagatgtagagagctagaaatcattattaaccacaacagggcagaaaatgtacagtcatgtgatactcaagtaagctctttattagatggagttgtgaccatgacaagcaggggtgctgaaggatcagtttctaaagtaaataaaagttttggtgaagaatcaaaaataatggtggaagataaagtttcttttgaaaatatgactgttggagaagaaagtaagcaagaacagttgattttggatcacttaccatctgtaacaaaggaatcatcacttagagcaactcaaccaagtgaaaatgataaacttcagaaagaactcaatgtacttaaatcagaacaggtatgtttacttcttcatatatggtaaagcacaatgaaaaaaatgtacatttcacactaaggtttcaccttcatagaacataagttcatatcctt

SEQ ID NO: 126054 - DNA, 1133 bp, Homo sapiens
gacaaacctttattgatgggaagggaagttcacagaagaaatcgagcagtgacttacacaatagtaacacctaagagcagcctaaatatgcttgaaataatgtggatgccacacagatatctctaatacacttaggtagtttgggcagaaggagaaaaataaaaacatcatagaagtcttttcagtgttgggatgcaaggaagaaggaagagtggcaggaattttttagatactgattaattattgatgctgggagaggtcatagattgaagtgtatgtgtttaaaattgaagatgattattagaatcaaaagagataccggagcttagaaactacaggaggaaccactagaatatcagctccttgagaacagggacccagtctcctgtatctctaatgcctagaataatgtctgacacatgataggcagttaataatttttttaaatgaatgaatgaattcatgaataaaagggggggaataaataaagcccacttaccaagaaccaacagtgaaatagcacaggccttcatgttagagtcaggaagaagatcagaatagcttttgtcacttgcttttctattgtgtaggtcctaaccattgcaaagacaaaaagatatatggtatgaatggagaaaaagatacttaattgtcataattcccatgtataattaaattaaaaattaagcatgagaactgaaattctttttttttttttttttttttttttttttgagacagagtctcactctgtcacccaggctagagtggatctcagctcactacaaactcagcctatcaagtaggtgggattacaggtggcctccgccatgcctggcaaatttttgtatttttagtagagatggggtttcaccatgttggccaggctggtcttgaactcctgacctcaagtgatttatatctttaatgtaaaataaatatgaataaaacaatgtaaataaaattataacactttaatgaaggataggaggcttgaataaatgaaaagtctcatttctgagtgggaaaatttgaatatcgtaaaaacccaggttatctctagattaatctgtaatccttatgtagttccattccaactcacaatgaaaagttactgaagttcaacttagtaa

SEQ ID NO: 126055 - DNA, 1023 bp, Homo sapiens
gcctgggtgacagagtgagtatttgttaatttgggttgtgagtacataaatgtttattacttcattatttccatgtctgtacgtttaaaatcttttagaacaaaaaatcaaagatgagtcatgctagctataccaaatatcacaatttagtataaaactgaggtaatgaaaacattgtgctactttccttgaaaaagaaaggtagatcaatgcaacagcacgaagatagaaaaaaaattagacttcagttctcatgaatttttaaactcttgtagtcagtatatgcaaaaaaaagaagttaaattatttgatttgtcatttaagaatattataatgtttacatatgtttactttaagaatgatttaaggctacagatggaagcccaacgcatttgcctctctctggtttattcaactcatgtggatcaggttcgtgaatatatggaaaatgaaaaagataaagctctttgcagtcttaaagaagagcttatttttgctcaagaggaaaagatcaaggaacttcagaaaatacaccagttagaactacagactatgaaaacacaagaaacaggtaaaatggtttctgacttataagtaccatgatccaaataagtattggatagagcccaccattctataattttttccttgtcatagaacccacagaggaaggtgatttgtttaccagttgttgatataatcactagacattcatttaagtgcttgagaaagctaaaatcattttcccataggaagtcacaatccattgcgaaagcatatataaaataaacaatttctccaacagaagaatgaatagaaagaatgggaggagaaaggagaaacatctagtacttcctggcaggatgagtagggtgaggtggtagacagtggtggggttggaattttttttttttttttttttttttttttttttttttgagacggagtctcgctctgtcgcccaggctggagtgcagtggcgggatctcggctcactgcaagctccacctcccgggttcacgc

SEQ ID NO: 126056 - DNA, 1098 bp, Homo sapiens
tctggaggctgatgcaagagaattgcttgaacccagaaggtggaggttgcagtgagccaagattgcaccactgcactccagcctgggcaacagagtgagactccatctcaaaaaaaaaaatagaaaagaaatgtagataaatacgtttacttaacaggtagatgaatacagcaaacaggtagatgtcttttctgcacaaggggtaataagaggatatatatttgaatgcagtaaattagctgcaattacagaggcatttcagagttactttgggatcaggatcaggactgcaatacatcactgtgtaaccttttggcttcatcttctaatattcctcctcatttcagccatactgaaatacttagtttcccaaatgcaccctgatctttggcaccctgggcttctttgcatgctgccctttctgcataatactgcccatcccctcccagcctttttggtttgttcctgcttgttccagttggttcaaatgtttactccctctgtgtcatcttctttacctgtctttctaggcttaggcatttcttcctctgttcccttagcaacagtacaggccttgcttatcgcgtttctcttttttcgttactttaaatacttgattacccttctgtccttcttccatgttcctgtagctccttatacacatttgcatttgtatcacattacttttcatgttatataattgtttaccattctgcctctttcactattattctaaacccttcagaataagagaatcttctgtttatttttatttccttctcttaacacagtgttagcatacagtaaaggcttaataaatgtttgctgaatgagttagaaaggttggactggaaacttaataatttacctgatgatctttattttccctgggaactaagaggcaagatcctctgttgaaattactcatggggtaggaattgggtagaggatgtataagagtagtgaacagttaaaacagccttcttagcaaatagctgttttttcttttgctcagctgcttctacagtatcctttgttcatctggtcttgcaagtccatagtctttccccttgcttttaaagtcttctgttatttgga

SEQ ID NO: 126057 - DNA, 1145 bp, Homo sapiens
ttacattgatttttcttggaagagagaaatataagggcttttattttctaatttttactgaacatttatgtctgttataataagaaaacattttactttttatttaaagtggcaggcagtaaaataaatactttgacattagatttattgtaaaaagagaatccatctcggtattactttattataggatttctttttgtttagaaccgtgaggccatgcttttttctgtttatacaattttgagtactaatttactttttaaattcctgctgatatttctaaatctaatcctttattgtttgcttttatttctttaggttattgtgtcaatgagtatagcatttgctcaacaaactgaactgtctagaatatctgggggaaaagaaaatactgcatcatcaaagcaagcacatgctgtgtgtcagcaagaacaacattattttaatgaaatgaaattatcacaggatcaaattggttttcagacttttgagacagtggatgtgaaatttaaagaagaatttaaaccacttagtaaagagttaggagaacatggaaaggaaattttattatcaaatagtgatccccatgatataccagaatcaaaggactgtgtgctgactatttcagaagaaatgttctccaaagataaaacatttatagttagacagtctgtaagtatgcctccttgaatataaaaaacttatttaaaaattgtgaattctttcactttaaaaatattagcaatagtgctgcttaatgtttggaggaggaaaatatcaaattcagtcttatgactcacgttgttttgttttgttttgtttttgaggctgagtctcactctgtcgccagggtggagtgcagtggcatgatctcggctcactgcaacctccatctcccaggttcaggcgattctcctgcctcagcctcctgagtaactgggactccatgcgcgtgccaccacatccagctaatttttgtatttttagtagagacaggattttaccatgttggacaggatggtctcgatctcttgaccttgtgatctaccctcctcagcctcccaaagtgctgggattacaggcatgagccaccgtgcccagccagttcacactgttaatgtgttttattaattgtaagatatatg

SEQ ID NO: 126058 - DNA, 1734 bp, Homo sapiens
cagcagtacgcaaacacaggtagtatggactttgccccacctaggagcaatggatcaccaattcagtaggatttgtttgtctttgttgttggtatgagatgtattcttttataggtactgagcttaacatatttgtgactgcatgtgtgtaaggtaggtggagtcaaaatgccttacatttcatttaaggtaatttgaatctgacattctgttaacagcaagtattgtttcaccaaagagaacctaacaaactttattgttgcactacagcatggataatttgaacccattaaaattttttatttgtgtacgagaatgttttatcctcttttgataacactaatctcgagtgtagttaaatattataccaaccagtatcaattttgtgcacagaggtttctattttatctcataccaatatagaagaatgacatgctgtttccaagttgacaggttttctttctgtcttctcctctcttcctttacacaaacttaaacagaatggaaatgaaaaccaaggagaagttgaagaacaaacatttaaagaaaaggaattagacagaaaacctgaagatgtgcctcctgagattttgtctaatgaaaggtatacaaaatgtgtactttttcagtgcaaagtaaattaaaatggttgtttcaatgtaatagactttgtccttatttttatcttgtacattgatactttgtcttaaaaatcatcataccatctgtgtatgaaacatgtccatgtatgtgtagtatgtaaaggattttcagtttttcatcattaaatagataacattttaaaaaaatcttttctatataaattttgattggatattaatcacatacttaactgttaatcacctgatgttagcaaaacttttccttactttgattttgtagaggttaatataaaaatgtgaaatattaagtgagaatagttatcctacattagtattaaagactttaagcacaatattttaaactttgttttgttcaaatgaaaataatttctttaattttaaattaaaactaatatttacttcttaatttcctccttttccaatttctgtgactgtcaaccctcttgtgtcctcctaacctccttcctcagcttgcatggaggaatttggcccctaagattttggcttccccattggatcatcagtatggaacgcagtcagtatggaactcaaacaagaaagacagtgtatgaaaattagagttaccacggcaatataaaataaacactttgtttattttatattatttatctctaattggtaaattttgaaaactatgcagtatttaatttctaggaatttttatagtaagtgccaataaaatgagtatttttttttaaccaccatattaattttaatcatttctcttaagtagaaatattttcacattattctagttctggggtttggggcttaaacaaaacctcagaacaagttaaggaaataaaacccttggcttcctactaaattagtttagttttatttttagtattcttgattatataagcagagaacttgatctaggtgcaaaaatagaaccgtctctttcacttgacaaatactaacggaaaacttctccatttattatcttgtcttaaaatagatatgtcatgtgcctgtgaaacaggtatcctttagcctgatttttggcaagctcctacagtgtgaagctaaaagataaaactgtcttaaggcagaagacctttaccat

SEQ ID NO: 126059 - DNA, 1041 bp, Homo sapiens
attttaaaattatgtttcaaaatatgtttttatgtttaacatatagaaagatttaaatgtgcaaaatacatatgtataaccatgggcagcaagctcaataacttgcatatgctttggcactaccatactttttaaaacttaaattttgtctcccaagattttctcttaacctagttactggcttaagactttagttatttttttcaagtcaattaaataccgtacattttaaaaaatggtatgattaagctaattggccaaaatttttcagacaaaaacaaatcattttataatatagttacaaataaaaaacaagaagcactttattgtagatgctattgggtattttaataaaaaggatcatctgttatttttcaaatcaaatattttgcagtgtactttttagtggacataagcaaagtgtttgcttcaaaaatattaaacattttaatcagtgcttctttatctatacaggtatgcactccagaaagctaataatagacttttgaagatcctcttagaagttgtaaagacaacagcagctgttgaagaaacaattggtcgccatgtccttgggattctagatagatctagtaaaagccagtcatctgccagcctaatttggaggtcagaagcagaggcatctgtaaagtcatgtgtccatgaggaacatacaagaggtactagttttctgtgttgtggaaacaatcatttcaacaaatctgctgagttcaaggcattttgccatgtgttgaaaatatagaagagaaaataagtattttccagcaaatggaccttcaaacagaaatacattagagcaactcttttcaaacaccattattgtatagcatttgcaagtgggtatcatagagttgtcattatatttacccagggttgccacagtgcctacataaaccagaatgctgttacatttctccaccgataaaagaaaatttatatatcagcacttagtactcttaccagtatctgtgaggtatggatgacatcctgaaaccatcctatagattaaggaaagattag

SEQ ID NO: 126060 - DNA, 1760 bp, Homo sapiens
tatataacttgggcttttaaagtttagtcagggttcataagataccttaagtggtatagttttcaactgttacatacagtgtagctttaaaaagaattttttccttagcatgtactctgtaaacaatatgaaaataggttataactgaaatgtctatagttttagtggctgcttgaaagatgagtaatatttctaaggaaatagcaaaagtaagttttaattttccagaaataactttgattattttatatacttgaataacttattactaatgtggactcaagcataattaatttcacatttttaaattaaagcaattttttaatggaacggaaaaacaccagcttatcttacaaacattataaacttgtctaaatgccctttcaaagccctgacgtggaacttggatcctgtctggcaggcttttttgtgggcatattaattcacattccacctgtcagtgtacctataggtaaagacattaaaccacaccctctgttctgaccttttcctcaggggacactgactagaatcctttggctcagcatgagaggctatttgaatagctcagttcagaagagcttttccttttgaatagagtgaagcagcaagagcaagagaaataatgttacaactgcatttctcaagactgctgctatggagatttcaaacttgaccttccctgccaggttctgctttgaaggcttacttattactacagacatcgctgatattaaaagcagttttattgctcgtctaattagatgtttatatttttattcttctcttcaaggacttaattatgctagtttaaaaggtgtttttgtttgcttgcttttatttttgttttttgattttttttggtttttgttttggtttgggtttttttgagggggcatcaagattgatagagacctaagtttttttagatttgtagtttttttcctggactttccccttccttttattgtgcagttgtatgaattaattttataacatttatttgatagtgctaaaaaagaaactttttatactgctatggtagatcttgataaactaaaaagaactttttaatgtattagaaaattgataaagcaaattaggaatctcggcagctgtatcttctgggatggattcttatagcacctatttggcaactgtcaaagtcagtggctcgtggttagaagagcaagatgaagacatttatgaggttgaatctcgcgtgcctttaccacatccttttcctctttgtgaacatttggatgaaaataactcagtaattgttaatacttctattttccattttattcataaaagaaacgggcatatattaaagcttatttctaaaatttcactgcctacccctccttattcagtaagtataaaaaatattcatttagttaaacactataatgagaaattaaattttgagtgtctatattaaggctaaatgggatagaaccttgtttgatgcgttactactcattcattctagatgtatttaagggctaaatttggtctgagttccaacttggctatgtttacaattacagaaagcagaatgagataatattacatttctccaatgccaggcagtttgtttaaaaagatcccgcttttccttaagattcttgcttttgtatgtttatcatgccaatcctgaataagaatggaataattattatatttgagagactcggtattatgatacttataagacagctaagtgaattgtcattgagcaattaggaaatgtttac

SEQ ID NO: 126061 - DNA, 1080 bp, Homo sapiens
tggattataaggctgattaaatcttgtcaggaagtagaacatagaagcaaaggcttatttaatttacttacctaaagcaagcatttattttgttgtaaattctttgttatatccttatagtaaatttaaaaaagacaaaaaaaagcatatcctttttagttacatgtatttactagatagtcattatgtaatgaacagaaaaaaatgacaaacgtgtaaaaacaattgatatgtttttaaaatatggattgtgactgtaaattcccatgtagttgtatataaattagttcatactttattgttatgtttctttgtaataaaaattaatgatattagttatccagactttaaaggaaaaactctttccagttaaaagtaaaaatattccttttgagataacaacatattatcatgggtattttaggaaataatttataatttaaaatgtatgattaattttctattatgagtcttatacgtgtattcatattaattgcaaataagttataagtgatatttgaaatatcctattaaaacaagaataattgcatactggatattttggaaattgatttagagtagccatcaaaagctgtagttactctaaaatccatttgctatgacaaatacctctcagatgtgaaaagtggaagtctttaacaataaagtatcctttagtattatcatgattttgtaatacattttcaatatgtgactataaattagaaaccactacatttgatcatattttaagcttaaaatgcactaatatctttttaatgcacaaagtactttatatgtaaatttacaaattcttatgactttactgtgagcctgttattaatatatgtgatgatttcttcttacaatttttggactaaatactagaaacatttgagttcaattttttcccatgtaattgtttcagtaataacagataagcaggtgctgatagtcaaaagctcagaaaactaaggcagagacagtacttttctgcaatttcacacagctcatttagtagcagtgatcaagagagctttggctttaagccttctatcatcttaaaaaattgtttaagaa

SEQ ID NO: 126062 - DNA, 2252 bp, Homo sapiens
catactagttaaagaccctagggatatgttctttccattttcttcattagaagattgttttatttttactatatacactttgttatattaataatattaatagctaacacatagtgcttaccatacctcagacactcttctttacatgtattaactcatttaatgccaaaataactctaagagatcagtaataatattattctcagtttacatataaggaaactaaaggacatcatcataactgtcacatgggagataagtggctgagctaggttgggcctacggtctgttcttaagcactacaccacactacctctcatacatgtcagttttcccttgattcacatacatgtgaccatgcaaaagcaactcaggaatatggatctaataaggagtaagactaacaggaaatttcaattatagctgtatttatatttctgtaactcttagacttgccttggttaaagatttacagtgtttgatcttcatgtttattgtgtatgcaaataaaattgactttatgggtttggaatgaattgctttttgcctgaggtgaagaaaacggtgagtttttttctgtgcttgaatttaattggactttgttctttgcccagtagtaaaaatagattttttttttttggtcatttgctatgttgttttcacaaaaatattattttcagtgacaggacatattttttgttaataattctgtataattttattaataattgcttgtttacttatatagaaatattttaatataattttgatactttcataagagaatatttactttcatgtgtatttaaaataattctcagcctttcatgaacgtaaaatttggacatagttatcagggatttcattatcataagatcattaattgtgatttaattcagtatattttgtattaataaacagaattactacaggagacagaaaaattaatgaaggaaaaactagaagtacaatgtcaagctgaaaaagtacgtgatgaccttcaaaaacaagtgaaagctctagaaatagatgtggaagaacaagtcagtaggtttatagagctggaacaagaaaaaaatactgaactaatggatttaagacagcaaaaccaagcattggaaaagcagttagaaaaaatgagaaaatttttagatgtaagtattctcaagttgaatactgatttttctcagtggaatgttctttgctagtatactaggctatgaattttaaattatgaaaagactgttgagttagtttttcagtgttttattaggtgtcgaatctactaatcgatcaaaaagtactattccaatttaagattccaataatttttattgtgcagcactcagaattaaaatcagtacattttattatgtattgaattatacatgataaaaattatgaataagccccactagttttccaaattcagatcaggagcttattctagttttttatttaaccacagactaagataggcaaagagataatgggccaccactgcttcacctgtaaaagatacacatagaacagtgtggccattggaaatgggcccggaacagtggtcatgctgccattactctcttccaaaaagatgttaaatctctaatttcacatttttttttcctttgagatttcacttaagcctgatactctcttcatagatcagagaatcagattcttactcattttataactttagacataaaacctagattaggattcaagaaactgatttaccaaacaatttgttttatggattttgtttaatggctaaactaacatggaattcctcctttgttccagaaaagtaaattcattttaaggtgaatattttttcatcctgtatttaatattacttgaataaaaaaagaaatgtacttgaaataatattttaatattaatacttgaatttttgttgaggaggccaaataggctatatggcatataaaaaataaaatgttatcttttaaaacttttgtgatttgggatgttccatgatcatcagtcctttgtcttcaaacaaaactaacatatctctaaaggagaagtaagaaataatagcttctctaaatactgtttcttcagctactatcattattgtcattaaactttaggagcaagccattgacagagaacatgagagagatgtattccaacaggaaatacagaaactagaacagcaacttaaggttgttcctcgattccagcctatcagtgaacatcaaactagagaggtaagaacttcactg

SEQ ID NO: 126063 - DNA, 1093 bp, Homo sapiens
atttcctatctgattactgtaaaacaataaaatgagtcaaaaattaaaaaaaaaataaaacacaagtgtggggtgtgacatggcattttgcacacccagcatgctcccacatgatgccaactctactgctctcgagaccacactgaatagcaaggcttcatgtcacaaagttaagaaattgatcataaactgttgtataaaaaaaggaaatttcgtatgagatagggcagcaatttgaacttaaataactatttatgtgttgattttaaaataataccttgtcatcaaagtagttacagaaatgtagggatagttgtaaatactatgttaaatcactttgaagaagatataatcattgcagttttcagcaacctggtaattatttatgttcagtcattaaatgtatttcagtgtctactgagtttaataaccagtgttacagaaaaaattttaagtgtaagtcttagacattagttattagaagcaggataagtgatagtttagagtggaagattcagagataaactcctcaggttcaaaagctggcttctccacatactcgccatgtggcctgaaagcaaattactcctctctgtgacgtccatcctcatctctaaaatggggatactcagaacagatcttataaagttgtaacagggttttaagaaataatacatataaagcactttgtgcagtgcttagcggtaaactgttacaagtgatggctgttactactagtattgatactgtttaggaaatactaagctaactggtttttaaggatttgccagtgttcagatatggttctcagtatgtgatgtgttagtgtgtaatcagcgattccctctttcagtttctaaggcagtaaatgattcataagctgctttctgagccacttgtcactaagtgttgctgaggataggctctgttgccttagataacagagatgctcctgcatcttagtttgctttttgatcagcagttttgatcatgaggtaaatacacatttggaaatcattcattcactttgtattaagtagcaacaaaccagtgagctaaatgaatgttactgtcctcagtcaaaaccaatttt

SEQ ID NO: 126064 - DNA, 1097 bp, Homo sapiens
agacacattggtttaataatttatatgtatttttctcccctcctaatattgtcataggattctaatgtttttcagaaaggctctgtgacttagattttatcatgttattctaaccaaatctattataaattataatatttaatatgagttaagtaaggtaattacctttggtgccatcggttgtagactttatttccgtacttcatccttttccattaagaagtattgatattgactattttcctaatagggaatcagcaactaaaagcttatattactttatacttaacagaactttctgagccttgtttgatatgatgggggagatattggtctataatgaaattaagtagtatgtctgagaagtagtgtattatttttgtgtgtgatcatctctttgaggtactgccctaaaataaagtaaaattttcaaaatgtaaatacatatatattatgtatgttacctttttcattaattattaggttattgaagaaaaaaatgaactgataagggatcttgaaacccaaatagaatgtttgatgagtgatcaagaatgtgtgaagagaaatagagaagaagaaatagagcagctcaatgaagtgattgaaaaacttcaacaggaattggcaaatattggacagaagacatcaatgaatgctcattccctctcagaagaagcagacagtttaaaacatcaattggatgtggttatagctgaaaagctggccttggaacagcaagtagaaaccgctaatgaagaaatgaccttcatgaaaaatgtacttaaagaaaccaattttaaaatgaatcagctaacacaggaattattcagcttaaagagagaacgtgaaagtgtggaaaagattcaaagcataccagagaatagtgttaacgtggctatagatcatctgagcaaagacaaacctgaactagaagtagtccttacagaggatgctcttaaatccctagaaaatcagacatacttcaaatcttttgaagaaaatggcaaaggttccataattaatttggaaacaaggttgctacaacttgagagcactgttagtgcaaaggacttagaacttacccagtgttataa

SEQ ID NO: 126065 - DNA, 1050 bp, Homo sapiens
tacctatcttaattacgtttcaaagtatatactcttttataacaaatgagctccataacttaaaagctagataaaaagtattttgtggatttgatgaaaactttcattgttataaatttctttaccaacatcttcttgcttggttttcctggaaatctttcttaggaggatactttttatttccattctgttaatgaaggagtagaaagttgttaaagagaactgtatatcccatgagaaccaaaaatagaagctaataaaattatttcatttctatagtaatctatgaccatacgtacatacaaatatatatatgtaaactgtgagcgtttctgaaatgtttttcctactactctgaggaaaatgaacgtataatcatgaattacattcctcccacaccctttaaattctacatttaatatgggaagattttaactgaatgccctactgttctattcattacgttttaggtaaaagaaacaaatatgacatctcttcagaaagacttaagccaagttagggatcacctcgcagaggcaaaagagaaattgtccattttagaaaaagaagatgagactgaggtacaagaaagcaaaaaggcctgcatgtttgagccacttcctataaaactgagtaagagcattgcatcccagacagatgggactctgaagatcagtagcagcaatcagactccacaaattcttgttaaaaatgcaggaatacaaattaatttacagagtgaatgttcctcagaagaagttactgaaataatcagtcagtttactgaaaaaattgagaagatgcaagaactacatgctgctgaaattttggacatggaatccagacatatttcagaaactgaaaccttaaagagggaacactatgttgccgttcagttactgaaagaggaatgtggtaccttgaaggcagtgatacagtgtctgagaagtaaagaggtatttggtttttataatatgtgtttttcaacattgtgtggttttttaaaaaaaaaaaatcagtttaattcattttgtagatgacaaaccaaaa

SEQ ID NO: 126066 - DNA, 2057 bp, Homo sapiens
gtcagggaatttatcttacacacagtcagggatttgacatagcatcagaaggccgaggagaagaaagtgaaagtgcaacagattcctttccaaagaaaataaaggtactaaaagatagataccttttattaactcagccagtgttgtttctatgttgaacatagcagttcattagaagttatatggtgggatcatttctgaagagagaattgcttagctagaaggaatctgagagatctattttatttccacatttcacagataataaagtaagagattaatgataatatgtatgaagactttttttcttaataattcttattcctgatgtattcgtttgccagaatttttaaagtagtctcaaagagtagaagttagagcccatgtatttattttggtcaaatcagtagcttatcagtaaacctaggaagagtacattagccaaacagaaggaacttagagatgagagctatggaaagtcataggccatctgctggggttggcttacccctccacaggaagaaggcattcagtaatgttgggctggagttttctctctgcaagctatcttgcttaaaatttatttctgtttgtaagtctaatttttcagtctgtgaagaagttgtcataattctggctcttgggttttggtttccagggattactgagagctgtccataatgaaggcatgcaggtgctttctctcactgagtctccctatagtgatggagaggaccattctattcagcaggtttcagaaccttggctagaagagagaaaagcttacatcaatacaatctcatctctaaaggatttaattacaaagatgcaactgcaaagagaagccgaggtaaccaaagaatactatgcatttaaatcattttatgtattatttgaacaataataatacattataaattaaattatcttttatacatatttttgcatgaataactatatatatatattttcacacttgaaactcagccagaagcagtgcctcatgcctgtaatcccagcactttgggaggccgaggtgggtggatcacctgaagtcaggagttcaagaccagcctggccaacatgttgaaacccgtctctactaaaaatacaaaaattagccaggcgtggtggtgggtgcctgtaatcccagctactcaggagaatcgcttgaacctgggaggtggaggttgcagtgagctgagatcatgccactgcactccagcctgagcaacagagtgagactgtctcaaaaagaaaaaaataaataaataaaagaagtacacatgctcctaggcttttaattatttttctttgtagattaatatttttagaatgtttttaaaacatgcttatttgaaaactaactatcgttatatgtactttgctaggtttatgatagttctcaatctcatgagagcttctcagactggcgaggtgaactactgcttgcccttcaacaagttttcttagaagagcgtagtgttttactagcagcatttcggacggagctgacagctctaggtactacagatgcagttggtttactaaactgtttggaacagagaatacaagaacaggtataatgaaacttcattttaaaaacactttaatagaaataaggaaatgactattgattttagagtcttaatttaagtatgaaggttaagattttaataggagccactatgaatattttaaaaaaattattgtaactattttaacgtattatgttagaaggtaagaaagactgaaagttaatgagcttattttctaacctaggaaattagaaaaagagcaacagaataatcccaaacaaatttgagagagtaaattctcattatttgcactggttatgttccataaagttgctctgaacattgagcggtcattgctcctaagggaaatacaaggttaggttcctgtaagcctttggtcacaacattttcatcagtcagcacataaccttgtctatatgtgattctattttaagacaccttatttactatatattattgattgattaaccttgaacaccaccaacagcactataactc

SEQ ID NO: 126067 - DNA, 1049 bp, Homo sapiens
tggtggtgttcaaggttaatcaatcaataatatatagtaaataaggtgtcttaaaatagaatcacatatagacaaggttatgtgctgactgatgaaaatgttgtgaccaaaggcttacaggaacctaaccttgtatttcccttaggagcaatgaccgctcaatgttcagagcaactttatggaacataaccagtgcaaataatgagaatttactctctcaaatttgtttgggattattctgttgctctttttctaatttcctaggttagaaaataagctcattaactttcagtctttcttaccttctaacataatacgttaaaatagttacaataatttttttaaaatattcatagtggctcctattaaaatcttaaccttcatacttaaattaagactctaaaatcaatagtcatttccttatttctattaaagtgtttttaaaatgaagtttcattatacctgttcttgtattctctgttccaaacagtttagtaaaccaactgcatctgtagtacctagagctgtcagctccgtccgaaatgctgctagtaaaacactacgctcttctaagaaaacttgttgaagggcaagcagtagttcacctcgccagtctgagaagctctcatgagattgagaactatcataaacctagcaaagtacatataacgatagttagttttcaaataagcatgttttaaaaacattctaaaaatattaatctacaaagaaaaataattaaaagcctaggagcatgtgtacttcttttatttatttatttttttctttttgagacagtctcactctgttgctcaggctggagtgcagtggcatgatctcagctcactgcaacctccacctcccaggttcaagcgattctcctgagtagctgggattacaggcacccaccaccacgcctggctaatttttgtatttttagtagagacgggtttcaacatgttggccaggctggtcttgaactcctgacttcaggtgatccacccacctcggcctcccaaagtgctgggattacaggcatgaggcactgc

SEQ ID NO: 126068 - DNA, 1045 bp, Homo sapiens
tttttaaaattgaggaacgtacaacaaaatagcctgtagtcttcaaaaattcaaggtcatgaaagacaaagaaagacttgggaatatcactttttttctttttgctgtgaagtacatttcacaaaatttgaataggctctgtatatcacataatagtattgtagtaatgttaattccacttttgctaattgtagttatgtaaaagaatgttcttgttttaaggaaatacactctggtatttagaggtaaatgagcatttgtctgcagcatatcctcatacattttggaaaggaaaaataagaaaattttttaaaaaagaaaattttagtatgtgtgttccattcattcttctttagatttcttggttgttaattgtattgcctttacattgctcttcacttgttttttaccttcctttgttacagggtgttgaatatcaagcagctatggaatgcctccagaaagcagatagaaggagtttgttatctgaaattcaggcactgcatgcacaaatgaatggtaggaaaattactctgaaaagagaacaagagagtgagaaaccaagccaaggtatgttgtatgacaagctcatatggttacacaaacaggtgaaaagatttcactttgttttctttcttattattattaagttaaaacatattttcttggtcacattttcttctcattctcataatgttaaggatacaatctatattaattactctaggggttagaggattgtctaattggtttaaacagctacgttgactttaaaataaactgccattcccctgataaggttaagcccattggattcattctttttctttattttagagctgtatgttaagaaaacagtctttccaatcataaaacagaaaatactctttagaggaaaatccacaatgcatgtaactaattattttttaatccttttttaaaaaaattgtgagccataacatacagaaaattacaaattgcaaatatgcagtatgacgcatttttaaatgagtatctatggaaacatcacccatgtgaatatagc

SEQ ID NO: 126069 - DNA, 1010 bp, Homo sapiens
atggtctcaactcattgcaacctccacctcccgggctcaagcaatccccccacctcagcctcctgagtcgatgggactacaggcacatgccagcacgcccagctaatttttgtatttttagtagagacagagtttcaccatgttgcccaggctggtcttgaactcctggccttaagcagtcctccctcccacctcagcctcccaaagtgctgggattacaggtgtgagccaccatgcctggactgcattaccaactcttgggactataatttttcatgtttcctttgaagtaatctccttaactacaaatcagttcttatcaacaaatatttataaaccaaatatgagttgcttgattatgtttcaaatattaatcatgttctgtgtagaactcttggaatataatatacagcagaagcagtctcaaatgctggagatgcaagtggagctcagcagtatgaaagacagagcaacggaactgcaggagcagctgagttctgagaaaatggtggttgctgaactgaagagtgagcttgcacaaactaaattggaactagaaacaacactcaaggcacagcataaacacctaaaagaattggaggctttcaggtgtgccaggcttccttattaaaaacatgtaacaaggagtgggagtaattttgtcataaacactgtgcaaatatagagaaatgtaacatgcatgatatttaaatagcatgcaactgttttttttaggaaaaactataatagaaaaaactctaaatgtttccaaatgatgaacttatgatcgtgattatagcatattctctactgtgacttcagttctgtgtgagacttgtatgaaatagaattttgactttgacctttattttaccatcaaccaatttgaagtgatatttatgaacgcagtagaattcatgattgagtgagctaaaatatgcaaaatatttgaagagacaatgcttgttaaaagaatatatttcttggtataaatactgagatattctgtt

SEQ ID NO: 126070 - DNA, 1050 bp, Homo sapiens
gaggccaagacaggcggatcatgaggtcaggagattgaaaccatcctggccaaaatggtgaaactccatctctactgaaaatacaaaaattagctgggcgtggttgcgggcacctgtagtcccagctacccgggaggctgaggcaggagaattgctttaacccgggaggtggaggttgcagtgagccgagatggcgctactgcactccagcctggcgacagagcgagactccgtctcgaaacaaaacaacaaaaaaaagaaagagttaatttgaaatgaaccccagtcaagaatctttaatagtttatattttcctcttagctagtttattatatgcctcaacttatcagtagaagctgtttttctctctctcattatatgcttcgtcaacatagctttatggaaattcatttgtctttctgacttaggttggaagttaaagataagacagatgaagtacatttgcttaatgacacattagcaagtgaacagaaaaaatcaagagagctccagtgggctttggagaaagagaaagccaagttgggacgcagtgaagaacgggataaagaagaacttgaggtactgttatctttgtctttaaatgtctggaaaatccagaatgatagaagagggtcttaaggctttcctccatctaaaatgtcaaccttagacttcttaataagatatggtaagttgttcactgtgcattgaatactacataaaccgtattatgaggaaatgctaatggagtggtgattggttttttttgtttgtttgtttgttttgctacatccaaagatgcatatagactgctctgctgcaacatgttttgggcatgtgaattggtacacacagataaatatggcaatcctgtcagtttaatacagaggtagttttggttcctgttttctcctagggaagaggaacagggatacttttctggagccctcactgcttaagaacatttaaagtgaacattggcccctttcagagagacacacccctgctttgcaaggctctcagctcaaggcaggctgctttgagtatctg

SEQ ID NO: 126071 - DNA, 2634 bp, Homo sapiens
gtttttttttttttttttgagtcaaaagtctcactctgttgctcacgctggagggcagtggtgcaatctaggctcactgcaacctccacctcccgggttcaagcaattcgcctgcctcagcctcccaagtagctgggactacaggcacgtgccattgcacccagctaatttttttgtatttttagtagagacagggtttcaccatgttggccaggctgggcttgaactcttgacctcaggtgatctgcccgcctcggcctcccaaagtgctgggattacaggcgtgagccaccacgcccggccaagtatttttaataatattaacaagttcttaaatttgattttctcgtaccaggatctgaagttttcacttgagagtcagaaacaaaggaatcttcagctaaatctacttttggaacaacagaaacaactactgaacgaatcccagcaaaaaatagaatcacagagaatgctatatgatgcccagttgtcagaagaacaaggtcgaaacttagagcttcaggtacttcttgaatctgagaaagttcgaattcgggaaatgagtagtaccctagatagggagcgggaattgcacgcacagctgcagagcagtgatggtactggacagtctcggccacccttgccctcagaggacctactgaaagagctgcagaaacagctagaggaaaaacacagtcgcatagtagaattgttaaatgagactgaaaaatataaactggattctttgcaaacacgacagcaaatggaaaaagataggcaggttcacaggaaaacactgcagacagaacaggaggccaacactgagggacagaaaaaaatgcatgagctccagtccaaagtggaagatcttcagcgccagctggaagagaaaagacaacaagtttataagttagaccttgaaggacagcgactacaaggaatcatgcaggaattccagaagcaagaactagaacgagaagaaaaacgagaaagtagaagaattctgtatcagaaccttaatgaggtaaactgacagtttctttttagatatttttaaggaaagcactgcagccctttgatcattaaattttgatattggattaaattacttaaatagctatatgtaaatcacttaaaaatgaaatctatagaagtttattggatataaacaataattgtgttcccttaagatagactgtgatatgctgttcacttataattattgttttcttattctgtccaaaattgccagccaaccacgtggagcttaaccagtgatagaactagaaattgggttcttcaacagaaaatagaaggagaaacaaaagaatcaaactacgctaaattgattgaaatgaatggaggaggaaccggctgtaatcatgaattagaaatgatcagacaaaagcttcaatgtgtagcttcaaaactacaggttctaccccagaaagcctctgagaggttagacttttctgcctgatctttgggaaagtagtattcttaggctgggtagaccccatgcctctgggacagctagccaagggtggggaattgaaattttaaaggtaatgcgtgtttacattaggaggtgatattctttaacagaactcaaatgtctgaaaacaactatctaacactttgacccagggaagaaagcatgggatataagggagaagtgataggtgaagtagaacgtcgcctgctctgtaatgtttgtggtagtaaacacccccaattgagaaggtatgttttgactttttgtctttttcttgaagactacagtttgaaacagcagatgatgaagatttcatttgggttcaggaaaatattgatgaaattattttacaactacagaaattaactggccagcaaggtgaagaggtaatactttttaaaagttatttctgaagcattgagagcaaagatttaatagaaactggataatttgaaacttgcagcatattctttatactctttatagagttttatttgtatctttttatttattttaaatatgaataataatgcttgctttcccccaagagaagataatgaaagcttagggggggaattagctttcattattgtcattgaataattatgttgaccttttactgtatggagacaagcttcctgaaagagtgatctggcttctatcctgtctactccatgaaacacccttagactcctacagtgtctaaacaattgactagtctggtgaatcttttcagtttatctcttgacttctttgtagcatttgatacttttgacctgttttattttcttaaaaccctctctttccttgcctgtcatgtcagtattctagcatttcttctgcttctttcatcagttgcctttatgattcctcttcctaccctcttccttcttttctctaacctataactatgaaagctcacacagtccgacaccctgagctctcactagacttatttattaaacaaatacttatattgaacacttattctgtgccagataggttctggagatacagtgaacaaatctgactaaaacctcacccttatggagcttatctttagtggactgtggttctagtctagacttctgtcctgtgttccaggtttatattttcaattagttactaaacatttttcc

SEQ ID NO: 126072 - DNA, 1050 bp, Homo sapiens
ttcccctgctttgtacattactaccaaaggaattttcccaacacataaattttgtgtcatatttttgcatcaagcctttcgtgactctccattgcctacatttaggtctgttattcataaagtgaagcaatctagacttaccaggcaacctacaacaccccgaaaacaatacacactcgctcaagccttcgtgccttttgcttaatatgcccttccttatcttttctgcctggtaaatatctacctattactgaatactcaactcaagcaccaattcatgaattctgttgttctcggtgcctattcacactttatatgcattattcacatccatttgtgcttaagtgaccttacaccattttatttttccagcccagcttggtgtccccaagtacttcttgtggctcattgactgaaagactactgagacaaaatgctgagctgacagggcatatcagtcaactgactgaagagaagaatgacttaaggaacatggttatgaagctggaagagcagatcaggtggtatcgacagacaggagctggtagagataatgtatgtccatttttagcatctccatatatgagaattagtgcatgcttatcatttctgctgtctagttcaagttttaatcctgttaatgtaaaactatcacacacctgattcttaggatctgtagaaaattttatagggatgacaataataatattattactaagttataataattactgttatttattggaaaccatctctgtactcgactctgggttgtatacatacagaatctctaatccacatccaccttatacctgagaaaactgaattgaagtcgtagtcaaaccaagatacttgtatctccaaagccagatactttgctacctagggaccaacaacagatacacgagatgttcaaatgtgaatcctgactgttctcttcatttaattattagttattgtgttgatgactcaattaaaaggttctgttaaattacgtctttcagtctgaaattactctgagaatttacttaaaatttttccatttaaaaa

SEQ ID NO: 126073 - DNA, 2485 bp, Homo sapiens
aggaccgtgctcctccttaaggttctacaggagaatccttccttgcatcttcctagcttctggtggctcttggcaacccttggcttgtaactacattgttccaattactacccctgtcttcaacaggctttcttcttgttcatgtctctgtatcttaacatggcattcttataaggacaccagtcattggatctaagtcctaccctaagtcagggtcatctcatcttaaataattgtgtatataaagatcctatttcccaattaagatcacattctaaggttctggatggacttgaatttatggggggatatatgatcttacgttaatcttgttaaatatcacattacatgtctctaatttctttactcattcttttacctcgtaattgtgctgtttatttatgttggtgcatatagttcattcattttcataatattacattttgtgaatcatcagaatttatctactcttatgttgattcaattaggatacttcttgcttgttgcgattaaatccttggactattcttcctgtaagccaagcttctctttagttgttatatttgaaatatggaccaatttgtaaatgctcatcttaaatgtcactcctagaaataagtacagttatgggccaagcaagcactgtgctaagcactatcagtttaggttttttcttttgatgaaaaatcttgcaatgaaatgcccaaatcttaagtcaacattcattgagttttgacaaatgaataacctttagtttagtccaatgtatcaatcttttaaatggttattgctttctggccctgtcttaaaatttttgcttagcccctgagtcatgaagatattctcctgttcttctctactgaaatttatgctgttagcatcatggtttgtgacccttcttgaattagtatttgattatggtgtgacataggagttgaatttcatttttcccccatgtaatatctagttattcctggaccttatgttgaaaagacttgcttttcctcattggcttgctttggtgtctgtactgataatcaaataaccataaaaatattctgttctgggctctctgctctgttccattgatctatttgttgatccttacctagtaccactctgttttatctttagtcttgaagtcagatttgaaatcagttttatgtcctccaactcagttctttttccaagattgctttggatatcctaggtcctttgcatttttatatgcattttagaatcagcttgtcagtttctacatgggtgtgactttttagtatattattttgggttcattaaatctcattttcttccatacatttataatgacatttgaggtttgattggaaggttttcatattgacttttaactagggctttcttgggacaaacagaatattctactatattcccaaactagattaccatcttatgattcaaactttccatatatttaacccagatatatattttcagaaaaagtaattggaaaagttatgtgatcagtcaagtactgttttcctaaaatgtggtattgaaaatctcctggaatttttaataattcatgttgttttatgtgaaaagaatgtcatctttttattatattatctgtacatttgctgttcatctaaaatgtagataatatcaccccaggctaaaaaggatgagaaagaatttaaactgattcttataactttttcttttttttagggcgtcatcgttgtattggggaaaattttgcctatgttcaaattaagacaatttggtccactatgcttcgtttatatgaatttgatctcattgatggatactttcccactgtgaattatacaactatgattcacacccctgaaaacccagttatccgttacaaacgaagatcaaaatgaaaaaggttgcaaggaacgaatatatgtgattatcactgtaagccacaaaggcattcgaagagaatgaagtgtacaaaacaactcttgtagtttactgtttttttaagtgtgtaattctaaaagccagtttatgatttaggattttgttaactgaatggttctatcaaatataatagcatttgaaacattttctaatagttatgatacttatacatgtgctttcaggaagttccttggtgaaacaattgttgaggggggatctaggtaattggcagattctaaataatataatttccagatagtaattttaagagtactcatcgctcttgccaaataagttcagggtattcaaatcttggactagtcctgcaaggtataaagaataaaaatcccagtgagatacttggaaaccacagtttattattatttatctgggcaattattgtgtgtgtgaggatggaagggtagggaataatcgaacatctaaagccttgaataagagaatactaattgttttggtatgatgatactcagaaatggagatattataggaaaaagaaatcctttggaattttaactaaaatcactgcatatgg

SEQ ID NO: 126074 - DNA, 1107 bp, Homo sapiens
ttaaaaatcaaagtacatatttttcttggttttaaaaataacattttgttgtaaaaaattgttaatatgaagtgtacaaattgatagtgaaagcctctctgaaattccaaccctacctccaaggcattatgggtttgatttgtgtactgtgtacttccaacccaacgctggctcactggaaatcatcttgagttaaaataatttttagtttgcctattatctagccagtttttaaatatatgtacagatggttcttgatttatgtgattcaacttataattttttgactttatgatggatttatcaggatgtaaacctatcataagtcaaggagcatctgagtatcccatgtatattcatgctttattacacaatgatctgattatttgtcagcacatttttaaattctctaatgaaatgtgtggcttttgtttatagactgtggcagggtataccattcctccaggacatcaggtgtgtgtttctcccactgtcaatcaaagacttaaagactcatgggtagaacgcctggactttaatcctgatcgctacttacaggataacccagcatcaggggaaaagtttgcctatgtgccatttggagctggtaagatgattatattttagattggaaatgtttgttctgataacatatttgtctctgtcaaaatattccgaattgtgtttacaaattatctctccctttcctcatagggacatttttgcaaacttttttaggagaagaatctttataagttggagaaaaatatttcctttgtaccaaatggaattgttccataaatccttatataatgcttcactacttcctaacctgtctggttttattaggtctaatttttatagaacatccttgttttcccttacaatggtatttaaagctctttgtggattctcttttaaagaaccattggagtcagcacaccattcagggaataacagattactagcatttcacaaaaaagcaaaggcagtcttttaaaattaaagctcttctcgatcgttagtcaacatttttgctctctgaatatccgtatgagaaaatggtctttaaatttgggcaggttgtgtgtaggcttgcaaatttca

SEQ ID NO: 126075 - DNA, 1003 bp, Homo sapiens
gactccaatggttctttaaaagagaatccacaaagagctttaaataccattgtaagggaaaacaaggatgttctataaaaattagacctaataaaaccagacaggttaggaagtagtgaagcattatataaggatttatggaacaattccatttggtacaaaggaaatatttttctccaacttataaagattcttctcctaaaaaagtttgcaaaaatgtccctatgaggaaagggagagataatttgtaaacacaattcggaatattttgacagagacaaatatgttatcagaacaaacatttccaatctaaaatataatcatcttaccagctccaaatggcacataggcaaacttttcccctgatgctgggttatcctgtaagtagcgatcaggattaaagtccaggcgttctacccatgagtctttaagtctttgattgacagtgggagaaacacacacctgatgtcctggaggaatggtataccctgccacagtctataaacaaaagccacacatttcattagagaatttaaaaatgtgctgacaaataatcagatcattgtgtaataaagcatgaatatacatgggatactcagatgctccttgacttatgataggtttacatcctgataaatccatcataaagtcaaaaaattataagttgaatcacataaatcaagaaccatctgtacatatatttaaaaactggctagataataggcaaactaaaaattattttaactcaagatgatttccagtgagccagcgttgggttggaagtacacagtacacaaatcaaacccataatgccttggaggtagggttggaatttcagagaggctttcactatcaatttgtacacttcatattaacaattttttacaacaaaatgttatttttaaaaccaagaaaaatatgtactttgatttttaaaaccccaattgttaaagaaaaatgcagaacatgattagcattaaagattagcatgtaggccgggcgc

SEQ ID NO: 126076 - DNA, 1050 bp, Homo sapiens
cagctgctatagttgtcatgctgttggtttccggggctaccatggatttggggagaggaggatgaaagaaatacaacttacactaccacaaagcttactcttcttaccaagattcagatttctttttcttgaattaactctccttagattgttgcaagcctttggttaatcttccagaattttgaaaaagttgacattaagattgttgctactgttttcattttttggaggagtgaatttttgtaggttcttacttcattcttcagggcaatcgcttctgttaccttgccctcctttttcaccatggacagtggtagagcatgataaccccagccaccctgaaccagttacctctgtacttttagctggaatgcaagctgtcttgtactaactaagaagttaaactaattttttgtactgttgaagtatgttatttataacaatcaggaaatgctttctcattttagctcaaggatctaaatttacttgatcgctgtataaaagaaacattaagacttagacctcctataatgatcatgatgagaatggccagaactcctcaggtgagtatcttggctacatcttcccctctatacccccagtttttatcaaaaagaagaaataggtgggtgtggtggttcacacctgtaatctcaacactttgggaggctgaggtgggaggatcacttgaggccagaatttgagaccagcctgggcaacatagtgagactgacctcatctctacaaaattttttctaaaaattagctggccataatggcacatgcctgtggtcccagctgcttgggaggctgatgtgggtagattgcttgagcctgggaggttgaaactgcagtaatccatgatcacgccactgcattgctgcctgggcaacagagcaagaccctgtctcaaaaaaaataaaaataaaaaagaaagaaaaagaaaagaggaagtagagtagcataaaagagatttttttaaattaaaaaagtagaataatcacttctacctaatcttcagttttatatactctaaaaacatatttttac

SEQ ID NO: 126077 - DNA, 1036 bp, Homo sapiens
cctaatcaaagtgtatgaagatttatttctgtgtattcttcttagtgttttgtagtttcatatcttacatttaggtctttgatccattatgaattaatttatgtatatgatgtgaggtcatcattcttttgcatgtgtttatccagttgtcccacactgtttgttgaaaagactattttttccacgttgaattgtctttgtaaaaaaatctattatagccaggcgcagtggcacgtgcctgtattctcagctactgagaagctgagatgggaaggtcgcttgagctcaggacttggggtccagcctgggcaacatagcgaaaccctgtctctgaaaaaataaatacattttaaaaagcctcttgaccataaatttaaggctttatttctggactcagttctattccattgatatgtttagtctgatgccattacgtagttttgtaataagttttgaattcgggagtgtgagtcctctgactttgtccttttcaaggctgtttatctactcctagtccctttagtttccatatgaattttggggtcagtgtgtcagtttctgcaaagaagctagctgagatttttgacaatgattgcattgtatcgccatattaatttgggagcacaattttagtctttaaatctgtgaacatgagatgtctttctcttattttagttctttaatttctttcaacaatgttttatagtttttggtgcacaatgtttaaacttctcttgttaaatgtattcttaagtattttattattgttatttttttgatgttattctttcttctgccagtccaaatctgctgttgatcccctcgggtgaatttttcatttcagttctcatacttctcagttcttgaatttctatttggttctctaaaaaaataatatattgatattctccattttactagagatatctaggcatattttgctatagttctttgaacctgtttataatagctgatttaaattcattatctagtaagtccaatgtctgggcttcttcatggatagtttctattaaac

SEQ ID NO: 126078 - DNA, 1604 bp, Homo sapiens
ttaaaattggaattttatgttaatttaaaagagtatcctactttctgttgaactggaaaatacttctaaaggaatttcttgcttgttttaggcctttagtttgaacacaggcaatgtgttaagaatctgggatatatatgttaaataaagcacagttcttgcccttagggactatggacatttttaacaatgtaagattttcatgacttccagtatgttcctggttctgatttttttgtcaattattttagagtcattaaagttggttaaataagatgctttatgctcggtcctggttctcaaaatgaatttgatcctagaaggttatttctttatttaagaaaatcatctttatcttttaattacagacgcagggacagagctcatcgggaaatcaaggatattttctataaggcaatccagaaacgcagacagtctcaagaaaaaattgatgacattctccaaactttactagatgctacatacaagtaagagctattcagataacatattaagctgaagcaggaaattacacattaaaacacagttaaatagtatttccagttaaaaaacagtgatgctggcaaaataagttggtagctgtgatctttggactctttaaattgttgagacataaactattggcatcctgtgtcttactgtaatcccagtgactgggtatggtaaaagtttgctaatgaactgtaatggagtcttttgtaatcaaaatcgttttgtgctggtctgtctcttccctaagagaaaaaaaactcttgacttgtgatagtcaaatataagagaccactatacctgaaaaatgtattcattatgacactttatttaaaggttgaggcatgaaatgtatctgccaaaatgttaaatttgtgtctttggttcattccttagggatgggcgtcctttgactgatgatgaagtagcagggatgcttattggattactcttggcagggcagcatacatcctcaactactagtgcttggatgggcttctttttggccagagacaaaacacttcaaaaaaaatgttatttagaacagaaaacagtctgtggagagaatctgcctcctttaacttatgaccaggtttgttggatttttcagtttcattgctgccttatgactttgaggatctgtggctaatttttaaaagggacaatttgagattttctatatactatagcttaaattgatcagcttctctatttttagcaaattccctataaccttacctaaaatatcttaatgttattgcttcttgccattaagctttatcagatatgttttgggttgatggcttagagatccttggggatgtttctttggtacttacttcctctgcttcaaagtctggcttctgtacatagaggatattatgtgcatgttgtgtgtcttatgaagtgtagaagcctctgaattacttagaattctgtatgtccagagtggcctgggcatgagcagagacttctaaaagtagtagtagtagtagtaatgaggacaagacatttacaaatactacatgcaacttgctgggtggaaaggaagagaggacaactcactgcacaacctgacattccatcttggaagc

SEQ ID NO: 126079 - DNA, 1089 bp, Homo sapiens
ccagtgttgggatatactaattggtgattatagttttcttttacatatcgccagtaattccattttggccctgatcttcctacttttaacctgggaaataatctgatctttggctactattccttgggaagtaccttattattgtcatatgcactataaataaccttttttctgcttttgttattgtgacctggaaatcaaataaccacatttattcttttcatgatgaagtgctcatgagtggggttttgagatgtgtttctgggatctgttttggctgtttagagggacagggtgcttcacattgtttggtttattgcccctctttgttgttgtacatagtcacatgtctgtctacagactttttttgatgatatgaataggatcttgtttcttcttgagttctgtttttaattctcaattttctttcactttttggaaatagtaatgagaataatcttttttttctccctagatgtgtttgaagctctttctgagctcataattttaacagctagccattgtttgcatggaaaggaaatcagaagtcaactcaatgaaaaggtagcacagctgtatgcagatttggatggaggtttcagccatgcagcctggctcttaccaggttggctgcctttgcctagtttcaggtatggataaagaatatattacactaggttatttaactttgtataattattgtagtgttggtatgctttgccttaacaaagataaaaattaaacaagtaaaacatacaaaatgggtaagattatgaatcccctttcttctataagaattcaagacaaattttctttatataatgagctcatttaaagtaagtttcagtttattaaaaaggtgatttgttgtctgtctagtctaatattttatttatgtttttgtttttgagatggagtcttgctctgttgccccagctgtagtgcagtggtgtgatctcggctcactgcagtctctgcctcctgtgttcaagcaattctcctgcctcatcctcctgagagctgggactacaggcacgtgccaccatgcccaactaatttttctatttttagtagagacagggtttcatc

SEQ ID NO: 126080 - DNA, 1250 bp, Homo sapiens
cataaccagaaaactgcaagggaaagtatttaacatctaaccaaattaatataaaataaaaaatgaagtcatttagtgtaggtgagatagtgctaaaatagataaataaacttgtagtgtcttcacatagcaggtactatagaaaaggtcaaattctttggctagtcttgtaaaatttgtttttaaccaaagggggaagaagtctatattttcagaggtgttcatcacagaattagctgtaataactaaagaaaaccctgacatatcacccatatgtccaataatgaaagagtagtcagtaaattaacattgtgatgtttatatagacaatagaaaacattgtcaatataaactgaaaaaagcataataaacagttatatttatactacatttgcaactaaatgaacataattataaatttggacaaaggaaggaggagtatggcaagatgaaaagaattgctttaaggtttatatatgtttttatttttttaataatgcattattttgtgattttaaaaagttactgtcgtagtgttgcatattttttgtaacatcactatatgtacttttctctttttagtatggacctgtatttagttttaccatggtaggcaagacatttacttaccttctggggagtgatgctgctgcactgctttttaatagtaaaaatgaagacctgaatgcagaagatgtctacagtcgcctgacaacacctgtgtttgggaagggagttgcatacgatgtgcctaatccagtaggtgacactgttaccataaataaagacaaatctatacctcagtagttatagctaatagtgagacattatacatttaaaatgtagaaacagccaggcatggtggctcattcctgtaatcccagcactttgggaggccaaggtgggtggatcactcaaagtcaggagttcaagaccagcctggccaacatggtgaaaccctgtctctactaaaaatacaaaaattagctgggtggggctggtggtgcacacctgtaaattccagctacttgggaggctgaggcatgagaatcgcttgaacccaggaggcggaggttgcagtgagccgagatcacaacactgcactttagccttggcaacagagtgagaccctgtctcaaaaacagaaacaaaaaaccaaacacacacacacacacgcacgcgcacacacacacacacacacacacacacagaaaccaaccaaacaaaaatgtaataaaatgtagaaccag

SEQ ID NO: 126081 - DNA, 1197 bp, Homo sapiens
cggacagggggcggtgctcacgcccaaggccccgctgacgcgatgtaggccgagatcacctcaggcgctcgcggtgcaatcacagagcgcgccgtcgccgctcgagctcgccctgagatccctccgctcagcgccttcaacgccgtgtcccggcaccccgcacccgggcacacaaaaaacgggtcgcccgcgattctcagggattgatcgcctcttcaggtaagttatcttccggccccgtaccactgtgccacaggcgcagcccgcttcctcaggtgccctatcccgcgcaagaagaccacggcttcacagagtgttatttaaggggcgtggccagcggaacatcccgccccattctgtgacgcacggggtggcgcgcgtgggacccgaggggtggggctgggtttagtaggagacctggggcaaggccccctgtggacgaccatctgccagcttctctcgttccgtcgattgggaggagcggtggcgacctcggccttcagtgtttccgacggagtgaatggcggcggcggctgggatgctgctgctgggcttgctgcaggcgggtgggtcggtgctgggccaggcgatggagaaggtgacaggcggcaacctcttgtccatgctgctgatcgcctgcgccttcaccctcagcctggtctacctgatccgtctggccgccggccacctggtccagctgcccgcaggggtggtacgtacattctttagggtctgagtggggcgcgcgccgcagctgaggcggccgaagggctggcgtgggcggctccgtggccccgaccggctcagtggatggcaagggcgggggcgactgcggccatgcttggcgtggctttggtggcaggcgcgctgggggctggagtagtggctgcggcggcggcactgctgctggtggcgctggctgtagcacccgccattgccttgtgttggggggcggtgctggcctccccggctgtgtatctgatcctagacggggtcgtggttgcggcatttgtggttgtagcggtctgtactgaccgcagcagtggtgcccctagtggcggtggctggattggcggctgtgggtttgaacgacccggtggtcgttggggcccttggtgggggtcctgacggagatgctgttggcagctggcccgtcatcctggaggctgccctgtgtggttcagtgttctgtgggct

SEQ ID NO: 126082 - DNA, 1165 bp, Homo sapiens
tgcaaactcctaggctcaggcagtcctcctgcctcagcctcccaagtagttgggactacaggcatatgccaccacacccagctaatttttttattatttgtagagataggatctcactttgttgcccaggctggtctcaaactcctggtctgggcaacaaagtgagaccttatctctacaaggtgattctcccaccttagcctcacaaagtgctgggattgcaggtgtgagccaccacaccatcctcattttctgttaaaactattttgcccacacaaaataggctgctgtttattagcttgtaaccacttttctatttctcttgtactaagttcattaaaggaaatgaaggagaaatgccccccaccatttcaagaaatttttcctctgctgtttcagagcattttataccaacatctgcaaatcattcttcatagaactggatggtgatgctgtgccatttctctaaactatattttatgtttgttagctttccaatttttggcaataatacaaagttttatatagtattcaaatgaaggtttagtgatattatttaacacttaaatataacatttcatattatgtataatactttgatccaggattcaaataaatgagttagcagtaacagacagaaggatgacaataatattcttaattaacagtctgctttttccttagataagaggttcagtttcttgaactataaatagaaatgctatccttgggtatctaaacaggtgattgaaccaaagagtaaaggtattttctatccatctagtcattaccttgttctctgtaaaccactgataaatttatggcacctttgaaagctttaagatagttgcatatttcagccgtcaaatgtgggaacaaccagcttgtcctcagttgtcttagattcaccaaggtctactaggattgcattcaacaagcttagcaaaaacatagcaaacaccttcatctgcaaaaataccttcatttgcatttaaaacactacatgggatacattagtgtcagagataggaaaagccatgggacacagttgtgttttttgtgtcagttgtttctaccttctataactacaggctcagtacttttgttggaaatttgacttctataattgagaagtaactatactacagttgtatttttttctgta

SEQ ID NO: 126083 - DNA, 2064 bp, Homo sapiens
aaaatattatactaaagcattcttaaagttatactctccaattttacttttcttatatttgactatagtttgatatactttatatttttctttatctttctttatgcttaaataagttcactaaaacctgactcgaataagtagtaaaacattttataaggcagatgtacttaagaatcccaccataaaaactagttttatgttcagtctttgagagaaaacactgaggttttaagcatatctgaatttggttattgtggttttcaattttcaaaaatattttctggttattgaaagaagaaacatttatctaaattgataatatgagatttgtggctttttgcttaacatttttagagttctctgatattttacagcaaaatatttttcaggttaaaaattacgttactgaaagccatttgtaacagaatgattactatactttagctactaaagatgatttatttaaaggatgttggcatgtgtgcttacagtgaagaaaatctaaaatccatcgtacctgttaccaaactgaaaagtaaggcacctcactggacaaatcgcatacttcatgaatacaaggtaagctgtttaatagaaatgaaaagacattttataggctagttgaaactttgttagtgttataaatattttaaacagaggtagattaaatttatagtcctgaaattaaaaatgtatcttctagttcacaatgcttgaaattgaaagtagcaagatatttttatttttagtaatatataatcttttactgaataccttcaacatgccaaatactgtggtaaggactaaagataaaaatttgaaataatatactatccatgcccgtgaagcaattaaaacccaataacatagacagtatttttagacctcaatttttttttttaatattaacatcacaagagaaaaagtactcctgatacaatgtgccataattttattctttaggggcaatcttgattttagaaactgcttagttgatctatttggattatcaatggtacattttcctttcatatctcttttatttttaatttaccttgtttgtttttagaatctcagtacaagtgaaggtgtcagtaaagaaatgcatcaccttcagcgcatgttcttacagaattgctgggaaattcctacttatggagcagcatttttcacaggacagatatttacaaaggcaagccccagcaatcataaagtcatccctgtgtatgtaggagtgaatataaaaggacttcatctcctcaacatggaaactaaggtagattttcagctcttttttaccaatcatgtcatataatagttaaaacaacagtaccaacctacatgaagaatttagaaatggcatatatacaagactgttcattgcaactcattcattacataagaggaagggggacactaaatcactgtcagtaaggcgttaatattatattacatttctgcattagaatacccttcagccataaaaaagaataaagagtatttttgtgtagaatgatctgcaagatacatttaatgaaaaagcaaggtgctgaacaatatgtaatatgctgcctactcttgctattaaaatgggaggaaatgaggatgatttttacataaatacatattgcttgtatatgcataaaatatttcttgaagcctttagagaagggaaccaggtaactaggaataaaagtaaggagggaaacttttcattacatacctatctagttcaggccactataacaaagccctatagactgattggctaatgaacaacagaagttttatttctcacagttctagaaactggaagtctgagatcagcgtgctagcggggttggattctagtgagagcgtttttctgggttggagactgctgacatctccttgtagcctcatatggcagaaagaatgagggagttatcttggggtcccttttataaaggcatgaatcccattcatgtgggccctgctctcataaattatggcataattacttctcaaaggctctacctcccaataccatcactttaggagttaggatttcaacataccaat

SEQ ID NO: 126084 - DNA, 1022 bp, Homo sapiens
ttttccattttattttgagaaatttgaaaagccataggcatattaaaaagtaatacagtttacaccatttaccattcattagatcacaagttgttaacaatttggtttagtgtatttactttctttgtgaaccattttaaactgagttgcaggtgtcattcctacatattttgacgtgcatcttctaagaataaggacatctctacctaccacaataacatttccaacctaataaaattaataattccataattacataatatctgattcaaattcagatgtttcccagttgtttcaaaatacttttatacctcccagccccgggatctagtcaaggctcatgctttatatttggatgtctcttcagtctcttttaatttagaacagtccccttcattttttccccatgaaattttttttttaatatttaataatagagtattttaattaattttaaatagagtattattaatatttaataatatagagtattttaagatagaaaaatagtattatttcagttaatgttgcaaaaatcttttttttttttttttgagatggagtctctttctgtcacccaggctggagtgcactggtgcaatttcggctcactgcaagctccgcctcccgggttcacaccattctcctgcctcagcctcccgagtagctgggactacaggcgcctgccaccatgcctagctaattttttgtatttttagtagagacggggtttcaccgtgttagccagcatggtctcgatctcctggcctcgtgatccgcccacctcggcctcccaaagtgctaggattacaggcgtgagccaccgtgcctggccgcaaaaatcatttttattcaagcttgggatcgttgtgaattgtatttggaaatactttaagtatttattcagaaactttataaccggtgactttgtacaagtaggaatatattctgtaggctaggatttctcaaatctttattaatcttattggataaactttatagttttaaaaaaaaaaaaaaag

SEQ ID NO: 126085 - DNA, 1575 bp, Homo sapiens
aaagaaaatttaaggcgtcagaaatgttcttctctatccctaatgatcactttttgtccccatctctctcctgtatcatagggtatacacataaaaattcttcttattccccttaaattcacttttctttttccacacctactttcttctttccctcaaacatgcatgattctcttccttcttgaaagttgctttcacctgaacctacttcttttagctaccatcctgtttctttccttcctttcacagccagatttcaaaggtgagtgggagacacactctgctttctctttttcactcttcataaaccttaactttttctgagtttttgatctgtttccctgctctgcagcatttaattcttgactacttttcattttaagaacaaataggagttgaaagagcataatggagctataatgaaggtcagtaaaaatgcaaggtattattgatatcttatcattgctgtggaaacactcactggcctccattctgtgatccagacctgtgtcttagtagtagtactactaagattcagaaaactggcttctaactctggctagtcaccatgagacgttgggcaagttagttaactgcatcaagctccatttttctcatctgtgcaataaaaaagtacctctgcctactttataaatttctatgattatattaaataattatataagaaggtagctgggaaattttaaagcaccatacaaaatgtatgtttgtattatttttattattacttctcgaattgctacctcactatcttttcccttttagatgtatttcagtgttctaaggtgatcacatttctctaaattcattctcagatttcatccattctttcagaccatttaattcttttcagtgagatgattttacatattctcaaatagatactctaagcctttgccttcccctaagtagtttcaagttgcctactaaacatttcagtcacttatcttttgtatgtagggcactttggagaatataaagacactgtccctatcctcaaggagcttccaggctgatagagaagaggtgtggataaacaaggatggaattaggtagaatgaaataagtcacaaaaaagaagcaaaaatagaatgctaaaacatagtgggaatatagagaagatagattttaaaccgtttcagaggcataatggaatttaacctgaacgaaatcaggaagggggaaaggatgtcttaagaatagcaaagaatattgtggctttgatttgcatttctctaatgatcagtgatattgagctttttttcatatgtctcttggctgcttgtatgtcttctttagaaaagtatctattaatgtattttacccactttttaatggggtggttttttcttgtaaatttgttaagtttcttataggtgctggatattagacttctgtcagatgcatagtttgcaaatattgtctcccattctgtaggttgtctgtgtactctgttgatagtttcttttgctgtgcagagcagctgtttagtttaagtaccatctcacaccagtcagaatggctatgattaaaaagtcataaaaataacagata

SEQ ID NO: 126086 - DNA, 1053 bp, Homo sapiens
gaaaatactggcggcaaaaacaatactaaaagaaatcacatgcagccgggtgcagtggctcacacctgtaatcccagcactttgggaggccaaggtgggcggatcacgaggtcaggaggttgagaccatcctggctaacaccatgaaatcccgtctctattaaatatacaaaaaattagccgggtgtggtggcgggtgcctgtagtcccagctacttgggaggctgaggcaggagaatggtgtgaacccgcgaggcggagcttgcagtgagctgagatcacgccactgcactccagcctgggcaacacagtgagactccatctcaaaaaaaaggaaaaaaagaaatcacatgctttaccaggagctaaataaaaagaggtagagaatatagttcagattccaaaaaagtatactatagatttggaaaaggcaaaggcagtgaattttagttgaggaatcccaagtttatatttgactgtatagttgctcctttttgtggcaggggtgtttttttttttttccccctctaatgaaagaatggtaatattttcaactattacataaaaacaaaagcatggcattgtatttaatatgctttggaatgtacctatgtttcagtaccatttttagttcctaaaatattacctttggtaagttactttatgtctctaagggtctgtttctttatctatacgagatgggcttaaaaatggtaccttccctaatagtaaaagaaaaattacaagtaacgtgctttgagagcacataatgagcactcaataaatcttggcttttaagaataagtgttggccgggtgtagtggcccacacctgtaatcccagcactttggaaggccaagaagggcagatgactggaagtcaggagtttgagaccagcctgccctggtgaaactctgtctctactgaaaatacaaaaattagctgggcgtggtggcaggcacctgtaatcccagctgctcgggaggctgaggcaggagaatcgcttgagcccaggaggtggaggttgcagtgtactgagatcccaccaccgcac

SEQ ID NO: 126087 - DNA, 2349 bp, Homo sapiens
gaacaatttattttatacttaacaagttttcattttctaacatgtatttttagatgaaaacatgcagatgtaaaccttttatatggtagcataattcttcatttttctttttcagataatactaaatacacatataccccaggatgcccaattttttactgcttacaagatattatgcgagtctgtagtgaatccagtactcattttgctacacttacagcaaggatgttaatagccttggataagtaagaaatgccgttagaagtatcttttaattaatcaaatacatgtttatagtagaaattagttgtcatagatacagacactttgagaagaaaataatgaaaataatatatgtattaaaaaatggtaagtttttcaattctaatataaaaatgaaaaacccgaagataaggttgtcctggcctgggtacagcatgttaattttatttttcagaaatggtaaacactgccctggcttaagaattaagatttacctgttatgaaactatacatttaatattgagttactcttatcagtgaagaagtcattcaacctcttatgcctttgtctttctgtaagaacagggctaatgtcacctacatctcagtagtttgaattttaacagtacttttatgttttttgaaaggagtttttattactataatggcacatacatttaaaaaatttatttgctgtatccattaacaaaacttttattaataaatgaagtatttgtatactgacttgatctttatagatcatatgaacatattatcacatgtgcccctaaagtatgtacagtattatgcatgtttttttgttaaaaaaatcaatttgcaatataaataaattttaaaaataataaagtacttaactaacactaaattaaaattataaaaatctgaaggtaatattcacaagtgtcatatatcagagttagatagtaatctatctttttcatcttcactttcgaatggctacttctacctgtttttttattttgccaggtggttagatgaacgtcatgcacaatctcactttattccagctttattccgaccttctcctcttgagcggataaaaactaatgtcataaatcctgcatatgctactgaatcaggtcagacagaaaactcactacatatgggctatagtgcactagaaataaagagtaaaatgttagccctagagaaagcagatacctgtatttacaaccctttgtttggatcagatcttcagtatacaaatcgggtaagagttgaatgaattttagctctgatttaaaagacgttttatctcaagtgtaattttttttcctgagatatatacatctattactaattataaacatgaaggcctggtacagtggctcacgcctgtaatcccagcactttgggaggccaaggagggcagattgcctgaggtcaggagttcgagaccagcctggccaacatggtgaaatctcgtctctactaaaaatacaaaaattagctggatgtggtggcgtacccctgtagtcttagctaccccggagactgaggcaggagaatcgcttgaacctgggaggcggaggttgcagtgtgctgagatcgcagcactgaactccagcctgggcaacagagcaagactcattctcaataaataaataagtaaaaatttaaaatataaacatgtaaacattaagatgacaaagctcttaatgggtttttgttattgttttccctttctaggtagataaagtggtaataaatccatactttggtctaggagctccagactactcaaaaatccaaatacctaaacaggaaaaatggcagagaagcatgagcagtgtcacagaagacaagtactgtttcggttttactccacattgcttttataaaaacttacattctaatttaaagtattgtttaaaattatatatgcaatttgtatgcattgtagtcactattgagtttacagcttcttagtgatacagagctttcatagatgtgtcacatttcttttgaaacaatttttacagtcctgttgtatttttcaaaatttctttttaatgattagggaacgacagtgggtagatgattttcctctccaccgaagcgcctgtgaaggagattcagaattactaagccgtcttctcagtgaaagattttcagtcaaccagttagatagtgaccactgggcacccattcattatgcatgctggtaaatggaatatttattcttttctttttagaaagaatacattttttattataaatgttagtccttcttttcaagactgttctcattccaaatactttttctctacctgtttgccttaggagttttctgttttgatctta

SEQ ID NO: 126088 - DNA, 1461 bp, Homo sapiens
gttgaatgtagcggccagagaggcactcgcggcagcccgtacgggtgggacctctcggtgtccttcgggaaacaggaggagcaagttcgactccagcgagggaaaacggaggtgggagactgaaccatctccacatctagttgccccaggcaaggagtttatttttcacatgtagttacagagaaaccatagccactttttgggtggaaactctttgagcaaagaggcttacgtttttccccagtagtggacgttgacgggtggtggcgcaggaaaaaacctcccaggcagagtgattacgtatttttgtcattgcagggaaagggattcacagcttgtcattctaactcacttctccccctgtaactcacttctcgcctctacacttttctccaccttttaaggtttttggctttcatcgctttttctacatgtttttagcctcaccagaagtctttcatctcggtggtccaactcaggatctcagcctcattattttcttacccttctggagtgcatatgtgcctttacagtttctgtttgcaaacgctgtctagcatactaagaggatgttagcaaacctgttccatggacactaaatggcagttgtacatctcccctcatcagtcatagtgacaaccagaaatgccctccatattttccagtgatcccaggtaggtgccacccccctaattaaggaccacttccactgctttatttataagatcttattacttagggagcatattatcatttgtgcctaacattttccagaatggagtgagccatataacaaaatgccacgtttcctgtacttattcacttgaaccctcatctcagactcagtctaaacatattgcaaactctagttatacctttcttgtattttagttcaagctactcattttctatcagtttgtctgtgtttctcccttagcagttttaccttcctatgttagttacttttgttattttcctgttaagcctttgtttccttctttcatgtcactggaagaatgtagattttaagtagtcaagtacgaatagttcttgaaaatgaattttaagaatattttggggatatggtaaaaaagtatttggtttaagaaaacaaaatactgttactgtcatagttatgtctttttaaaatcacatttgtttaccttttaaaagttcaggcttctgtgcagtattaattaaatattctagagaagtgatgagtattgacaaagtactttgctagtaaatgttttcttaacatgagttgaccaagacaggaattgatttgctttaaattgtctttagaaaagtaagagttacttgatttttcttttaggtccttaatagataaaatggtttctgtaattgtgcccatatatcatacagtgtattcacaatacaatgtctttctttttggggcttgcagtcttcaatgcgtctgtctcataatttgtaaacgtt

SEQ ID NO: 126089 - DNA, 1830 bp, Homo sapiens
tggggggcgcccacccagtctgagcctcgccgcgggcgccttcggctcacgcagcgcttcccgcgggccgccagtgcgcaccctcggccacatcagcctccgcctggcgggtgcacccgggccggcgaggaaggggcaaccgtccgggtgggtggggcgggctgggtacctgaggtcaccagctcggctgtagaggcaggggcggcggaggcggaactgcggagttgctgggtccaccgacccttaccctcagcgagagaagtaaccgtaagtctcagcttcgcggtacagatgtgtttgaggctgcctctacccatttgtggctccgagttcagagctacctacttcacaccctcccggatctactaggagtgtgtctgtcgcctgttttggagcattgttgttctgtctgtccccatccctgaacaggcagcattctctgccctacagggcttttctcccagcgaatttgcaagcctccgggtctccgtgacgcgtcccatcctccccatctggatgcatctccttgtccctctgtcctcaaaggatctgtgtccttcctcgcagcctcccccccacccccatcctttgagacgtggaaagccacgggttctgccgacctcgggggctagagagagtcttgagaagcggatgggtaaaagtgctctgcagggctgtgatgggtggggataggtgcagatggctccagtgaacctttatttttgcagcttctgccaccaaaacaaaagaatggagcgctcccctgtattcttattcttctccgtatgtatgagctgtttttctgtacgtagctgtttgagtcgcaggaaattgaaactagagctgtaataaagcatctcctgaggagattttgagaattagtctcccaagctctattcacacggaatggcatatcgaacaatcttgtattggaatgaccatttcagaagagctttactggtagatctgacagataaatgtaaagataagagtctgctgtttcaaatagtgtattttagatacctttaaattttagtgttctaattttcatctagttcttaatttgtgaagtatgtgggtatgtgtaaggtgtaaaaatctgtgtattggaaggttttgctttgttacaagcttttgctttgttgcttttgagacagacgtttaaagatcatattagattgtatttgataattattttcaatcattaattccagagaaatctttttttgtatcagccactcacagatgttacacaccttggtgcctatgaccctcctgctgcttaaactgtgaatgtcttcaaagtatattttcagatttttgaactaggcgttttttctcattagaatttgatttgcttttcaaactgctcctgcagaactttccagaaattagatttaaaaataattttaatgctgtcagtgattggacaatagctcttatatgactttatgcatttgctacttttcagagcaccataggaagcaaacgataatttaagaataattttactgtgtactgcaggttgtcattctgcaaactactgtgtagtgtagactggtagctttggtgttttgtgttgctgaaaaacattgtcatttcattaagaaagatggatgtgtttaatgacttttccccccaacctcctttcagcagttgattttgggctattatctgatttgtaacttctcactgttcacagattttaatttgaagtaggctcaggagatgtagctccaactctgtctctggaaatgtacttagcacagaagccaagcactgtgcagagttgagtgtattattaagggtgtggcttttgctttctgtaaa

SEQ ID NO: 126090 - DNA, 1029 bp, Homo sapiens
ttagcattatgttcaataagtaatacttattcaaggtgttctgtgtgccagtaactatggtaaacaaggggtataaaactgaatatggtgtgattctcatccttaaagagtttaccagataactcaagaagcagataaacatttaattatagttttagatggtaagttgagtgtagtatcaagttatggaggaaggactttgaagttagttgagggctggggagctattatcatgaaacttgatagagaaaacaacttttaagctgatacttgaatgagtagtaggagttaccgttttcaggaggaattggtagggaagaggagacaacattctaggagctttagtagtttagtgggcagggctgagttataagtgataggctgtgaagagatgaatcctggtcttagcagggacttttccttagagctgagaaccttaagaaggttttaaaatggaattggacaagatcagatttgccttttaataaagttaatttggttatagtagagaaaattcagttgggggtgggatctggaagcaagggccacctattaaggagtttatctaatacattaaaatctattccagtattagtcaaatatctcttgagcacctgtgtaaatacaatgtgggggaatgcagaggtatgtaaaacatataattcctattttcaaggagtttgtattttaaaataactgagaactaggtaacaacaatatgaggcagtatactaatgttacggcttctatcttataaaatgagggcaaataaggctagaattaagacttgaagccaaaagatcttcatggctacaaagcccatattctttctaggcatgctacactgcttcccatggcacttattaccacttgatttattatctgtatgttacctcagaacccttgtgacataagattagagtacaattaaaatgattttcaacttggaataccaagtatcatatgatctccactctggctttctccaggtagtctctgttggatggaatataaccagaaaaataaatg

SEQ ID NO: 126091 - DNA, 1071 bp, Homo sapiens
aaaataaagattattctatctttcaaccattctaactcttaaatctgttaaaccaactattgaaactcaggccttgtaaagatggctaatttattctttgatctttctctatttctgtaagaggtgtgtttgccatgtggtgacattttcttacctgtatgttgatgcatttgagtaatcttctgagagtctttcttgctctgaaatgtgacttgacatgatatctacagaattacttaaaaaaattaggatatgatattccgatttgaaaaacattacttttcttataaaataggaagaagtaaaaagggagaataaaggttgggctgataatttggtattataggatgaggagaaacagggaaactcagaggggatacttatcttttaactacccaaaaactctgaatgtggattaaatgtcagatgcataaggcaagagaaaatgaaaaataataaggttccaattcagggattttatagtctagtagtcttttctactgataatccttgagagaattgagtgttaatgtcctaagccagaggttctcaaagttaatgtgtatcacactcacctggaatgcttgttaaagtgcagattgctgggcctcacccccccaaatttctaattcagtaagtctgagtgggatctgagagtgttcatttctaacaagttcccaagtgctgctgctaattgctgttgtcttttgtatgaaattaatttgtttctctcctgtgtcttagaatggtactggttatatacgatcattgggagaattttagaaatagttcctcaaatcatttttctgtgtagtgagaaactctgatggagaaacttaatttttttaaaaaaattgatgaaattaattataattccaaacttcagctcataagagaaggtaaaaacaaaattgaatagacatagaaaaattaatctggcagccatttgcaggatgggttggaatgggaaaagacagagtgtaggttctctcatccatctgctatctagattatgatttaaataaaagagatcataaaagagatctctccatttggaattttttgccctta

SEQ ID NO: 126092 - DNA, 1034 bp, Homo sapiens
ttactctctatgctacagtaacactggcctcctttttgttcctcgaacacacagggtatgctcctatgcatgcactggctatttcctctatctggaatactctttcccctagataccacatgactcactacatcaccttctttagctcgttgatgaaacgtcactttgggcttggccggtggctcacctgtaatcccaacactttgggaggctgaagcaggagaattcacttgagtccaggaattcaagactagcctgggcaacatgatgagacctcccctctacaaaaggtaaactaaattagctgggcgtggtggtacatggcggtagtcccagctgctcaggaggaggctaaagtaggagaatcacttgagcctgggaggctgagggtgcaatgagtcatgattgtgccactttactccagcatgagtcacaaagcgagaccctgtctcaaaaaaaaaaaaaaagtcattttggtaaggcttttgctggctacccttttagacattgcagcaccacaaaactctccttgctggctttatttgagaaagaaacaaaaagcagtgattttagtttattttgttcctgctgcattccccttcgcctacaataatgcctagcacatgataggtggttgataaatagttgttgcaggagtttattattttagctgtgaagaagagtattcctttcctctgagaagtacacttgaaaaaatcctgtaactctagcgtagactaccagttattgacttccaacatttactctgctttcctttttctaaaattgataaagtccaaacctctcttgtttggatttgaaattactatgttttttggccgggcgcggtggctcacgcctgtaatcccagcactttgggaggccgaggcgggcggatcacgaggtcaggagatcgagaccatcctggctaacacggtgaaaccccgtctctactaaaaatacaaaaaattagccaggcgtggtagcgggcgcctgtagtcccagctactcgggaggctgaggcaggagaatgg

SEQ ID NO: 126093 - DNA, 1059 bp, Homo sapiens
gcataaatcctttcattctctctaaggtatatgagttattaattgctattgactgcaatgattcctaacactcgtagtgatattttggtatgcattttgcttttagatgactttatgtcatgatttataactttaaagccatagctttttttcatattctccaagaaatgttaatacctctttcttcctttaagcctagattgagagtattgttcctgttttgattttgagggttttgttcattttagtatttttgtgtagctagtgcttaataactgcgtgaattggaggagttaggttccacagaagcaccttgctctcttactcaaacttgaattttatgtgcttgctatggaagtcatatgcttcagatatttcatttcaggtattttgcgctagtgtcagatcatgttttgaatcatgtcctaacttttctatttgaaagagtcattgtagcacttaacgttgatcctgctgccatttcttcaggatgtagggaagcgcagtgactctaatctcacttcttcgtatcttaaaagagataggtgttacaggctgttatactgtgcccttcattacttcattaagatatacggaaaataagtgaattcgaagacattaagtcaaatacataggattcaggttcttatttctgatgttggagaggtgctagtctcagactagatctatggccttggcaacagacagtagacatgggagctcttaactccctcctaaatgtaactgttatattttgttgctatggcaatagaatgtgcttaatgctaagattccatatctatagctgaagatgtatgcagtataaattaattctttttctcatatccaagccaggacttgaatgtcaacatgcatagtaataggggctttgctgagaaaacagatactgctacatgacttaagataccctgtaggaaaaaaagcctgggttcaaagataaacacaactttacccaaaatagtgataaattagaaccaacttaaatgtaaagcaaaaactgaattatctgtatagcagaatttgattattattaaaatg

SEQ ID NO: 126094 - DNA, 1055 bp, Homo sapiens
aaagaaggctatatacatacaggaaagagaagaagaaaatataccagtatgttgacactgattaattcaggatttggagattataatgatctttttattttcttctttatacttttccatataattcccagtttagataactatctataattttattatttttaaaagaaagaaaaaagattttagaaacagatacagctgtgtgattctaggcaagttaattagtgatcacagtgatgatggctacattttactgagtacctactatttaacaaacattgtgtgtattttacacattttgtcacccttacttcataatggccaaggaagggaggcctaattgtctacctttacatattggaaaaaagacttaaaaactttaagtagcttgtaagctagtaagttgtagagccaggattcaaaccaagatttgtgttcataattttctcaatatactataaggtctttccaaaatgattaaacttccaaaatctgtgatttcttattgtaaaatgtaggcaggattgtatgggaatgaaatgacaggaggtacataaaccacaggattaggtttttacacatgtattcttcaagctttattattaaatatgttcatttaacaacattatctaagatttaattctgtaatattaaacctgtaagttgcatttcttcaaagaagagcaatgttaatccattggttaacattttgtcctgtttttgtgtttacacagtacagttttacagtcagtttttgaaaggttggatttcataaagataaatgatactgtgttaaaagaggtaaagcttatatttcccactttccttaaaacatgtcttaacaaacctgatattttgctgggatttgaagggacctctgttccttacttgagttctgaaccatgtgagtagccaaaacagtaagcatatccagttttttcttcccagatttggtaatatctctggggtagctaaggtcaggaatattattgcaaatggaaaagaagtattactgtcaatacctctctcaagtttcatacttttgtttagaagtt

SEQ ID NO: 126095 - DNA, 1049 bp, Homo sapiens
ttcgaagcaaaatcagcaaagggaaagggttcatggagtgaagcccagaggaagccaagcacaagcttccaagagtcttcttcccatggaatcatacaatacttatgtaatttacataatttatccagtgttgaattatgacaatgtgtatgaaatgtaatctgccaaagaagttccttagagactcggtgtccaaggttttgattgacagctggtcacataggtaccttctaactagcatgtaccaatattccagactttctgaagaaaagcaggtgattagcatatactgcattatttatacaaacaatttgggcactttgaaggactcctatcagttagggtggtgggaaccctcctgaaatccaagttcccagacaccagccatggatcaaccttgcaagaggcttttctaaggatagccatctgaagcctgctatgttaactcttttccatataataaagtagaatgtcctcagacaaatggggctgaaattgtaatattgaataaacttagtttaacttaataaattcatttaggttcagcaggacaatggagaaaaaaggagagttcctaggagtgaaatagttttgtactctgacacaatataatacctctagattttcccttgtagtaataataatgggtaataaacagtacctaatggtggaggacacagcaaaattaggaagactcaatgactttgaaacagtgggtggtggagcgagttcttttccagtgaatataatctaaacagttttgtacagcagcaatttgtagttgttctttgtagttagtttgagaaagggaattgttgtcttttaatattattttgtaaacttgtactaattttatatgtacataattattaaagatatattagagagaaatcagttccccaaagtgtaaacatagaattcactttttaaaaaaatttcaagcatttaacactgcttaaaagcagtaaaaattatttcaaaagatatttgactatagatttctaaacttcgatacatagtgtgtaatttttattttttctttaatagaa

SEQ ID NO: 126096 - DNA, 1009 bp, Homo sapiens
tggtcttgccaagcaatccacctacctctgcctcccaaagtgctgagataacaggcatgagccaccacgcctggccagcataagtactttttgtgtctgtcttagatgcatcagctttgagaccttggcttcctaattccaagataaacccttccagtttaacatgttcacttatatttttgcattaaggacaatacattattcaaaaattatgaaagccaacactgaatagagatgccgaagttactaaaattacactatttgccaacagcaccacagtgtaagagcttgaaatgtttacttttcagtcactgtataaaatcctgaattcaaagtttgaaaaatagttgtgaaggggaagttaaagtataacacaacattttgagtagttgaaaagtcaaatgtttaaaagctgaatactgcctatgaaaattttcagctatctgaaaatttacttatttagagagctgtgatcattataggtaattgtgttttcatgggaaataaaaaagtaagagtcatgtttcatacagtagttgtattccaagtttcgacagttttctgcttgtagacctcatgctagctattttcagtgttcatttgccagtttgtcaaaaagaggcaggcttttgaatatagcttttgcagctattttcatttcttctctaactacagtatcattttttacactgtgaaagctatgtagatctaaaagatatctaagaggagccagaatatattgtattatctccttgcttactgagaaacctcagacagccaaactgccatagatatttttattactgtcatgataatacttttgtgtttatgtagccattttatttggaatgctgccatgttaagatactggaataacagaaaagtgaattttaattctggaatttatattatagggaagttgctttctcggttaaaatatttttctcagctcaggtaattttcgctaccctctaatacttggaagttttcctgcaaactgggtattcat

SEQ ID NO: 126097 - DNA, 1056 bp, Homo sapiens
gaattagaagcccaaaataaggaattcttttcgcctgtttggtactccagtacttgcctcatgaagctctatacatagacatattttggagttccagaaatattacttaaggttttgattcaaacagagggaacagtcacctcaggcaataatagctgtggctagggaaaagtaaaaggatacatgtggcaaatttctaggcaaggtttgtgaagataaatctgaggggaattgagctgtgaccgtttagatgatgcatttcttagtgactttctggctcattgatcaaaattttaaaatgaaacagatatgaaaataactgaaagccacaaaatgacttctcaatgccattatccttttcaacagagtaacagtaatatttaatgcacatttagagtattatagattttttttaaaaacttgttgctttaaatgagtactccatgataacattactttcttagatatttcttttttttacttcttagatacaaattatttttcttatagaatatttcactaaagtagtaatataaatctcagaaaatgtgctatttattaatctaatccagaactttggaaatgtttataatttgtgttttattctatcaaggaccaaaacaactgaaagtttcccaatagtagctgtagtatattgtgtatagtatgggagagaaggatttgctcctcttattggatgaaacaataaaagtataatattttaggctaaaggtttagcaaccctctgaaaaattaaataaaaacttaactatgtcatatgatccaattaatatatacatgtttatgttgtgtatatgcatacatattttatacacacaaacacacacatacacctttaaatagggtggttatgtatcaaaatgctaccagtggttttcttgcagtaaaccgtgaggtaaaccatgagcttttaaattctttctctttgttcatatattcaaaaagctctactgtatgtatgtatttgcatatttaaaattaaaaaaatcaataataacgcttaaaaaacccaaatggtgacctcattacatatag

SEQ ID NO: 126098 - DNA, 1049 bp, Homo sapiens
taaagtgtaagttccttatctggtcccaacctattttttcttttatctcttgttaatctaatgctagagactctgaactctattcatacttaactgttccttgtgtaggcctttttttcatacctgcctttgcatatgctgttttctttgtcactaattttcatcatagctcaagaatagatccagaaacaacgtttattggaatagaatgaaactagcatttattggactcattaactaaggactgcagtaggtactttaagtaactcttataatcctcacagccatacctaagaaatggtcattttccatgctgtacagatgggaatctgaggcttttaggggatgaataacttgcttaaaattacataactagttgtaggcaaatacggtattttgaacttcatgtccagtgtttgtttctatgaccttcccccacccacttcacattgcttcagtagtaaataaattagcaatcacattgcccatgtgatgattatcataacctctttccagacatagtatgcataaacatttgatgttttcagacttaaattctgtatagcagaaagaaataaatttaatggtcttaaatggtagaataatcactgtattgttctgtgtattatcagttttagtacttttctgtgataatctaagtatcattgaattgtgtattcctgtatgtttacattttaagtcttttctgtgatgtcctcataaagtactgagcagtttcacttttcctttactgcattttaacgcctcttctgcagttcttgtttgggcaaaatttcctacatttttcactatcccacaaattggctgagtaagatttatacataatttatacagaaatttaagtgttttcaaccataaaattcagtcaagctcattttctgccatgtgaagaggaaaattgaaaagttttatatatagataatttttgtaatccgaaggactgcctgtgaaaccttaacagtctctgtgtgggaaagtgttaaagtttaacaataagttaatttggacagtgttaaaaatttgagatt

SEQ ID NO: 126099 - DNA, 1050 bp, Homo sapiens
attaaataactatgtatgcaacaaatagatcagagcaataaaagaagaattaaaaattagtgtggaatgcttaatacacccttaggcatctgtataattgacattaatctgtaaattaccactgtgttttcttttcctgtccattcctcacctgttatatttctcatcttccttttttcttccttttcccttcctttccctcccttttaattagcaagtagtataaagatatttacatttatttttcttagtattgttattctagaatagagttttttaaaactaagaattagtcattcaagctgttgtaaaccagaccctcagtataaattggattatcagcttagaagtagagtttatcttttaaaagtgttatcttcaatgtatttcaaggtagaaaataagtgattttcatcctttatttttccctttctttccattttaggacttttcttggtagagatggaaatccaaataaacggaatgtgcacaatgaaacatctatgcatttgttgtgtatgggacctcaaattatgatatctgaaggagcccttcatcctcgcttggcacgccccacagaagatgatttcagaagagcagattgtctgcagatgatcttaaaatggaaaggagcaaaacttgaccagggtgaatatgagagagcagctattgatgctgttgataacaaaaaaaacacacccttgcactatgctgctgcctcagggatgaaagcctgtgtagaggtaaattttttttttttttaatattctgcattgtaaaatttgtatccaggtgatatgtaactgtcaggtttttttttttttgattgtcttagtaatttggtcattttttttctcttttgtcttctaaaagacccttttaaataaagggcctcttttttttttttttttttttttttgagacagagtcttgctctgttgccaggctggagtgcagtggtgtgatcttggctcactacaacctctgcctcccaggttgaagagattctcctgcctcagcctccccagtagctgggactacaggcacgcg

SEQ ID NO: 126100 - DNA, 1052 bp, Homo sapiens
ggctatacagaaacaggcagcaggtttgatttggcctaagatgactccatacttgaagcttattttaaatatgtaaaataacattatcaatatgtaacaggtcctataagcttcagttatacaaaggacttaaaaagtactatgtaatggatactcagcacacaaaaataaagctccattaaaacataagtctgacaaaaatttaataaataatatactgttcttagttactgagagtttttgttttctacttgggaacaggaatggacttgagaggggtggtgggttaggtctattagcatggcttagtaaaacatccagtgatatttcttcctttggtagacttccatagagcaaccctagtcattaggcctcattatgtttccattagtgcttaacctgtaatagtgattcagtaaatggtgaatgtgacaggggttgtttttgatagtgctttactctttgtgaaaagcatttttttaaatgagtgttatcttagatatttcctattcagctgtgccctacttgcttattcagagttttaagtgtagctgcttcatgtcagatcaaatagaggtcactataaaaccaaaggtggtaagtcacacttttcctttacagctacagggcctatttgacactttggcagctatgggagcgtttcacacttcattgaaaagtcgtaaaaaccattcacaggtcagactgaagaatattacctaattatattgtgtttttagcacctagagttttaaaactgtgtaaagaatacaggaattatatttccggttcagtagctgagtaactttgcctgtctgggcctctgttttctaatttttaatcaagatacttatgatctcattattgtccctcaactattatgatgctaaggcctatattaactatttaggcagtgactgttacaggtattgaagagataattttttaattttacatatcctggaagatttcatgggtagtagtaagattggagtgggtaatatttcagtttaagtatttggaggaggctattcaaaatgtggctctcagac

SEQ ID NO: 126101 - DNA, 1027 bp, Homo sapiens
cttaaaagccttgctactcaaaagaatcgtccttagactggcattgacatcagtcacctgagaacttgttggaaatgcagaatctcagctccatccaagaccaaccaaatttgaatgtagtttaacaaaatcccaaagggattcttatttaaagcttgagaaccctagcttggggcataatttgtgggctacctatattggaatcacctgtaaaaagtatacatacctcttacagtcccctctccatatctacctaatatgactatcaagctacccaaataattcttacacagtttgaaaacctttgtgctagaacagtagttctaagcatggctgcacagaaacctcagaccaataaaatctaaatttgtgagaggggaccccagacattggtaagttgagtaccaatgtattagaaggagtgataggagttagaagattaatgcgctaattctattgtgaactgacaaagcgtctgggtttgtgtggtggtactggagatggaaagaatgaggcagatgccagggacattgtgaagaactgttagcctttggtgactcagtcagttgataataagaaagcaagggaaagaaaggttaaaaaaaaaaaggatggaggctctataatgtttaatattgacaatagtgagctctctctttttgatttgtgtacattctctatacctgctatcacatctataattagagtaaaattaattaactttatttttaaataagatgggcatgattttgagcccaagtgacttcgaagcctgctaacaattaacagacattagaaagtaaggtgaaatggagaaattggttgaaaggaagagagaatatattgagttttcatttagaaggctagatattgacatcctagcttatccacatgaaatggtaggcaggctgttgataattacaactaaagtgttagggaataaagaatatagacactcatttagaatttagaattgagtgttatctacatagagttgacagctaaaagcaagataatgtatagatga

SEQ ID NO: 126102 - DNA, 1034 bp, Homo sapiens
ctgaatatgctgcattagacaaacgagaggtcagtttattttttcttctcagtaaaaaaattacatgtaattttagattttatgttgttttgtatttttcttctttaaaactcagtttgtgtgttcttctttacagtattctaaatatcctgtcatcttcatagccataaagtataaaaatacatctaggccaaccacagtggctcatgcctgtagttccagtgctttgggaggccaaggcaccggagttctgagaccagcctgggctatagcaagactctatctacaaaaaattttaaaaatttgccaggaatggtggcccacactcattgtcctaactactcaggaggctgaggcaagaggatcacttgagtccaagagttcaaggctgccatgagctatgatcatgccaggacactccagcctggcgacaaagtgagaccctgtctctaactttaaaaataaataaataataacatctaggaaacctggagctatgggtcttttgtctatcatatatgagtgtgtttacttacaaataaataaggtgctgatgtgagatatgaatcccatttactcctcctactacaagactccagtcctcctgttcatcagtctcaccttctcttttggattgatcatatcaacaaacatgctttggtagatcccatcttaaaaacaaaacaaaaaacataaaagcagccattgactcaacccttccctagccctgtctctcttcccctttagttgtagccccatatcatcttcttatgagagaaccacttcctcactttccattcactctttagcccactgcagtatgactttcttcccttctactctgatggaactgccccccgtcatggagtgacatgttgccaaatttagtaggtacttttctgccctcatcttacttgaattcctcagtggcacttgatgcaattgaccaatcccttcttaatgaaacactttcctcttggctttggggacaacattctcttctgattttcctttatgtcttcccggtctcaata

SEQ ID NO: 126103 - DNA, 1001 bp, Homo sapiens
atgattaaatcaagctaattaacatatccatccctaactcacctatcattttttaaagatgagacatttgaaatgtactcttattttgaaatatacaatacattattattggctaaagtcaccattgtgtaatagatctcaaaacctattcttcctgtcttatctgaaactttataccccctgtttatttttcataggacctatcacatgctataattattttatgtattttgtttacttgtttattgcctttctctcctattagactgtcaattccatgaaggctagagccatatctgcctattcagcagactgttttcagtgtttgaaacactacttgcacaaaacaggcatccatagatatttcttaaagaaattataacacagtaaattttttcctcccaaaaggattctgattcctcagtgtttagtgctaacttgattctaaaaggtattatgtaactactggtttgtacatgtttagaaaaataatcatacaattgtgttgtttattttccccatggattcccaacaatttcggagctttatactctccatatggccaaaagaactgagtttcttgggattaaaatttactttttaaaaaatctttgtttctgtagttaggttattttataggcaagcttattcagattaagtacacatagaaagacagaaggcctatgccctaagcgttttgctggcccttcacatggttatttaatccacatgggaaccttgaatgacagttgtgctctcctccccacctttttttagtgaggaagtaaactagaaaataactgaataacttgccagaatcaaagtgagctgaacttgattcttctgacttcaggtccaaacaacttccgtttgccatattgcctcctttttgacaatccattatcttgcgtcaaacagaaatttttactgtaataattagtgtagtcatttagtcagaagacatttaagcagtaatattccagaaataatattgatgtaat

SEQ ID NO: 126104 - DNA, 1030 bp, Homo sapiens
attaaatacctaagaattgtgctattagtattgtcagttgtatttattttatatggtagctatttctccccatgaagtgcacaaagtgaagttaaagggtcaccttggaaatatattgtcccttttaagggtggttttcttgtttctttgttttgttttgttttttagacataactaactttatataagaaaattttcctaagtgctcagtttaagttccctataatccttatgacaggcattctgggagctctcacatgctggattggatcttctcattgcccacatgatatatgacattttggctggtttcatagaaaagtattttctggtttaaaaatattcttaaaaagataaaggtaaatgcaggatttaaaaaataaaaactaaaaacacatttaaaaagaaaagtaaatggctattctattccagtcattttgaggccctagctggctattttaactataaatctttatgatctatactaaaatagaatgccatcttccaaaatttttatataatcttttgatcagaagaaaatgtaaaactccctattttatcattcattgatcaccactgttaataatgtggtatacaactctccagaatcactaccaaaaaaacatatatatggaatatatatattatatataaaacatataatatatatatacacacacacaaacacactttttttttttttttgggacagagtcttgctctgttgcccaggctggagtgcagtggtgtgatcttggctcactacaacctctgccttccaggttcaagcaattctcatgcctcagcctcctgagtagctgggattacaggtgcacaccaccacacccggctaatttttgtatttttagtagagacaaggttccatcatgttggccaggctggtctctaactcccaatctaggtgatccaccccctcgccctcccagagtgctgggattacaggcgtgagtcaccgcacccagcctaccttcaatatcgatgtttctgacagtctacaactgccattctt

SEQ ID NO: 126105 - DNA, 1049 bp, Homo sapiens
atctttcagcctcccttcactctccctagctctttcaattccactgccactgacttaaggctgtcattacttttcatctaaattgaagtacccagagtcctagtctccagttttaccattcttctttcacccaactaatttctcatactgccactattgtgttcttttaaaatggaaacctgagcatgtcattcccctgctgaaaacccttcagtggcttgctacagacttaaaatcatccaaaatttttggtagactttatgacataatctttacctagactgtcagtcttcccatttctttccctttaccaatccgaattgtccttagacatcatttcttctaggaaacctttcctgagtgtgtcttccgaagtctcagttgggacccatataatgggtctattcctattttattccatgcatatatgtgtcatacacttagaatggaatattacaatattgtaattacaatctctttatttgcttcttttcctttatattaaccttgaagctacttgaaatggcagcttttaatttttattgttaggtattgtttccataatacctaatatatattaatcactcagaaaacagttttgtaatgaatagataataagccaaaaatgtttttttatattttttgaaaatcaatgtttttgttgtaaaattacattttttattgccatgtttataaacttcaaagtaaattctatagaaaaaaatttagacctgagtaaaaaaattaaatttagaaattctgaatagtttttaaaaacaaaatatttttggccgggcgcagtggctcatgcctgtaatcacagcactttgggaggccgaggtgggcggatcatgaggtcaggagatcgagactatcctggctaacatgctgaaaccccgtctctactaaaaatacaaaaaattagcagggcgtggtggtgggcgcctgtagtcccagctacttaggaggctgaggcaggagaatggcgtgaacccgggaggtggagcttgcagtgagtggagattgtgctactgcactccagcctggac

SEQ ID NO: 126106 - DNA, 1039 bp, Homo sapiens
ttacagtggatttatcaggacttaaccccatcgtaagtcaaggagcatctatatttatatacgtacttgtttattttccctacctggaaatatactccttctattttcattgcatgtcaaagtcatatttatcctgttaaactgccaaatacatcggcttaatatagttgaaaaaaaaaaacctcgtgtagaaaatttccagttatttgtatttaagctataaaattttatagaatgtgcctacagtgaataatttaccctttagtcttctcagaaatagtgtgtgatcatgggacgaacacagcctttggaatcacagaaattggtttcaaatctctgtgtgagcttggacaagttatataacttccttcagtcttgatttcttcgcctaaataataattgaaaagtttgctgggaggaataaatgaaattatgtaaaacacctagcaaagtaattgaatgtattagtttgttgtttttaaagggttaggtttttatggctctagacattatagtatgttttacttggcaatttttaaaatgttcacagtaggaagataattttttttagttaagccaggttcaagatcacttaatatagaatttatacctaattcactaaaactttatttataactctaatttcttcggaagtttcttctgctttcaagctgtttattaaatgatttttaggacctgtaattggcattttgacatatctatagtgaactatgtaatcattttacaacttgatgccagtgaggacagttaaaaaattatatatacttttggaaagagtaaagaagctaaattaaacctatgccagcgaaaatgtagtgaattccaagagtgatttgtgagtgacctgttttgattgttagtagaaagtactggaaattttgaccatactgctagatcttgacatggttgtaagccatgatcaattatgaaagcttaaattttgtgtaaaaacgctaataacaagaacatacctagacattcatttgcagttactacttttatatacttttttctttag

SEQ ID NO: 126107 - DNA, 1092 bp, Homo sapiens
ccagctaatttttgtatttttggtagagacagggtttcaccatgttggtcaggctggtcttgaactcctgacctcaagtgatctgcccacctcggcctcgcaaagtgctgggattacaggtgtgagccaccgcgcccggcctaatacttagttttatagcagggttctctccctggaaagtgtggatatcttgagttgctgcattaaaaatacaaagttactctgttttcatagattttgaagggtaggtgtaatgtgaagggcatgatactgaagtggttttttgcaacatgtaatttgatgttggcccaaatgatttgtttcttgtacttcgttttccaaacgcacagttgctgattaatacataaatttggaatttaagggtttgatttttgcattaaaacatttaaatcccacttttatttatagtgaggtagtcatggtatttgttactgaaaggcacactaactgtccttaaaactttgaaagaggtaactttcaaaaacttttaattactgtactagtatttttgccttttaaaaaagtaaacaaaatgtattgttctctttcagaagtacatttctgtttaaatcattgttcttcttcatctccagtgtgacatttgtatgtgcagtatctctgtatttgaagaccctgtggatatgccctgtggacatgacttttgtagaggatgttgggagtcgtgagtatatgagcaccttagcatctcttactgcatgatagcactctgatttgttaataaaattgtttgctttcagtatttaatgatgcaaattgtttatattgacttctgagttacacagaaatgaatttagactttactagtaaggaaaaatatttttgtttttatttttacgtcttccccagctattttaattaatgctatttagcttaatgtaaggtacctttagaaacaaagcaggtatacaaataatttttcttagtattttagtttatattacatctaatgtaaatttcaggcaagaatcagtttgtcttatatcccaggaatcttaagcatttggttttgtgctgtctcaattttttgtgacaaccaagttgccttgaaaa

SEQ ID NO: 126108 - DNA, 1033 bp, Homo sapiens
gccactgtgcccaacccccctctttaacatagaaagtataatattgattattatgtattatttgggtaccatttagaaatttactgttctaatacagctacatgcatgtttctacttaagaattatattcatcaaaaagtgacacattgtatgagaaaacattttaaaattacatattttctgtgcaaacaattacatttttgctttatcatcatttacatggtttttagattaaagaaaacataaattttaaaaataattttgttactaagttaattgccactttccccttaataattttttcagtactttgcagtactatttaaatttcttgagactgacaactccatgcattttatttcactctttttctttctttgctttatagtaaattaccatagaggtacactctgtattagaatttagcattaaaatattttcttttgtgttttgttattgctgtttaaacaggcctttgttgaaaataatcctgccattaaatggtgtcctactccaggctgtgacagagcagtaagactaacgaaacaagggtcaaatacatctggatctgatacactcagcttcccattgctgagagctcctgctgttgattgtggaaaaggacacctcttctgctggttagtataagacaagttggaatcagcctaatcacctttctttccaatagttattaaagactttgcaccttgagtcaggcctttaaattgtagtatacttgatagtattcttcttaatttaagaaatgtgtaagaagtagtaatagttcatatttgttgtgtgcttagtgtgtgccaggcactacaccagctattttttacatattgaattctcccaacaatgctgagttgagttgatgttattatgcccattttacagataaacaaactcaggcacagagaagttccccaggggtatacagctaggaattggcagaaatgggattagaacccagctgtttgatttaaagcccatgtgcctaaactataataccaaattgctgaccatagattag

SEQ ID NO: 126109 - DNA, 1050 bp, Homo sapiens
aatctacacttataggggccgggcgcaggggctcacacctgtaatcccagcactttgggaggctgagaggcaggcggatcatgaggtcaagagatggagaccatcctggccaacatggtgaaaccccatctctactaaaaataaaaaaattagctgggcgtggtggcacgtgcctgtagtcccagctacttgggaggctgaggcaggagaattgcttgaacccaggaggtggagattgcagtgaggcaagattgcgccactgcactccagccttgtgacagagcgagactccgtctcaaaaaaagaaaaaaaaaatccacacttacatgagcaaagcacataataaagatgatgccagacttcagggcatgcagaggctagagggaagcagtcggacattgcggtatcatatgataactgatatagttgagtaaagatgagagtacagaaacaatgacaaactcaggttgggggaagaaagggtgtcaaagaatcttcttgaaggcagtgagctatgaactggagtttagcatctctgcctcgtagtaggtaattactgtcagcaactgaagtggcattgagagagatggcctggcggccatgatactttacaggcttgtattatatcaggggatttaccactgcctgagggctggtcctcagcattttagatctacgagggtcattttgtccactgactcagggttattctgacccacggagaagagactaccatataaaccaaaatgccacttattagttgataatgaaagagattcctttcacttgttgcgaaggcttcatgtccattatcaggagcaaagagaagtggataatctttggatattttatagtgaagcctgattaaacattcttgtcctgttcatgcaccgtttagtcaacagattttttaagccaggcacaatggctcacatctgtaatcctagcactttgggaggccgaggcaggtggatcacttgaggtctggagttcaagaccatcttggccaacatggtgaaacccaatctctactaaaaatacaaaaattaa

SEQ ID NO: 126110 - DNA, 1028 bp, Homo sapiens
tggataaaaaagatgttgatattttttgctttttactatggtaaagagtttctgatcattatatttgcatctggcctgttaagtaaattattttctaaagtaattgttctttctgtaattttctgtgatacaatagttattttaaatggagtaatatgttgcttttttttttttaaatttttttgtgtatattgtttttgatcccagtttatttgggcacaagtttatggagaaatcgcccttaaaccaggtttcacgaataggtcttttggaatagagttccttatcttaggctattcaaaatgaagcagtttaaaagtgttgccacagaccctgatcagaaaataaatattttattaaaattgagagacagcctgcaaagaaaagtgtggagggtttttttttcccccagaagttgtacactaaatcatttatttttgtgattgtgtttaatatcccaaagttgtgggagttagtgaagcctacgaggatgccgccaattgtctctggttattaactaactccaagccttgtgccaactgtaagtctccaatacagaagaatgaaggctgcaatcacatgcagtgtgctaaggtaagaagttaaagaggattttgcatgctttgcatttggaatcttaatttagtttgattgtcaatccaaaggataaattatttgagggggcctggtgcagtggctcttgcctataatcccagcacttcaggaggttgaggcaggaggatcacttgaggccaggggttcaagaccagcctgggcaaaacaccaaaaccccatctctacagaaataaaaacaaaaacaaaaaggtaagtgtaagaacctatggtattcaaccagaagatcagaaattcatgaatccttccttgctagtcaccttccccgctagtcaccttccccagtgagagtcttgagagaggggtgtgtgtgtgtgtgtgtgtgtgtgtgtgtgtgtgtgtgtgtgtgtgtgtgtgtgtgtgtgtatcaaatgattaacaaagtgctgccttat

SEQ ID NO: 126111 - DNA, 1129 bp, Homo sapiens
ccaggaccccaacatcaatgacaatcttctcggcaacatcatggcttggtttcatgacatgaaccctcagagtattgccctgattcctccagcaactacagaaatcagtgcagattcccagctcccctgtatcaaagatgggtcagaaggtgtgaaggatgtggaactggtgctgccagaagattcaatgtttgaagatgccagtgtcagtgaaggtagaggaacccagatagaagaaaatcctttggaagaaaatattctggcgggggaagcagcatctcaagctggtgacagtggtaacgaggcagccaacagaggagatggttcagatgtttcaagtcaaacacctcaaacctcaagtgactggcttgaacaagtacatttagtgtgaactgcacacatctgggctctaaatgaattacaggtacagatggtatgctaggtggagtatgcttgatagagactttgattcacttaattccaactcagtgataaaccactgacattagggttgaatacagagaagttcccttgaatggtagcttcattttttattttaaccttacagggaatttcctttgtacttaattgaatagcttttcccctttttgctgacaaaaagaagagcaagagaaagagaaacaaaaatgaaataaataagttgtattccacactctaagaaaatgcagtcctctatttagcctaggcttgacaatacttaaattgaacatttaaactaaaggcttactccctaatctttgggtggctttcctttaaaaaaaaaaaaaaagttttcttcattctagaaatttattttggataaatccgataacatatatgtcctcaatctctttgtgctcttccataacttacttcctttttgtctgagcaatgtgaattgaagtctctttagtaccacatctaccatagtgtaattagttttaattttcacatgaatcaaaggtttcctttcatgtctatttacagtccaattgtgccaaactcttacttgtgtgctgactaacaaggcatttaggtgtgcagcatcctagagtgctccagggcagtgtcagcgttctcgggagtaaaaggtgccacttggtagcaatgatattccagaattaaatgg

SEQ ID NO: 126112 - DNA, 1018 bp, Homo sapiens
gggtgcaattacttttaatcgtgttttataaaatagaaaaaaagtggagttttcatgagttatagtaaatcccacgattattaagaaattcagtaaaacatcctgcgcaacatgttaccgtgcctttgcctaacctaaatggatagttgccagttaaataagtgagtaattcaaatttcaatgtctcttctgaagtaactatgctatgaattgcaaagacctccataaaaccacccatggccttgcttttacactaactataacaactaaatgttcaatcagtttgtttgcctaactagcaaatgctgacatgtgtttgttctactgcgcaatactcatttgctgtgtgattactgtttagtgttgaaaaaaatcaacttcctagttatcagtgtcttactgtgaagaaaatactggtcttagttgtaattaggatacaatggtacagtgtgtaattaaaactagagtaaactgttggaatggctgttttacttaaatattatcaaaactagcataacataagcaaaatagataagtacaacactccatttagtgttttgccagattgttaccagaagtctacagataccaaactttcagttctgagtttgtacaggcaagtcctgggctgggtaaaaagttatattaatattgttatccacaagagatgtgattatgggttttgattactttttttttttccaaaccctgcttttgaaatatccttgtacttaaaattcatattgctaagacactgtattagaatatttaatattccccagatcctcttaggataaactgtgggaatcctcctatgccatggatatcaaaggtccacattagtttttatttctccagtgatcagaaacattgatatcaatccctattaaattagtggggggaatattaactttatctacagtgtattactgtatattaaactgaaatagtccattaaaggatttttttataaatttattttggattaaaaatatcaacaccaataagtttttagacc

SEQ ID NO: 126113 - DNA, 1078 bp, Homo sapiens
atctctgaagagtaaaaccttggaatctaaatattaagtgataatacaaactttgggggtgttttaaggctgaaataactccaaaggaaaaaatttttcatgcagtcagctcttggactgagtagtaggtttttttttgtttgttttctttgttttctcttctgagaaaaacaaaggatcttactctgtcgcccaggctggagtgcagtgatgtgatcatagctcactgcagcctcaacctcccgggctcaggtgattttcctacctcagcctcccaagtagctgggactacaggcacatgccaccatgctcgctaatttttgtattttttgtagagacggggtttcaccatgttgcccaggctagtcttgaactcctgggcttaagaaattcgcccatctgggcctcccaaagtgctgggattacaggtgagagccactgtgcctggcccagaagttgtttcatctcagcattgtgctacaggcataattactgggtcttctccttggcaacattatattgtcttgtcagttgttacagccttctcaccggaatgaaagatttctttctagaaagatagaagtggcttcttctagactgtattatgtgacagtactttaggaactggcagtagacttatttcttaaagatgaatcagaaaagtttcctttagacctcagttccacttaggactcacaggtagctgacagacttagtggtggccaaacttctgaaggaattattcttcttcactctttgaaactgcaatttgacaatattcttaatcaagctgtcttcatgtcttagccagctgtcccattaagtatttattgcataagtgcctagcctgtgtgagccatcagtacataacaggttgagacaaacacatgagagtgaacaaagccaaagtacaaaaaggataattgttggaggattcagtcaggcctcttatcttactaggtgtgccaagactgcaaggccctgttggcaattttgcctgagccatctcaggatttatgtaactagtaacttgagatcaaggagcaggcttaactgcttaagaagtggattcctcaca

SEQ ID NO: 126114 - DNA, 1030 bp, Homo sapiens
atgatgctatgtcagtgtacgttcatccgtgtaacaagtgtaccactctagtggtgggaggggttattgataataggggaggatgtgcatgtgtgggggcaggaagtatatgggaaatctctctacttctgctcaattttgctgtaaacctaaaacctctgtaaaaaataaagtctattttttaaaaagtggggatggtattacggcaatataaaatcaaaatactttatgaacaaatcttttctccagatgtaaactgtcatatatgcaccctcgtatgtgtatgtataattttcattcaaacgtgaaacaactttagaattggcaccaaacatataaacactgatacattagactatctcgaacaccttttactgaccactttgaaaacttgcttacctattaaggttcattcatagctgtgatgttctatttttattttcaatgtgggattatcttctgtttcccccagggagtatattaccaaattggtgatgttgtttctgtgattgatgaacaagatggaaagccctactatgctcaaatcagaggttttatccaggaccagtattgcgagaagagtgcagcactgacgtggctcattcctaccctctctagccccagagaccaatttgatcccgcctcctatatcataggtaagtttgacaaatggcacaggtttttttttaacttagttaactctccaatattatgtaaaagagtgtgttagtcagcttgggctgtcaggacaaaatatcacagactgagtggcttaaacaacagaaagtcactttctcacagttgtggaggctgaagtccaacatcaaggtgctggcaacacggatttctggggaggcttttcttcctggcatatagatggtcaccttcttgctgtgtcctcacatggcctttcatggagtgagagctctttggtgtatcttcttataaggacaccatttctgtcagatgagggccccacccttatggtttcatttaaccttaattgcctccctaaaggtctcatctccaa

SEQ ID NO: 126115 - DNA, 1302 bp, Homo sapiens
accactgttattctcacctatatgtcaagtttgatacattaccaaacaattctagccttctgcttataagtatatagaatttttatttaccttatctatggatcaggatctcagcagaggcagtgatgtatcagaatcaccttcgggattcctctactgcctcctctttctaatccccagattctgatatgcatccttgtcctacagcgaggcagcatggcatgaggtcagaacaccagttctggagccagactgtctaggttcacagcctgccatttaccggccatgtgactttggcaagtttcttagtctctcttgcctcactttcctcatatgtaaaatgggaataataatagtgcctacctcagaaggttgatgtgaggaatgaaggtattgatacatgtaaacttagagcagtgtgggtacaaaataaacatgatgcaagtgttcaatcactgtttttgggagaatgccatattctttaagccgttaaagaagaaaaaatgattaagaataatttcaaagtaatgcatgtttcaagggctaatgccaggttgctcccagagtggtctctcccagtgtctagaaattttaacatcttatgaaaatgatatatatggtcaaaaatgtatttaacctttcccttggctgccttccagggccagaggaagatcttccaaggaagatggaatacttggaatttgtttgtcatgcaccttctgagtatttcaagtcacggtcatcaccatttcccacagttcccaccagaccagagaagggctacatatggactcatgttgggcctactcctgcaataacaattaaggaatcagttgccaaccatttgtagttcacaaattaaaactgggtttccaggcctggtgtggtggctcacgcctgtagccccagctattgcaccactgctctccaagctgggcaatggagtcagattctctttcttaaaaaaccacaaaaaaactggatttccagttctctaatattcttagtaccacaagatatgtcataggtatctttaaatgaaattcttagctggaaaagtgactaaaaagtttttctcctgctacctagtaataaacaaatcattgtttattactggtcacttagaaaattaaaagggatagggccaggcacagtggcttatgcctgtaattgcagcacttttagaggccgaggcaggcggatcacctgaggtcgggaagtggatcgcctgaggtcaggagttcgagaccagcctggccaacatggcgaaaccccgtcgctactaaaaatacaaaaattagc

SEQ ID NO: 126116 - DNA, 1121 bp, Homo sapiens
agctgggattacaggcacatgccaccacacctggctaatttttgtatttttagtagcgacggggtttcgccatgttggccaggctggtctcgaactcctgacctcaggcgatccacttcccgacctcaggtgatccgcctgcctcggcctctaaaagtgctgcaattacaggcataagccactgtgcctggccctatcccttttaattttctaagtgaccagtaataaacaatgatttgtttattactaggtagcaggagaaaaactttttagtcacttttccagctaagaatttcatttaaagatacctatgacatatcttgtggtactaagaatattagagaactggaaatccagtttttttgtggttttttaagaaagagaatctgactccattgcccagcttggagagcagtggtgcaatagctggggctacaggcgtgagccaccacaccaggcctggaaacccagttttaatttgtgaactacaaatggttggcaactgattccttaattgttattgcaggagtaggcccaacatgagtccatatgtagcccttctctggtctggtgggaactgtgggaaatggtgatgaccgtgacttgaaatactcagaaggtgcatgacaaacaaattccaagtattccatcttccttggaagatcttcctctggccctggaaggcagccaagggaaaggttaaatacatttttgaccatatatatcattttcataagatgttaaaatttctagacactgggagagaccactctgggagcaacctggcattagcccttgaaacatgcattactttgaaattattcttaatcattttttcttctttaacggcttaaagaatatggcattctcccaaaaacagtgattgaacacttgcatcatgtttattttgtacccacactgctctaagtttacatgtatcaataccttcattcctcacatcaaccttctgaggtaggcactattattattcccattttacatatgaggaaagtgaggcaagagagactaagaaacttgccaaagtcacatggccggtaaatggcaggctgtgaacctagacagtctggctccagaactggtgttctgacctcatgccatgc

SEQ ID NO: 126117 - DNA, 1007 bp, Homo sapiens
aacaaagtgcaatgcagggtgacgtgtctcagtttaatactagtgatccactaagtctttgtttctatcccctgggattctgagctttgctggtttagaaccttgaacctcctgggagcaagtgatcctcctacctcagcctcccaagtagctgggactagaggcataccatcatgcatggctaattttttttttaagagatggggtctcactatgttgcccaggcttacttgtatattttaattaatgttctcctttttgctgttcccttaccccattactatatagttaagatattagatacgcagattgtattgatggtggctaactttataatttagttcatatatgagagaatatcaagataaaatcataactggaactaggagaggaatggatgtcatttaaatatcttgggcttggagctggatgtagtatagtagagggatgtgatttcatttctggttgagcggataattaaatgtatttgaattatgtgtaaatttcacattttttgatatacaaagaacagataattgtatcagtaggtaataggatattttatttcaaaacagtgaagaagctgctaagcataaaatttgtcaaatgctacaaaggtgatgaatatacaactgggaattccaagaaatttaaatttaattacattctttattatcttttcctcaaaagaaataaattagttccaccatttggctaatattatttcattaaagactgaatttagattttaggaaataaaatatggaatctgttataatgtcccaatttatactacagtattaatctcaatcctgatcattacataattatagcatttaccaatctgtgattttataaattaaccaaatttgttaaattaagaagaaattcatagacaccatttttttcctgttacaacatatggaaaagccatcaaaaaacttaacagaaccaaatcaaaaagaagtatattttatgctaaagttactttctgtccaggtcgaaac

SEQ ID NO: 126118 - DNA, 1032 bp, Homo sapiens
tttttttttttttttttttgagacagtctcactctatcatccagactagagtgcagtggcacaattatggctcactgcagccttgacctcctgggcttaggtgattcttccacctcagcctcctgagtagctgggactacaggcacatgccaccatgcccagctaatttttgtatgttttgtagagacgaggtttcaccatattgcccaggctggtctcaaactcctgggctcaagctatctgcgtgccttgacctcccaaagtgctaggattacaggtgtgagccactatgcctagcctaactcagactttaaaaatataaaagcaattcatttttattcccaagaacagtaaggtggtggtttaattttagtctttaattctgtttttaatttattctatttagaaatgtcccagaaacttagtataactttactttctgaaaatgaagaaacctgtccttgggcattagtgtgttggatttaagcaacaaagttaaaaaaacctaccctgtgttatggcaattttcacttgatggtggttctataacacaggtatcagtgaacctttataaaagatgaacaacttttcagcttgcttaatttcagttaattaacatgtatacttatctatgttaatgttttattgcttaaaatgtttaatttttatatttggtaaacagatagttttttctctccccctcttccttccatctttcattactacaatttaccatgcagagctcacaatgtctctctgcaccaagctccatgactcaggatttgcctggagttcctgggaaagaccagttgttttcacagcctccagtgttaaggacagcttcacaagagggttgccaagaacttacacaagaacaaagagatcaactgagggcagatatcagtattatcaaaggcagataccggagccaaagtggagtatggctttttccccctcattataattgttaaaacttcttaaaaattgtttcacccttttgatatatatttctttgacttataaacgagctat

SEQ ID NO: 126119 - DNA, 1020 bp, Homo sapiens
tatcttgtctttataattttaatagttaaatttttaccatgtgcctcaaaaccgttagagaattaatgagctctttgaaaaatgcttctaagtttcttgtattgctctaatagaatgctatctatgttattatttatttctgagactaaaattgtttacatctttaaactggttgtccttttgtgtattttaggatggaagttccagctctgatagtgacctaagtctgtcttcaatggtctttcttaaccatagcagtggctctgacgattcagctggagatggagaatgtggcttagatcagtcccttgtttctttagagatgtccgagatccttccagatgaatcaaaattcaatatgtaccggctctactttggaagctcttatgaatcagaacttggaaatggaacctcttctgatttggtatcttgtgcagtcatcattatacagttctgaaatataaagctatatgttggtgtaaagttgcagtgatttctctcctaaccagccccacatattcttcctggttggttggttcttcagtaaaatagtcttgtttcttgcttacactaattggtaatttgcattccttgttaagattttcaagacagggctgggagcaaggaaccaaagtagcgcgtggttgtgattacctttggtttctttgaggtttctcttacctagtggctttaaaacatctttaggagcagttccattttatagtaaacttaaattctgttatcatgaacagttgaggataatgaataatttgatacaataatgtaagaaattcctgaaaacaaagtgttatctgtgatacttttgctgcatagtaagcacaatgaagtgtactgataatgtttcaacaggaaagtgttttgattaaatgtgggcagtatcactgttctactagcattcaacatctcttctaaaaattaatagtggttcactgtaattttattggtacatgtaacatctgtacatgtgtttggttatctatatgtttcctggttttttgt

SEQ ID NO: 126120 - DNA, 1844 bp, Homo sapiens
gtgatactgcccacatttaatcaaaacactttcctgttgaaacattatcagtacacttcattgtgcttactatgcagcaaaagtatcacagataacactttgttttcaggaatttcttacattattgtatcaaattattcattatcctcaactgttcatgataacagaatttaagtttactataaaatggaactgctcctaaagatgttttaaagccactaggtaagagaaacctcaaagaaaccaaaggtaatcacaaccacgcgctactttggttccttgctcccagccctgtcttgaaaatcttaacaaggaatgcaaattaccaattagtgtaagcaagaaacaagactattttactgaagaaccaaccaaccaggaagaatatgtggggctggttaggagagaaatcactgcaactttacaccaacatatagctttatatttcagaactgtataatgatgactgcacaagataccaaatcagaagaggttccatttccaagttctgattcataagagcttccaaagtagagccggtacatattgaattttgattcatctggaaggatctcggacatctctaaagaaacaagggactgatctaagccacattctccatctccagctgaatcgtcagagccactgctatggttaagaaagaccattgaagacagacttaggtcactatcagagctggaacttccatcctaaaatacacaaaaggacaaccagtttaaagatgtaaacaattttagtctcagaaataaataataacatagatagcattctattagagcaatacaagaaacttagaagcatttttcaaagagctcattaattctctaacggttttgaggcacatggtaaaaatttaactattaaaattataaagacaagatagaatgtgtagataatttaccaaccatcccccaagaaagtctgtaatgaagctaagactcagacctctgggctttatttttatgtctctgactttccattcatacttttctactccaaaatgatgaatcaaccatgttatagagtgctttctcattatagagagctctacaaatacacacctttctggtagtaaagggagagggaagaacttcaatggcttgccaaaatagcaaaaacctagggagtttctgatttagaaactgtaggttctgtagacattccaaacaaatgtggtaaagaagagtaatagaataatccttcctagaaaatatatggtaaagtctataatgtaacagttcaaatatctactgtaaatattaaaatcataatactgtctttagagaaaaggctgatgctagggctgggatacagaaagtacaagataaaccaagaatatttttcttttttgggggcagggtctcattctgtcatccatgctggagtgcagtggcacaagcatggctcactgcatcctggatttactcaagcgatcctcctgccacagcctctcccaagaagctaggactacaggtatgtgccaccatgcccagctaatttttaaatttttcacagagacaagatcccactctgttgtccatagtgggtacagtttgtgcaaccatgatttggtctcaaactaggcccaaatgatcctcctgccttggcctgccaaagtgctgggattacaggcgtgaaccactgcacctggccaagaataacttactgtatctggaagtgaggaagtgattcaagaatgatgaggacatgtcataaagatacaggagccatacaaaaggggctcctattggccagattggaacaatgtgagcttcaaaacaacaactttaactgattattttttaaaagttaaagtacaaaca

SEQ ID NO: 126121 - DNA, 1022 bp, Homo sapiens
aggaaacaaacattttcatcactccagaagtctcctagcccttttactacccattcctcccctgctccatccccagacaactaccaatttgctttctgtcactatagatttgtcaacctgattttctccaaatatacattcaaaaatatacagttgaatacaattggaaattcgaattttgtgtttttttctttaggaacaaagatgtgaaattctgtgtaatgtaataaaaaataaattggactgtgatataaacaagttcaccgatcttgacctgcagcatgtagctaaagaaactggcgggtttgtggctagagattttacagtacttgtggatcgagccatacattctcgactctctcgtcagagtatatccaccagagaaagtatgttttactattaaaacctgaacttggaatcttctttctattgtggagaaatgtaattgtagtaagacaagaattaaatatattccattgtagtatttgaataagcagttatttgagtagaaaattagtgtttccagctaagatgatggcatattttgaaaattcatatagtgaatataactagtaaaagaagttttgtttatttttaaacagaattagttttaacaacattggacttccaaaaggctctccgcggatttcttcctgcgtctttgcgaagtgtcaacctgcataaacctagagacctgggttgggacaagattggtgggttacatgaagttaggcagatactcatggatactatccagttacctgccaaggtatgtttaaaaaaagaaaaagtgaatacttactcccagaagaaccactgtattattggctttggctttatgtgtcagcttgcccaatctccgtgtgagtcaacaagtgtttactgagttaccaaataaatgtcttaacactattttaggtactttaacaaattttaattttattaattaattttttattagaattgagacctcactctgtcatctaggctggagtacactcacagctcactgcaacctcaaa

SEQ ID NO: 126122 - DNA, 1067 bp, Homo sapiens
aggtgaaaattttaaagaatttagaatatgtttgccagtcctggaacatatttctttcagctcactaccactaaaaccctcatgagttcccaaaggggactaagtgccattatgtgatggtggaaaaaaaaagtttaattaatgaagtgtttaaaagccatctatctatttctctctgttctttctcattcaaagaaataccattttcaaaaaagtcattttcttggaaagcgcatactaacatttcaggtggctataaattataatttatgcctctagcacaatatgcaccaaatgttgacttacatatccttaaaatcattaagagaagcataaatttaaagccacgaattactaataaaattgaaaaataatttctataaaagggacataattcaataatccttacaagtagtgtattacctgattaggaggctgaatgtgttggacgcactgaaatatgtgaactccttgagcagaaacaagtaaaggatgtagagattgctgagactgacttgtggcaatcagtgcaaccaaacttcccatggagataaactcttttatcatatcattcaaagctggaattaagcaatatagtgcaaaagcttaggaaaagtaaacatgaaatttaaaaattatacattcattaaaaataatgatactctaaggttgacctttaaggtgcagtatgtatggtatcgctctttcatgtctttaaaaaatgaatccatctagttattccctgatttatctattgaggacctaataaatctaatggagacacaagaggtactgcaaactcagaccatatactcagagcaatgtctagtgaggttccctactcgtggatcttatgaaataaatgaacgaatgataaaaatttgtctctgaaataaatattctggaagggtgataaatttccatactgtattgtttgttaaacaaaatacagttcatattcctatgacttccagaacaatctcttcctaccccaggtcttataaggtttcatatgagaaggtcagaactgaaataggcattaataatgtacatctgagtcctgtcct

SEQ ID NO: 126123 - DNA, 1069 bp, Homo sapiens
attgactgaataacattcttctcattttctcattgttatatatttaatagttcctcagttattgaatgttttatgattatagtatctttcatctgatttttaaggcatgaatcccatcacagaaatacatagtgctgaaaaagcttaattgggtatgaaccaactcttcagggccacagagaaaagctccattttatgaccacagtttacatacttcaggccaaccagctgggtccttagttgtttaaagactagggaacaaagaggctcaaagggaaggaaaggggaggctctacgagtacatactcgatcaatgggatgaatactgtccacaagcagagcatcttaattcccaatccacaggatatatatacacgtagcaaaagctggactttgctctttagatccagatattgcatactagttaagctttcatcccaagtaaatctagattaaaaaactatgctatcttgtatttccattcaggacagccaagagaaaaatggatgaacagagtttcttcggtggattgcttcatgtgtgctatgctccagaatttgaaacagttgaagaaactagaaaaaaactacaaatgcggaaggcatatgtagtaaaaactactgaaaataaaggtatggaaagcatattgctaaatgcctcctgtgtgtcaggcactctgccaggtgtgtcatcatgcaattcccagtctagtggtaggagaggcaagtaaaccatcacagtattcagtaactgtgaaccacagggttctctgcagcacactacataatctgggttgagaagggagaaatattggttcatagaagacttcctatagtatgtgagaagtggctgaattttaaaggataagtagacgttaactaaatgggagaggaaaagatggaaaggcaagccaggcaagatgtttaaatgtttagaggaataaatgagcatcatgcatttaaggaactttaattaatacagtataaccaaagcccaaaggtttcagtgagagataagtttagaaaagtgggtaagaagtgaatcatggagggccttgtgtcccatgcta

SEQ ID NO: 126124 - DNA, 1026 bp, Homo sapiens
tatggggatgaaaccagacccatggagagcaaggaaagggtgacacttgatgctatatatctttttatccgttttaggttttaaaccatgtgaatatatacccttctcaagaaatgatttttttggagtagaatttgttaacatttttaagtgatttttttaaattatatgattctgaatgatgaaaacaataaaccacttctgtttccctttccctcaacttttaaattgtaatataaagaccattacgtgacaaagaagaaattggttacagagcataaagacacagaggattttagacaagacttccactcagagatgtctggattttgtaaagctgctttgaacacttctgcagggaactcaaatccttatcttccgtattcctgtgaattgcctttatgttatttctcctcaaaatgtatgtgttcatccgggggacctgtagacagagcaccagactcctctaaggatggtagaaaccatcataaaacaatggggcattataaccacaatgactctttgcggaaaacacagataaactctttgaaaaactcagtggcctgccctggtgcacaaaaggctattacgtcttcagaggcagttgacagatttatgcctaggacaacacaactgcaggagcgcaaaagaagaagagaagatgatcgtaaacttggaacttttcttcaaacaaacccaactggtaatgagattatgattggacctctgttaccagacatctctaaagtggatatgcacgatgactcattgaatacaacggcgaatttaattcggcataaacttaaagaggtaaggttatttttaaaaaactattctaagacacgatttggttataggattaaatggagaattatttgtgggaacaatagtactgtaattttttttcactttttagtgttttgatgtgtttttctacagttctctgttgaaataactgaatttggctaacattttatttgctttaaactgttaatacttgctttaaacaatgaacagacattttat

SEQ ID NO: 126125 - DNA, 1030 bp, Homo sapiens
cattaagtatgggtcaaaaaaagaagaaatgggccaggcgcggtggctcatccctttgggaggctgaggcaggtgtatcacaaggtcaggagttcgagaccagcctgaccaatatggtgaaaacccatctctactaaaaaaaacacaaaacttagccaggcatggtggtgcacgcctgtaatcccagatactcaggaggctgaggcaggagaatcgcttgaacccgggaggtggaggttgcagtgagccgagatcacgccactgcattccagcctgggcaacagagcaagactccatctcccaaaaaacaaagaaatgactttagacaaatggcttgaatgaaattacaaagaggagtgcattaaaaaataccagcagtaaaatctcttgaagaattaaaatgacaggctaaaaataaataataaatgttctttttagaaaatactaagttgctgctggcactctatattcttcttctttgttttaatggatgacttgtatgtacatcttctggcttgtcctctggaggctttggcacagatgaaattacctaattaaaaaaaaaaaagaaccattaaaacttagtttctatagcacaggagtaaataagctattagaagaggtaagactacatccaatagttcaatccttgatgtcactttcgaggcagagttcgcctaagttcaaggtacagcctatgacctaggcacagagtggagtcttccatttgaatactgatgacagtaaaatttctaaagctatttaaaaagaaaaaaaatttggaggaagaaaagtgaacatatgctctactttaacattcctttatagatctaaagacacttgttatattacggattcagatagatatcctggttttgcattcttgaaacactgataacgtttgatagatttggggggatgaaaacctttggagaaatgagcaggaagcagtataatcctcaatttcctggagaaaaaggaaaagcaaacacaccatcagaaaaagagtgtacaaagagtatacaataag

SEQ ID NO: 126126 - DNA, 1050 bp, Homo sapiens
ctccaattagagtataagtgttttagggacagggctatattttatatatctagggtaactcaggtatgcctattagaatagtacaaataaaataagtggcctctgtaaataaataattttttatgtatgtagggtgtctacagaagtgtgaacttttatttggtaaaatttttttagtctagagagctatttgccatgcaaaatttaaaactagtatttaccaagaaacatcttcctaagattatgacaatgatggcaagctatcgcttgcagactttgaaaaacagtaagagaagacagacttctgttggaggtgtttggaccatgtttaccagaagcaaatgtatagttactagtgccaatagcccatatagattcaggaaaaattttaaagggtcagagagtaatacttgctagacactctcctctgttgggctgcagcccactgctgaagtcaaggcaatcattgagagttcagccccatcctggcatttgggccccaagaagacattcatgattatttcagtaactatattcaagacttccattgagcttttaacctctttagcaatagacaattcctgtttcctgtaagtatggtgtatttcccaaaccaaatccagggtatattggcttgcttaagggatagaacactgaatagagtttcagcaagtacaccacaaactgctagaacacttgatctctttcaatacaattgctgtcaatgtttttaaaattttggagacatagagtactttgtgcttatgaaggtttttcatgtatgcatctgacaaaagttttctgagctgcaagtatcagtctaataattgatttggctcataaaattgccttacatgttcttcctttatcaactatgcttttcaaacatggtatacaagaacacttttttttgagacacagtctccgtctgttgcccagactggagtgcagtggtacaatctcaactcactgcgatctctgcctcctgggttcaagtaattctcatgcctcagcctcccgagtagctgggattataggcatttgccacca

SEQ ID NO: 126127 - DNA, 1049 bp, Homo sapiens
tacagtgaagggtgtacttcgtttttgcactctatgtaagaagagaatcataatactgatatagatacacacatgcatatacatgtatgtatatatatgtattgcatgatcaaaggtttaaaaacttcatctcaaagctccttgattgcagcttcatatcatttttaaaccttcaatataaaaatccagaaattatgtttttcatttcatatcccaaggaatatttaatctgatagaaaaaaatataaagagtgctttattctaaaatctctctaccatataataaactagtcattgcgtggaatataaattgtttttgtcttttagtatcataaattgaaataactaaagagaagactaatgacactttaactgctgttattcaaatctttaaacttcttatgctttaaaaagtctgtttcaagtttattatttgaatggagatggttacatttcttgagagcaaatatttgacatgttgaagaacagtctacaccaacagtcatctgaagaagagactgatgaaggaattaaagaatcggtagatataacactgtagaaaatggtaagaatgaaaaattacaattcatttttgttagataaagctaaggaaatgatttcttttcttccataatgaatgcagcctttatgagtgcaggggtttttgtttgttcctgacctaactattgcctagaacaatgcctggctgatagtggtgctcaacaaatatttatagaatagctgggcaactaaatgaatcactatacaaaatgaatgtttattttgttatttttaaaaattttactcagtaaaacctcattagtttagggggagaccagatgcaatgcatgtacaattggatgctactctattttgtctttatgacctaactcctccaatccacctacatattcattataatacaataacataataataaaaatagttgacccctctagagtgctttctaaatgcaggacccttcagggagctttaatctgtgaactcattttattttatttttatatatatatatatatatatttttg

SEQ ID NO: 126128 - DNA, 1026 bp, Homo sapiens
aaaatttgacagaataattttttaatttttttatttttttttatttttggcgacagagtctcactctgtttcctgggctggagtgcagtggtgtgatttcagctcactgtagcctcgacctcccaggctcaagtgatcctcccacctccatctcccgagtagctgggacttcaggcgcacaccaccatgcctggctgattttttttattttttatagagatgggatttcaccatgttgcccaggctgatcccaaactcctgggctcaagtgatccacccacctctgcctcccaaagtactagggttacaggtatgagccactgcgcctagctgacagagtcatattatcagttatgtttattccaaagttattaccctgtgcaagttactaacatctcttcctcccttccaaactaccctttttcttgacaaactttacaccaattttttacaaatacaaggcatgttactaggataacggtactggaataactgccataaatctgtggatgttccagatagaaaaattggctttatactcatgctacctctttgtaattgtttggattcctttggctgcccttagtatatttagttgttttaaataccattagagtgtcctgaatttattttaactagaatacagatttacattccttcaatcaagttgtattaaaaacctattgcttaattttctgacatttcatggagacccatagacaaggctcacagaaaccaagtgagaacagctattcttcaaatttaagtgacagggttcatagttttttaaaaattgctactttttaacttaaagtctatgaatactcatttatttatttgcttaagaaaagttttgagaaaccttttttccccccaactgtatttaatgatagatcactgcatccttgacttcccaggctcaagccagcctcccacttcagccttcccagtagctggaacctgtgacaggcatgcaccgccacacccagctaattttttttttttttttttttttttttttttttt

SEQ ID NO: 126129 - DNA, 1049 bp, Homo sapiens
gccagtctgagcagtacacaatgcctgtgtacctatttacttaaaactggcaaatttaatatctctgttctgtctgaaaactattttacaaaaacaattatgtttttatttggttactccattccagtaactgcaattactttacctttagaagttatatagcatgaaataatagtgattggtagcatgattcaattgaatttatttcctacaggaaattttgttagaagttatgttaatatgctaatgacttaagagtttctccctatctttttgaaaatcgacaagaactgttttagtcctcatatgatactggttgttgagactttttgaggaatgttttgagtagttttcttggttgtgtggattgtttggaattatgtggtagcttagaagcatggtaaagatgcttttaatttgcgtatttttatatagtaatgtctaacatggaattatctttacaggaaaaaacaaaaaagaaaaagaagcataagaaacacagtaagaagaagaaaaagaaggctgctagttcaagtcctgactcaccataacattaagaaaaatcaggattcccttataaagaaagtgcaatgtctgaggaaatttcaactgtgaaaactacaacatatttactaaaatgcatgaattttcttgtttttggaattattcctggactattcagtagccactcagatgccactgtgtgaaagggccataaatgttgcctgctgcttgaacatctatttttttctcttccagtgcttgataactctgggagataatacactgcagtcgtactagtggttaagatatttgggaataaaattaatacttttgactagaagcgtctaaggataaaccaacagaaattgaatctggatacatctttaagatgtaatcagaaatgaccagatgactctagttagaatttttgaaggagggattacattaatatttcaaaacccttactctgtagataagtgtattttaattttttcccctcgtatacttttatttacctggggaaggagcttttagggttggggggt

SEQ ID NO: 126130 - DNA, 1033 bp, Homo sapiens
ccactgcactccagcctcagcaacagagcaagactccgtcttaaaaaaaaaaaaaaaaaaagaaatataagctcaaatttctgtttgacttccttaagctacaatatgaaatacgagagaccaaagtatggtgatttctgttatctttgataatagttacttccaaatcagccaaatctggtaataacagaaaaagcctctccaagcactagctgcaatgaaaaaataataatatgacaacataaatgactcattaataaagattcttttgatagcttttaaagccaaactctgctattaatgcaaattgagaagaaaagagaaagaagaggcgaattaaggaaaatagaagtagtatccaaacaagaaacagatcaaccaagagaaaatggttaacagagattattttcaaagagtaatgccaacaatatcagcaaagtaatttaggggccctcagtataaatgtgagctatgacctttgaaggcattttcttagggaaaggtgaaagaaaaatgaaaacatcatcatttgtaggtttcagtaaccccttcccagaattttcctgactcttaaaacgaggtaccttctctgataggaaggctcccctagtaatgattcagaaataacattttatgtgctccaagcctacgatgacgaataagtttttgtttgtttgtttgtttgttctgaatgtgaaagtagtttgggtgaagatagctttggtctgtggttcggattaattaattaagacataaccaaataagtatttgcatactttcactgtttcatgctttcagctagtgtgtatgtatgaagcaactctatgcaggcacttttctaagtcttaagagtacaaaagagtatgagatagaagaatatgatacgtgagagagatactgtggggacgggctcatgaaatcctcgctgaggaagtgaaattaagctgaaatctgatttacaagaaagagccaaccatgtgaatatcaaaggaaagaatatcctaggcagagggaagagctcttagagacctat

SEQ ID NO: 126131 - DNA, 1053 bp, Homo sapiens
tttaaacacatatttacatttaacactttgcgctaaaggaattactacatagagattcttttagatcactgcaaataatcacccatttattttcttttctgcagtactaggcctgtctaatccaatcctgggtagaaacaaaagaattagaatacaaaggaaccaaatcttacattatctgcatatttcatatgactgtataaagtctattctgtataatttaagaaaataagatggatattacatctaaatggatatgtagttatttcttttcaatatatttaatattgctttagtggaattaaagacttaaatcctggtaaatgttacactttttagacattctaaaataaaaatgggtaattataataattagaagaattaaatagaacttagaaacataaaatgtgtgtgacaaagtatgtctgagtcaagataaatgtatttatttttcataggatattaaaggactcagcaaaaagagaaagatgtattctgaagataaacctttatcatctgagtccttgtcagaatcagagtatattgaggaggtaagtatatgatcaaatccattttctctattttaaaatgcttagttattgatttaataaatatgacttagaaaaagaaatacttcatatttaatttattcacctttctagtatgaaaaaacaaaatgaaagttatttcatttcagaatgagttttgcttttttccagaagataattatctattattttttataattaactgtatttccacatacctttctaatctgagatatttttagtcttctaatatttcctttttattgtgctaccattcttgttacatgaaagaagctgtgtaacatacagcatgttgaaaccaaacattctcttacattgttaaaatagaacattgcatatactatctcagtttagttgatatttagctgtgttttgagctacttttcggggagtagaaaggtgatgaagtggagaagaaatgttggcaggaaacatatcatattacttcgttgtgagaactaaatgagatgataaattacgaaag

SEQ ID NO: 126132 - DNA, 1052 bp, Homo sapiens
gataaaaagcattggcttaaaatgatacagctggaattagaattaaaagttgagtctttatcttctaaaatctggtccaatgtcctttctactataccgtacctaaatttgttctgtactaaccaggattgtcagacacacagttggctttcaaacattactggtcagaaaaaagttaagaagttctcggaaaaaagtgttgattcctgagccctacctccagagtctgttttagtatctgattaggcttggaaacctacgtctttaacagatgccctgtgtgattctgatactggggtgtttatggaccacaatttgacaaacactgtactagagtctcaggaaaccaaagcagctgtctgcatttataacagatagctgcctgcccccgtgagagatcttctggcaaaatacctagcatctagaaagtactcagtaaatgttggttttctctttgtcttttaaagcagaagagctagtctcatgataatgatagctaacatttattgagtgcctactatctgttaggcacaattctaagcacttaatttattaactcattgaatctcaacaacttcaggaagtaatttggtaatccgctttatggataaagtggataaggaaactaggcttaggaagattaatagctagaactcaaaggattcaaaagcagaaattgttgcctcctcaaattagaatacaactccagtacatgtgaccaccataagcaaacacaggcaatgacacgaagtcctattttaaaataagctgtgtgggtattacagacagtacttatcattttaagagtaaatttggtatacagccagataaagaagcctgtttgcttacaagcaaatgtatacataacttatatttctcttaaattttcggaataatatactgggattggagtagccttttttcagtcatagagcaaatcactttttgggtgtttttgtccttgttctgtaatgctgtgtccttggcatttaaaattgatacatatatttctttgtttaggatagtttaaaaaagaaaaagaagtcaaaaga

SEQ ID NO: 126133 - DNA, 1605 bp, Homo sapiens
aaagagacctcagcttcagtaataatgcctgctgctcaataatacagaacccctatcccttaatatgctctttgaaaagagctagtagagggtcctttggtgatagggtcaaggattggcacctgtgtttcttttgactgtaattagaagctgaaatgggtgagaggtattaagaggatggagggaaggaagcagtggctgtctctgtatattaggtgtattggaaaggttagatagtctctgatggtgttcataacctttttgcagaactggaagaaagaactggaaaaacacagggagaaattgttaagtggaagtgagagctcatccaaaaaaagacaggtaataccacttttagtttattgctattcttaatctcatagttggattttcataataatgctgtatactactgttaatagatgcatttgcaaactcacatcagcttatttagacttgtacttttgtttccatttagagaaagaaaaaagaaaagaagaaatctggtagggtgagcaaaaattttccatttttctaaacgttacaattaagagccaacaaaaaaagtaagaataatttgtttaacctgtatgctaaaggtagcttaaactccagatgagtcaaggaacttagaggttctttgattgtgaagagtgattttgttctatcactgacataaaaaacggtgccaaccaccttataacgtagtacattttctgttgctatttaaagagaaagattggtgaccatggccacatatgttaacttgttgagcttttgtacagggaacaagtgtgacattttatattttcatatttatgacttatgaatatggcatctgtttctcagacactagattgatttcactaagtatttgagagactttgtaaaagaaaaacattctcgcatctcacaagctttaattgttttgtgcttggtcaagtattcatcttcttcttcatcaagctctgattcttccagcagttcttctgattctgaagatgaggtaaggtttgcttataatggttcatgaaataatatctcttaatttctttaatgtcaagtggaaacccattgtgaaatatctgttagaaatgttgacttccaggttttgattaattatccataacttagaggactaacatgagtgagtggtaactaggaacttaaatattggtatataatatattttttagattttaaaatttgttttgttgacctaaaaatatcagtagaagaaaatatttgaaaaatcaaatgctatttgactagatgctaggcattacatgtgattcaaatcacttgatctttataacaggaaagtgatgtattaagtattaagaaaaaaatatagaaactgatccttttgtgaaattttgttcactgataaaagttttatattaataaatgtgtaaattagatttttgagacagaaagcaaatgtttctaaaaatattttatgtaggataagaaacaaggaaaacggagaaagaaaaagaagaaccgttcacataaatcttctgaaagctccatgtcagaaactgaatcagacagtaaggtaaattatttaaattattaatatattggatacaaagacatttaatt

SEQ ID NO: 126134 - DNA, 2489 bp, Homo sapiens
tttgggcggggacacagatccaaaccatttcaccatcttaaaaactttgtagttctgtatagtctttataatggaaaatgtctaggaaccactgtggtagtgaatcttgattacaagatagcgggttgttctttctcctggctgtaggtgagactttgttgtgctatcttgattgtcatggcgttgaaattatgtagcataacaccatttcagcataggagcatccttaggtgtttgagtattttgggctcttctaatacccttgggccttgaatgtttagagatcacctgaccttggatgcagtttcatatacagacctaaaatgtttcatattactgaaaaaacgttttggttgaaacattcctctaaaacatttgaaaaacttaccaaattagcttcatttactagaacattttgatagctctgggctctacttactacttttggtatgcagctatggcacagagtattctggtaacattttgtgtgcacttcaaagattgggattaagaacaagaaattaagaggtagaagacacggattgtctaattcagtctcctcattgcatagaggaggggtaagactttaaactgggaccaaaacttcagtcatctgacactcaattctgtacatcttaactcttgattttctttttaagacttttttttttaagcatttttagttttacagcaaaattgagaggaaggtacaaagatatcccgtttacctcctgaccccactcgtgcatagcctccccattatgaacatccttcaccagagtggtacatttgttaaaattgatgaacctacattgacatgttactatcatccagtcagtagtttacattagtgctcactcttagtgttcattctctatgggcttggacaaataaatttatttatttatttatttagacacagtatctcactcttgcccaagctggagtgcagtgtcgccatcatggctcactgcagcttcaacttcccaggctcaagggatgctctcacgtcagcctcccaagtagctgggaccacaggtgtgtggaaccacacctggctaattttttgttgtttttttgtagagatggggtttcaccatgctgcccaggctggtctcaaattcctggcctcaagcaatcctcccgtctcggcctccaaaagtgttcggattacaggagtgccaccacatgcgttcaccaatatagtatcataaagagtaaaaatcctctcttcggcctagccattcctctaccacccctgtccccaagtgtggcaaccactgatctttttactgactccatagttttgccataacacttgatttggagcaacaaaatgaatatttgcttgtgaaaatattggcattttttgagattgtctcaaaaacagttcctgttctttcttacattgatgaaacaatcatagttttaaagatgataggattgctttccaaaaaaagccccagtgaatttcaggttgaacagtttttttaatttttatttttagagcagttttaggttcacagccaaattgaacagaaagtacagagggttcccatatacctccacacttgtgcagctctaccattatcaacattcgccagcaccagcagggtggtacatttgttacatttcatgaacctacatcgacacattatcatcacccagagtcagtagtttgcattaggggtcactcttggtatgcattcttgtacagtttttataactgaacgttttaattcaggacttgtaaagggctcttaagttcatgatggccaccttttgtgcttgttattttccgaagtgttcttcatgttcttttctgctactttgggacctctaaaatagatgtatcctctagataaaaataggtaatcaaattgacaaatgaaattctgcacattgtgtctttagccagttttactgcattgctctttttgtacctgcccccatacatatccccttgagaccaatttgccatcctgagtttcagaaacaaatcattttctgttatctgaactcatgcagcagtttgaagccacagagaattctagttacatatggatgtgaatgtttgatttacaaggtcacagtgtttataatgattaagtcatagtgaaatgtttcaagaaattgcacaatctctatattttagtgaatgcttaaccatgccacccacttaatgttagaagcattatttttcacactgatacaaaaatgaaaactcctgtacctttgtgaaaatagttgcttgttttaaaagctttctgttgtgcatagttttaaagaaaagtattgttgcttaatgaataagagcagactatcaagtgttttgcatggagcctagaacataagatgcactttaaaaaatattgctattataattgaaataaacaatggagatatttggagtgtacttaagcagactgagatagtgtttgtggtcaaaagcttaaaagtaagccttattcagcagtagttcatgtaat

SEQ ID NO: 126135 - DNA, 1042 bp, Homo sapiens
acagattgagagttaccacagtggcctgtcgggtccaccctgtgggtgcagcacagctctctgaaagcaagaaccttcctacctattctaacgtttttgccctctaagaaaaatggcctcaggtatggtatagacatagcaagaggggaagggctgtctcactctagcaaccatccctccattacacacagaaagccctcttgaagcaaaagaagaagaaagaaagaaagcttatctctaaggctactgtcttcagaatgctctgagctgaatgctcttgctcctttcccaagaggcagatgaaaatatagccagtttatctatacccttcctatctgaggaggagaatagaaaagtagggtaaatatgtaacgtaaaatatgtcattcaaggaccaccaaaactttaagtaccctatcattaaaaatctggttttaaaagtagctcaagtaagggatgctttgtgacccagggtttctgaagtcagatagccattcttacctgccccttactctgacttattgggaaagggagaactgcagtggtgtttctgttgcagtggcaaaggtaacatgtcagaaaattcagagggttgcataccaataatcctttggaaactggatgtcttactgggtgctagaatgaaaatgtaggtatttattgtcagatgatgaagttcattgtttttttcaaaattggtgttgaaatatcactgtccaatgtgttcacttatgtgaaagctaaattgaatgaggcaaaaagagcaaatagtttgtatatttgtaataccttttgtatttcttacaataaaaatattggtagcaaataaaaataataaaaacaataactttaaactgctttctggagatgaattactctcctggctattttcttttttactttaatgtaaaatgagtataactgtagtgagtaaaattcattaaattccaagttttagcagaatgtgttttttttctttctttttttttttttttttttttttttggtgcttcttatttgcaacctggccatgtggtagaaa

SEQ ID NO: 126136 - DNA, 1055 bp, Homo sapiens
gttttctagagcaagataataaaggagatgggccatacaaatgttttctactttcgttgtgacaacattgattaggtgttgtcagtactataaatgcttgagatataatgaatccacagcattcaaggtcaggtctactcaaagtctcacatggaaaagtgagttctgcctttcctttgatcgagggtcaaaatacaaagacatttttgctagggcctacaaattgaatttaaaaactcactgcactgattcatctgagctttttggttagtattcatggctagagtgaacatagctttagtttttgctgttgtaaaagtgttttcataagttcactcaagaaaaatgcagctgttctgaactggaatttttcagcattctttagaattttaaatgagtagagagctcaacttttattcctagcatctgcttttgactcatttctaggcagtgcttatgaagaaaaattaaagcacaaacattctggcattcaatcgttggcagattatcttctgatgacacagaatgaaagggcatctcagcctctctgaactttgtaaaaatctgtccccagttcttccatcggtgtagttgttgcatttgagtgaatactctcttgatttatgtattttatgtccagattcgccatttctgaaatccagatccaacacaagcagtcttgccgttagggcattttgaagcagatagtagagtaagaacttagtgactacagcttattcttctgtaacatatggtttcaaacatctttgccaaaagctaagcagtggtgaactgaaaagggcatattgccccaaggttacactgaagcagctcatagcaagttaaaatattgtgacagatttgaaatcatgtttgaatttcatagtaggaccagtacaagaatgtccctgctagtttctgtttgatgtttggttctggcggctcaggcattttgggaactgttgcacagggtggagtcaaaacaacctacatataaaaagagaaaaagagaaacttgtccatttagctttcataagaaatcccatggcaaaggg

SEQ ID NO: 126137 - DNA, 1046 bp, Homo sapiens
agtcttactctgagccacaggaagaagtaccttacgccagctcacaggggaactccaaacagtcagcaggaagaaactcagtcactcagatgaaaatgatggtgtctcaccattcttctatgcagttttctaaggggcaagacagagacatttggctgtgagacattaattaatcgaacagaatgtactttaactgttacctttcttatctaaggctgtgtggccggctcactggttttagtcaagtaaagagcaatgacttatgcatttaatgatctcactagacataatttcctttcatattggtttgtaagacaggtgctatcctctcccatctcaggtggagctcagaaggcccatttgttctaatattcctgaaccatgtaggatcagcaatctggactgttttttaaaaatcttataaaaatctgtataatgtatgcatcttatgtaagattattttttaaatagtatgtattatgttctttcatttaacaaaaatatacatggttgttgtagagcttttaaaatacgagtaaagagtataagtctatagtatcttgttataccagaaagtaagaaaatgctcaaaaaatatgggaacataccagaaaggcacagaatttagcttgaaggagccactggacaaatataaaacaatttgggcatcaaaatacataattatagtaaaggattataacctcctgaataaaattaaaatccatgagtccatgctgatataaataaagtgggagaaaagagagctttgtcttacagtagactgacaatcaataataacagagtgaatgatggagttagaaaatcatcaatggatgatgctaaaactactgagtggaaatttcatcaagagatttacgtagtgtcaaaatggctctttacaagatacttactttaaaaataaaaataggaaaagaaagaggaaagaaaaataaaccataaaccagtgaccaagagatgaccattactaatggtttaatagttatctttcaactgtttttcctatgcattataacattttaattttc

SEQ ID NO: 126138 - DNA, 1060 bp, Homo sapiens
tgtcaaaagattctactaggtcttgtactaaaatgatagggggtagtgacaaaccaagtaactccatacgggcccttgctgtggagtggtctgtggctgtctgatacccttgctcttttgttttgcgctgagcatctacctcccatctggtgttcctatggtggctgaaggagctggtgtctgataagacccagcacttggtttaactgagaaacattgggtatattcttacagaaataaaagatattacctagcttcttttatcccctcccttcatcttctttctcttcttccctccctccacgctcctgttctcctccttctcttccttctctttccctctctccctttgtccttctctccctcccactttaaccataggaaatatagagcattccgcatggtctttcgcctttaaccttctctggaaatacatgatagaattgggtttgtgatttattgctccagttttgcttgccaaattaaatttacaggtattagaatgtactcatagataggattgtttaagagttgttggctgcttaggagcgtgtgtgtatgtgcaaatgcacatacatgcacttttataacaggaaaaagaaaggtgtgacagacagctgcagacatatggattgtacttacttgctaattgaaacattgcaagggacaattcaagatggcagatttctagtggagattagattttaccatgaactgaactggatactaccagctcttctcttatcactggcacagagtttgctggacattcccagtctaaaacttgggaggagatccaatactttgaaagttgggcaacaagagcgtgccaaatgtgtttgcactgtgttgcccaaccatttaattgtaataatttgacatgctaatatttcaatattcagaagtaatttggaagccaattgctttatctgttttgcttatcagagtcatattgaattctctaggcatcagcatgcaataaacttgttttcaaaggcactctgttaggtggcatacagccctgattaaaaacagcactgaacttagacatgtttcattt

SEQ ID NO: 126139 - DNA, 1125 bp, Homo sapiens
caaagtgttgggattacaggcgtgagccaccgtgcctggctgggaagatctctttaaaaagcatttttatgagtgaggaaatatccaagatggtacccaggaaaaggtccaattttggttgagtaatgcaaacaaggtagttctaagtaagaacaaattaatactttggtaatgttattaatattgattttttaaattcttttttttttttggagacagagtctcgctctgttgcccaggctggagtgcagtggtgcaatctcggctcactgcaacctccgcctcctgggttcaagcaattctcctgcctcagcctcctgagtagctgggactacaggcacatgccgccacgcccagctaattttttgtattttagtagatacggggtttcgctgttgttgcctaggctggtctcgaaatcctgagctcaggagttcaccttggcctcccaaagtactaagattacaggcatgaggcaccgtgcctggcctgattttttaaattcttgatgtgtactttaacatgaatttgaaaaatatatttgttttcatgacatatattgagaagccaccaccagacctggcctttccctgtggcggcatctcttggtcctccaccttcccactccagggcacctccattctcatatcctaggtctgcctgttctgtgatctttaccacaaaccagattttatctgcttagtcttcttctaaccattctatcacatatcatataccactctaccattctttcttccctcttacttcccaagccattgcttccctcttactaacaactgctggtttattacttcttcccatgttcccatccctgttcttagcccccaatacctcccctcgctgactctctacttctgttactcctttcaaatctgactcttggaatccttgtcacataggaagaagttcctttcttccccaaacttttactcacaatcttcttcaaggtaactaaaacccggcctttttctgtaggtgctctatcccctcaagaagggaattgcagtgtttttagctatctgcttcttgggggcacagttccgccaaagcctcccaacttctctttgcaatcctcttacactcctgtctccccagtcctaatgg

SEQ ID NO: 126140 - DNA, 1184 bp, Homo sapiens
gtagagcaggcttcctgagatggacattgactttgtggtggcaacacagtcagttctagacagctttgctgggaggaaaatcaaagagttgaggatcctgacctcatgcttctccttctctctgaattcctgccgagacttcccattggccaaagccagtaagaaactggaggcatatggcagatacaggtccatttctagggcagagactatctggggcaacaaaaagaagacatccagcacagtgttcataccatgcttttctgccattgtggccatataatgaggatgaatcagataacatctaattttttcaagaccttggtgaaagggtacatgataaaagattgttaaatataacatcaagtgagagcggtttactctgaaatgtattttaagtcagagttggccttggctgtactttttcttatactattattgaacaggttcaaaaaaatgtgaatagagatcaaagcagtttaaacagatacatccacttgtgtaaatatccttgaactcccccctgccttccgctccccctcctgttgccacatccattcagcacctctagaggctgttaatacatgtaatgattgtaataaacatggtatttgctttggttccagctggctccaatcaccaaactctgtccataattcctattgtctttgcttactagacaactgcattgttaccattagtagcgacttttgttacggatttctaaatgttgatctttatatattgcactcattgttttcctcaacatgttttaaaatttaaatttaccattatattttctttttaaggatatttagaattattaaacagaacttctggtagaattgattatattgttgagaactttcacgagctaaaaccttgaaacaattttattgatattattcattctttataaagctttcaaataaaaataagcttctgctcatgcatgacttaaactggttttaagttcagcagtcttccatcagaagtttttagaggcacagaagtataataatgtctaagcaaagggaatttatattttactgtcaggaaaatttgttgcaatttgttctcaaaaacttggatccagatttagttgcagtagatattttaaatcctatgaaattacagaagttgtcataatttgagataattaaaatttcagtgacttaatgtag

SEQ ID NO: 126141 - DNA, 1128 bp, Homo sapiens
ctgtgcctttcattgccctgtgagtcttcttacacaatctctgaagctaatcaggtagtgctcttccctccacaggatcatttcctctgttaaagatacatgattactcaaagatattaagttattatgggacagtattgtcctcatattctccagtctaggtgattgcctctatccatcttcagcactgccactgggagtttcctgtggttattgatgtatctagctatcagataattactgagcaccttccatgcatgacactgtaaatgtattgtggccaagaaatggaaaagctataatgcaagatagaaagggtcaagtactatagaagtgcagtggaagctcagagaagagccattacttccagctgggagatcaggaaaggctttgtggatgaagcaatatgtgagtgaggcttgaaagatgggtaggatctggacctgcagagactcagagaaagagaatcccagagagagaatcagagaaccacaccagcaatagcaggtgatgggacatccacatatctaaagggagccagtggccccatgtgagccaaggcagctgtagatgtgaggaaatacagcccttctgctggtaatggatgcatcagagcagaggtgaggacaaagttattggcacagcgctccctgctgtgagactctcatctttgtattgacctcagacatttttttgccatatgtcaaaacatctccttctagcccttagattacaaatgggtgaatttgagatgactccattattattttatgggtatttaatgctttttttttttttttttttttttttttctgagatggaatttcactcttgttggcccaggctggagcgcaatggtgtgatctcggctcaccgcaacctccacctcctgagttccagcgattctcctgcctcagcctcctgaatagctgggattacaggcatgcaccaccatgcccgactaattttgtatttttagtagagacggggtttcaccatgttggtcaggctggtctcgaactcccaacctcaggtcatccgccctcctcagcctcccaaagtgctgggattacaggtgtgagccaccacacctggccagtatttaattcttaatagtttccataacca

SEQ ID NO: 126142 - DNA, 1571 bp, Homo sapiens
tgaaaagttttagagaagagaaaacattacaaggccccacagtaatccattctggtatttaacagttcttattgtcagaaaatacttccttctgtctaacacaaattcctaatgctgcaatctaagtccttctctcagatgtgtcctccttttctgtttgcagttttaatcttgctaaatgaacagcatgaaacaccctaatcttcagaagcatattttctttatgtctttcctttaatagcttaaagcacaaaatatagtggggaccccccccccaccacagtcctctgtagactataaattcatttctggtagcctggattactgggaaatgttgtggctggttttattttcctgcatgcatctcgatgacccatttcagatgggagtgtttgaggaggagagcgtactgcagaatgagctgaatgagctataccttcatgactgcttccacctgacaatctgcaaatcctccccatttaaggaaggcagtgctcatggaattttaaaatgttgaagaatgtgtgtgcctgaacttggattttaaaactatgcttccatttccctcatcacttgcactaaccatataacctgctagtactcatttagtaggtttgcttgcaacctgtgtcaaaaggagcatagtaaccaatgagaaagaaggcacggaccttagaggcatttgactgtttccatagcaaggaaaaacccaatttttaaattcttttacaaatctgagtaataatgtggcctctcaaagcaaatagatttccttaagagttaaaacaacttctaagaggaaacaatgagccctgcagcctgccatatcctgtgttcagaataattttcatttctacttatctgtgaaggttgaaggaatgtctgcaaatatttgcttggtttctatggtgaaagcagagggagatcaaatgtatgattgtttagtgtcaaaatcaaaactatactatactgtacttctacaaagagaatgagtttgttactttaaacataatagacgtttaataagtggtaactattttaagtttcacgagttcaagaggaaatttaaacagtgcagcctgaaggaaaacataggcccttcaggcattttaaaacttcattttacaaaaataaaatggtccttgcactttattaaaaagtcatctgttgactaaagatcatgttggtggactctcagaatgcctggtgtggacatggggacacaactatggcctataaaatttatactataatagaaacactctgtcctgccctgtgttatccctccttatcctgtaactctccattctgctgtcttctggctacccatacatttgttggaacatatgtttattttatgcttgctttatacaacactctgcgagggactgggattaaaagtccacttagaaatactctctaccctcaaagggctggctttgggcctagtagaccgtaaggatacaatgattgagatgcaatgtaagtgctgcaatcatttatgcttgcggaggactaggcagggcaaggttcacaggaattaagaatggggttgtgaagagggcattcca

SEQ ID NO: 126143 - DNA, 1031 bp, Homo sapiens
tgtacacctcagtataaatagataaataaatgccttaggcaattatacatgtatatgaaccaatgccaacagaggccaaaattattctttacaagaaatcttttttaagctattatgtataaattttattctattgccgtagttgttaatctagaacacttttcataccttcagaattacacaaacacatggattttttcctccttgttttgatttgctgctttggacagagttcattttttggagtttgggggcaaatttggaagaacttctttatcagaaaagatacttttcttggtcatacatttaacaaatagtcattgaatgcttgccgtgtgtcagatattgcactaagcattggggatccaaagattagctagtaaaccccagtccctgccactgtagcattcaattttatgggggtaacagagatggaagcagattcttctggtcacaccagatgtcagcaagggctgtaagagaggtgtactgcaggagtgtggagtaggaatctgcttcgtctctcagaatattctggaagactttcacagagggtatcacgaggccctgcttctatttttgccatatgtcagagttctcttttaagtatctacaatagtgatttaaaagtacttttcttcacaatctatacttccaacaaaggactaatatccagaatctacaaggaactcaaacaaaatcagcaagaaaaaaaccacaaacattcctttgaaaaagtgggctaaggacatgaatagacagttctccaaagaagatatacaaatggccaacaaatatatgaaaaaatgtccaacatcactaattatcagggaaatgcaaatcaaaaccacaatgcaatactgccttactcctgcaagaatggccataataaaaaaaaaaatggatgttggcacaggtgtggtgaaaagggaacacttttacactgttggtgggaatgtaaactagtacatcactatagaaaacagtgtggagattccttaaagaactaaaagtagagctatcattggatc

SEQ ID NO: 126144 - DNA, 1049 bp, Homo sapiens
atcataacaaaaagatcactcatcagcttctcctttcctaggcaattctgctttggtctcctttgtttaacttcattactggtaatcaccaaagctagaatcttcagatttttttctggacccatttatagcatcatatatttagttacaagtacaaaatatccaatcaaagtgtcttgaataataataacgtttaaatctgatataagaagtctggagataggtaattctgcaattggtgctgttgcttgatggtatcatcttggttccgataaccgaatattgggaaaataccattccttcttctttggttagttgagagtgtcatccctcagggcctcaagatggctgccacaacttcaaaagcattatatcacatacaacagtattctaagcagtaggtgaggaagcaggggccaaaaagggttttattgtctctttaatcagggaagacaatcttttccaaaagctcttttcaaacttccactttaggtttcatcactcataattgaatcccgtacctacccattgaccaatcagtctgtagataagcatattgctacccaaaagaaaatcaggttatgctagccaggaaagcaggggatggctgttgggtgaacaacgaatgtacaggcccttcattagtctagagatacacccccaccaaggcagcagggccactgtataggtaggaacatctgctgttggtttctttcagaggcgcactgatatattcaccaatctctaataaaatgttttataaagcacagtgcatttttccttacgtgctccacatatgttgaaagcagaaagctttagagtttcatggaaatgttgattagactaagaatgattgcttaccacacccaccaggactatgattccttagattccttaataatagcaatcagcaaacactttttgagtatgagccatctatcagcaatcagcaggtaacattcttctcaggcaaattcaggaagctaaggattgcttttaaaaacagtgaggcaataagaaaaattatgttaaactaagaacttttaaaa

SEQ ID NO: 126145 - DNA, 1044 bp, Homo sapiens
aggggagtagatggaaggaacttgtctccttgggtacgttaattgaaggaaggataagctgtaactgagatggacgcttttattttaatccccccaaatgggcactaataaccataaataaaaacaggaaacccagttggtttgtgtttgattttttttttttttttttgcttattaaatttgagcttgtgcgtaacatcaattaacattccattcttgctgaaagttgatatgttcaaacaggaaaatgtagacaaattatttcatagaggaaaaggagaaaggcagtcataaatacacaatttttcagtatctagtttatactgcatgctttatatttcctatagtgacataagtaaaacatgttagcagctgagaaggattctaaaacaaaaatcagactttattggaaagagtgacggttggaatttaatggtaataataaagggtatgttcctacagggtactgcattttaaaatttccccactcttttgtatttttctatttaaaggaaatacccatttaatatagtaatgcgtcgatttatatacacatggtgacataaaaacttggaatcatagttttttagactgaactggtatgtatttttagtgtctcttgaagagaaaaagactacactcctcttcctggaaatacacattttttagtgggttatgtcatacaggaactgagaatcaacttaatttgtggaatgttaaaggaattacaagttaactgattcaaaactgacatcttaaaactatgagaaatgctagtattttacttaccttgcaaagcctgactccagaggtaccctttctagtatccccttcagaaattaatttctttttcctctctgtttccagagtaatattttgggtttttttgtttgtttttgtttttgagacagagtttcactctgttgcccaggctggagggcagtggccctatctcagctcactgcaacctctgccctccgagttcaagcgattctcgtgtctcagcctcccaagtagctgggattacaggccaccccaggctaa

SEQ ID NO: 126146 - DNA, 1025 bp, Homo sapiens
tttagtactaggtgctataaaataataatcaccattaataacaatattattattcactggattttaattgttgaaatggcacattaaacaatagagaagcaaaaagtgtcccctcacgacctcctccttcctctccccagcatgagccactgaaaccagtttggcagatatccttccagaatgtttcctattccatcaaaaactattttaaaattgtcctttcattaataaaatacaggttgagagtgaaattttttgcagtgttcttgaaagtgtgggagtggaaaggcaggaagggagacaattcactcattcagccaatacctgtcaaatgcctgccgcatgccaagcagccacaaaatgctaaggattcggcgtccagcatagcaaatgctcaacttccgttttgagtgtttactgattttctttttttaattttattaggatatgatgtttcagcttctccgaggtctggactttcttcattcacaccgagtagtgcatcgcgatctaaaaccacagaacattctggtgaccagcagcggacaaataaaactcgctgacttcggccttgcccgcatctatagtttccagatggctctaacctcagtggtgagtgagagagtgctgtccttttattaaacttatttttcctattttgaatgacagtctgtccctcttccatgtctctaatgttagtactgcccatgactagttggtggatagaatgtctttgcccatttttatatggcagtgggtaggcagaaagcattctgcttacagctacagtcacatccagcctgggcttgttgtggacaggatccattgcagaaatagcctgttgcatcttagccactggacaggaatcagttacaagtttccaaatgctttctgccataaccactgttttcagagctgtatgtacaatgcctagggaacacacagctcaaggtcagggaagaaagagcacgagcaacgttgacctgtctgcagcatcatggttttgagaaacagagtgcctacac

SEQ ID NO: 126147 - DNA, 1023 bp, Homo sapiens
aaaggggtcctcctacctcattgaaagcagggagtaggaatgaaccacaaatctgaggtagaaacggctttcttcaatacttctgccatgatgtcaggcaggaaacttgaggcaccagttttagttggccctcttagagcaagagatgccaatttcaaaaggtagtcttcttactagctgggcgtggtggtgtgcacctgtaatcccagctactcgggaggctgaggcaggagaatcgcttgaacccaggaggcagaggttgcagtgagccgaggttgcaccactgcactccagcctgggcgacagagcaagactccgtctcaaaaataaataaataaataagataatcttcttatgcaattttaagtatatctaaaaattgagaaataaaagtatttctcaaaataatgtgtagattctgagaaatttgcctcattcggtatttataatttttcaaatgttagatcacaaaggaaaatcagtaaggtacacataaatgcgagccctcatgagtatgggctcaatcactaattatgggatctctggtcttacagatgggtagactgtaaatgatttttcatctactcttgttgctgatctctgattttaggggatcatcagtaattgaattctatttgagattaaatccacttctgaacatcaggttgtgacatttattaagttattaaatcatatgcttcagtattcacaggtgaagcatataatttaataacttaataaggtcacaatttgatgttcagaagtagatttaatcaccataaagtaggttgtttctttggttaaatatgaaaatatagagaaagtaaataaattaggcttgcttcatgtttaaaaagcattattatttcagaattgtttctttggcctaatttcaggatctgtcgtataatgtcaggcttcagttgaagcagttacctgaagattgtgtagactctagaggaataccagaggattggaaataggaatagcagagaaaataccaatttagtgaacaatgatgag

SEQ ID NO: 126148 - DNA, 1034 bp, Homo sapiens
tctaagcccaggtgaagtcaggtgtggtgctttactaacgtcattgatatgtaggaaatttgtttaaaggcactgaagttttattccttaaaatgttctattgaaaaatacttactcattaataggagatataaattaaagagatgcttaggaataggagaattccaactaaaaatttttaagccacacaaaaatctttcctttaaaaaagtgttcatcactcattcatgatttgacctttgaaagttgctatttgtttcatatacactaatgatttaacagttctctagggtcttaaattagtaaaccattaccagacttgcaagtgtaatgggtcagaattcctactcctgttttattggtaaggaaccaaaactatattaaatttaaatatatcatagtcataggtttttagtgctgacaccaatgtggctaaacctagtactctgaggctcatatattgaaagccatgagtactcagaatctaattttcttctaattgtcattctaggcctttagcaaatttaagctagcagttttgctgatttttatattaccagtgttcactgttgtcactggccatacttgttaattttttatttcttggccaaaaccaaagaaaatatttatcattctactgtagtatagtcataccacttttagattagaatgttaaaccaaatgtagcaaagattggggactgcaaggcataaaataatgtttaggaactgcaacattaaaagataagtttactattaagcaatcagatttagatcaatctggaaatagctatcctcaatttaagatgttctaggccgggcgcggtggctcacgcctgtaatcccagcactttgggagattgaggtgggtggatcacaaggtcaagagttcaagaccagcttggccagtatggtgaaacctcgtctctactaaaaatacaaaaaaaaaattagctgggcatggtggcacatgcctgtaatctcagctgcttgggaggccgaggcaggagaattgcttgaatccgggaggcagag

SEQ ID NO: 126149 - DNA, 1034 bp, Homo sapiens
tggaaaatgctgctgataaagttttgttgttatttgcattctgcttaactgaacttccccgtagatcttttagatttatacacatcatgtgcgggtcttcatgaaaacctttttgtctgtgtgaattaggtagcttaaacagactcctgccttatcattcgttgtttagaaatgagttatagaattcaccatcattctagatagaagttaatagctaaaaatagtttatcttctcaacagactaagaaatgtctttagtgatagctaaatgacgttctcagatactgactgatacatttagaatttgacatactgaatgatttattccttttgttttagattaatattgtattttttcccatctggctctcattaaagaatctggtgcttaacaatagtcccatttcttcctgagcagtttcaaggacattaaggccctccaaatgtaggtatgcctgatagttacctgttcttggccatcttctgtctgtgcacccctctttcctctggcattctattccacccctgaagctttagttctctcctttatgagtttgtcagaaaccctgtgttcagcatgcagagcagggcatagtcctttttcttatacagttttctaggcaaattggactgctcatcattctcttggtatgatctgtgattttccaccttggtggccttccttctcatgccatttcttttgctccttctcaccaggctatctacctaaatttttcaagtgccgtctcaaaagccatttgatcaactcttatagctagatgtaatctcacatgccttataacacttgttctgcatatctctacctctttatcttgttttctgcctttaattgggattttttaatgtacatatctcatgtattcagtcatcctcatgtcctgacagtgtcttacacaatgatttatacacataggtacaaagtaaataagacacattgtcaagctttctttagatgtaagtattttcaaaattatttttaaaatgactttcaaaggctttaaacatagactatc

SEQ ID NO: 126150 - DNA, 1021 bp, Homo sapiens
agggtatctcatttgtcacaaagtctccccatcactgacctctgcttcactgcagctccaaatggtgtgctgcattcagaggcagaataacagagtggttagaaaatcagattctggagccagacagtctgatttcaaagcccatctccactacttactgtctttgtactttaggcaaagtattaaacctctctaccactgttgctgtccattttttgtttttaaacagctttattgagatgtaatttacataccataaaatgcacctgtgtaagacttcaggtcagtatacttactgagttgcacagctatcaccatgatctaaatttaggaaattttcatcactccaagaagaaacccagtacacattatcagtccccattcctccacactctcccactgctcattgtcccaggcaaccacaaatccactttcgatttctatagatctacctgctctgaatatttcatataaatgaaataatggaatacatagtcttttgtgactggcttctttctcttagcataatccctttaaggtttatccatgtcatagcatgtatttgttcttcatttctttctattactaaatagtattccattgtatggatataccacaccttgtttatgcattcatcagttgatggacatttgggttatttacagttttgggctatcacgaatgatgccgcagtgaatatttgtttaccttcactgcgtcatcattcagtgaacatttgtgtctatttcttcgtctctaaaatgagtaccatctcatacagttgttaagattttttaattaactagtaaatgcaatattttagtgtttgagtcttcgtttaacagcagttacaaaatctggcttactcagaatgccacgctttcctaatgacatcttgaagtatcctcacttttactttattttactttgacttttccctaagttataatttagaaaaatttcatttattcaataaatatttattgaacacctatgtatcagacatggctgtgggtgccac

SEQ ID NO: 126151 - DNA, 1041 bp, Homo sapiens
tataaaactgcatgccaagacttcatggtagtttttttttggtcataacatcctttccaatttcaactatagcacatcatgattacactgagggagtttatgaagagtaggtttcatggatgaacattatcagtcttgaccatagtgacatcttgagctcactcattttggtgggaaaatcatgctttcagagtgaaaagttggaacagcatgacggaaaatggatttttattttaaaccattgagaagaaatgctgtatgactttatgatggctaggagataccttacatataattacctcacaagctgatgcttttaccaactaacccccaaagcagcatctctttgatcctgagtgacttgagccaagggaagtggcaacgtgatggtggtgaagggtgtggagtgggcagattacatgattcagtctccaactcatcccaagtctagccatgcccctcttagtatgcctactttaagggcataggctatgtggccaattttccttcatcgagatttcaagctctttgaatcaagagagaaggcaatatgtttatttagaggttaagaaattataggctttcagagttaataggttatctaatttttctactcattcgttcagtctttgaacctagaattatacaaacagtacatgaccagtatttgtcccccaagatcacattacagcagtggtcttgaaccaggggtgaatttgttccccaggggatttgacagtctttgaacacattttgtttatcacaactggggcggtagagtttatagatgttactagtgctgcgactactgccactaacatctaataggtagaggttattgatgttaagtatcctgcaatgcacaggatggctccccacaacaaacaaatttcaaaatgctgatagtcctgagattcagagctctgcatttcaaaaagacactagttaacaacaatttgtagaaggcaaaaaattataaaggtctgcagcataaattggaaaaaacacataagtccaaccatctagcattaacaagctcac

SEQ ID NO: 126152 - DNA, 1065 bp, Homo sapiens
aagcaagcagtatgattccctttctgtttccctctcaaattctctacaaccttgattttcacctccatcttcttttcacggttatttactttgtaattccagtaaacgaattctggcaggaatagactgctaccctaaagtgatttgtgatttaaaggacttcagggtccttaaaaattatcccattttacatagaaataaaatcccaaatcatgaattactatgaattgcatatattttcttggccactgttgagaaaggcaaaaaaagttgttagatcatgggtgtacagaccaaggctgggaatttagttgtaacttacttagaagaaaattgctccttgtcagaaggctgcagtcaactcacatatatgccctttgtttctgacatagaagagggtctgatcaccaaattagtatgacaattaaaaataaattctggtgattgtgaattggcatcaactttatatatgtttttagaaatgattgagcagtggttaatgtctgtacggtaaaccatgaacaaacttttgaaccacagctcagtaattcaatatatgatatccttgtgaaaggtactgtgctgtcatcttaaaaagtttgagtgtgggccaggcacagtggctcatgtgtgtaatcccagcaccttgggaggctgaggtgggaggattgcttgaggccaggaatttgagaccagcctgggcaacgtagtgagacctcatttctacaaaaaatatttcctaaaatttagccaggtatagtggcactcacctctggtcccggctactctggaggctgaggtgggaagatcaaggcttgagcctaggagtttgaggctgcagtgagccatgatcacaccacttgaccccaacctgggagacagagcaagaccctgtctcaaaaaaaaaaaaaattgaatgagaaaatttaaattaaaagtctgaagctacacatgggcctcagaaataacaaacactattacttattgattattggatattattgattacctaagagaggaggtcaaatgtgggttcacattccagttctgccacatgactatgtg

SEQ ID NO: 126153 - DNA, 1051 bp, Homo sapiens
aaacattcatttatcctaaaatacttttatttttagaaggttcaaagtataatgttaggaacattaactctcacacctttccagcagcagagcaagaaaaacaaaagaaggccaggcacagtggctcacacctgtaattctagcactttggaaggctaggatgggaagattgcttgagcctagaagttagagaccagactgggcaacatagggagaccctgtctctacaaataataaaaactttttctgaaaaaagacatctttgcatttcaagggtagacttttaaactttagtttaaaagtttagtttactcagaccagtacattttaaaactttttagaagaacccaagagactgtctgagtcgtttcaagttgggagttttagctgatatagtatacatttcaaccatgtagaatcactttaaaaagttattaaataatcttgggttaaaatgggatattttcttgttgaaccttgagaaaccaagagacaggtttggagattggggctagaagggactcccagtgctgatcatgaatgaaatacattcaaattatgtaagttcccttgacctgggagaacatagcttctttgaaatgacttttttttttttttttttttttttttttacatattaagactcaaaagaagagtggtaacattctgctaattcttacaaattattttaagcccatgaaacttaatcagtggctatttaacttctagctgattagatgagaactgatgccacttggttctcagctaaagttttgtgaagggaagaagtctgtttcacagacattactactcaagtattgactgactcaaagtgatggaactgatttcaaggagagctgtatgaatgtgactgactcggtggtaccaatccaatcctagaaaaactagacttttgagatgagtcaagagaaacatctttgtttaggaaagatggtataggtttggtttttttttttttcactttagttgataaaagtaagaggtgaatccatcattaggcaaatagaaaatggtctggagttgtatttat

SEQ ID NO: 126154 - DNA, 1022 bp, Homo sapiens
gcagttctttcttctctttaaaaatttactcatctttgttttaattgccttgttttgttatacttaacctaaccagttttatagaacaactgatatttctgataattcggttaccaggaatttcctgattgagtaggcaacataaccaaaaggctaatcagaatcaagtgctttttgaagattaaattttacctccctaacatagggattgatctatatgagatactgacacatagctaatataagtgaacatttgagctccatttattcaaaaaggatttaggaagggcatatgctttaaaaaccatggggctaggtgctgggaaagataccagggtaaatcatacctagctactctcctgaagcagttcttcccatgtttgaaggaataagatgatcaccataaccctgatacatgataggatcatgtgctgtaagaaagatacaagccagtgcttacctgtattgtttctagggattatatttattagtgtaacagtaaaagcaattcaaattcaagtattggctctggaaactaaaagtcattacatatcagtgaataaacttgtgatgtttaaatattataattagaatagtcactgctttaaaaacaaaacaaaaaacccaaagaaaaggctgtaaagcttaatgattattcaaggagagttttctaattttctctcttttttaaagatcttagtaatatattgcataaaaggtgagtaaaaatgtgattttctctggaaaacctaattgttaacagggtaaaagaaacatgacatatttgactctgtaaagccaggtcttcaattggattagttcatgagaatccttctgaataaaattgctatttgtgtggttgaataatacatttactagggcttttttcaataaaagcaggaaaagcaggagtttaattctccttttaaatatcagtatgttaaaagtatgtttgttctttctgtctctgagagttccttgaaaagtttctgatttttcaaggttgtttagtaaataaacat

SEQ ID NO: 126155 - DNA, 1074 bp, Homo sapiens
ttgacttttcctaagctatttagcaaactttcggtaatatagttcaggggaaaacccaagaaaatatcttggaaatgtctgagaagggaaagaagaatgcattaaaatgtactgcatttatattatgctatttctgttaaaattatagtttctcatgattattactcaataaagataacatgtacacaaacacataaatcaggttaaaaagtagggtaacttgtttcaaggttaaactagaagtgtattttaaaataattgtgtagtacattatagcaaaatctcatttctgagtttctggaaaatatattttataaactcaaatagccaatataaatcagaaatgaattagatttaggtgtacattatataattattatttgtaactaaattacacatttccttaacaagttaaaaattatagaccaaaatttaaaattttatgtttattttagtgaaaacaaaattgtacaggtatttgatatataaatgttcacacatgaaatacattccttgtgtgacattaagaagtctttcagtgtaagttacaccaccatatttggaaataagtccatgaaatgtaatttttaaatacctgtaagatgatttgcaactttagaatatctggtatgtagtgtgaaaatactggttggagtcattattcttgagttctatatattaattctcagaagactcctaaacaaagaagttggaatttggttcacagtttaaaaagtttgaacatattttcttatgataacctgttacccacagcagaagttatccataaacaaaaataatctggtatttactaattttatacaatcaattgtaaaactgccttgggtctgaagctttcaccaactgggacttaatgtgaaccataagcaggaagagtgaacaatgataaattaacataaaagatagcagtatcaggaaaagaagaggacagagagttaacactcagtactaacatatataattaaataaagtttcattgttttttacattgtccaaatgatctagtaacctaaatcatggaatttctgatctagcaatggttgttgtcaaatt

SEQ ID NO: 126156 - DNA, 1136 bp, Homo sapiens
acttattctacacttctaataaaaacagaagttgcagaatatgggagatacacaggtgtgcgtatcattcaccctctgattgccctgtactgtctaaaagaactggaaagaagctatcacttggataaatgtcaaattgcattgaatatattagaagagaatttattctatgattctggaataggaagagacaaatttcaacatgatgttcaaactcttctgcttacaagacagcgcaaggtgtatggagatgaaacagacactctgttttccccattaatggaagctttacagaataaagacattgaaaaggtcttgagtgcaggaagtagacgattcccacaaaatgcattcatttgtcaagccttagcaagacatttctacattaaagagaaggactttaacacagctctggactgggcacgtcaggccaaaatgaaagcacctaaaaattcctatatttcagatacactaggtcaagtctacaaaagtgaaatcaaatggtggttggatgggaacaaaaactgtaggagcattactgttaatgacctaacacatctcctagaagctgcggaaaaagcctcaagagctttcaaagaatcccaaaggcaaactgatagtaaaaactatgaaaccgagaactggtcaccacagaagtcccagagacgatatgacatgtataacacagcttgtttcttgggtgaaatagaagttggtctttacactatccagattcttcagctcactccctttttccacaaagaaaatgaattatccaaaaaacatatggtgcaatttttatcaggaaagtggaccattcctcctgatcccagaaatgaatgttatttggctcttagcaagttcacatcccacctaaaaaatttacaatcagatctgaaaaggtgctttgacttttttattgattatatggttcttctgaaaatgaggtatacccaaaaagaaattgcagaaatcatgttaagcaagaaagtcagtcgttgtttcaggaaatacacagaacttttctgtcatttggatccatgtctattacaaagtaaagagagtcaattactccaggaggagaattgcaggaaaaagctagaagctctgagagcagataggtttgctggactctt

SEQ ID NO: 126157 - DNA, 1036 bp, Homo sapiens
agcaatgaagtcttccgatttgcatcagcttgtatgaattcacgcaccaatggcaccatccattttggagtcaaggacaaaccccatggagaaattgttggtgtgaaaatcaccagtaaggctgccttcattgaccacttcaatgtaatgatcaaaaagtattttgaagaaagtgagatcaatgaagccaagaagtgtattcgggagccaaggtttgtggaagtccttctgcagaacaatacaccatctgacagatttgtcattgaagttgatactattccaaaacactctatatgtaatgataagtatttctacattcagatgcaaatttgtaaagataaaatatggaaacaaaaccaaaatctttcactgtttgtaagagaaggggctagctctagggatatcctggccaattccaagcaacgggatgtagatttcaaggcatttttacaaaatttaaagtcactggtagcatctagaaaagaggctgaagaagagtatggaatgaaggcaatgaagaaggagagtgaaggactaaagctggttaaacttctcataggaaaccgagactcactggataattcatactatgactggtacattcttgtaacaaataaatgccatccaaaccaaataaagcacttagattttttaaaagaaattaaatggtttgctgtgttggagtttgatcctgaatctatgatcaatggagtggtcaaagcttacaaagaaagtcgggtggcaaaccttcactttccaaatcaatatgaagacaagacaactaacatgtgggagaagatttctactcttaatctttaccaacagcccagctggattttctgcaacggcagatcagacctgaaaagcgagacatataaacctctagaaccacatttatggcagagagaaagagcttcagaagtcaggaaactaattttatttctcacagatgaaaatataatgacaagaggaaaatttttggtagtgtttctattactctcttcagtggaaagcccaggagatccactcattgaaa

SEQ ID NO: 126158 - DNA, 1056 bp, Homo sapiens
ggattacaagaaattatattgttgcatcacttattcaacaaaacatattgagtttctctgtattatgggtctttttctaggtaccagtgctataaaggtgaagaaagagaaggcatcaatagaaaagatattaatgagtagtagcttttataaacttgttcttccaccagtcataggtaccttaaccaccatgtcctgtccaaacctgctcccagattttgcccaagtggcatttgacttgtgtgcaaaggagagtctgagaaggacttagcagtagtagaagtagtcatagaagaggaagaagaaaaaggaaaaggagaaagaggagtagggagggaaagggaaggggagagggagaaggagaagagaatacaaagaaataagtaaagaaaggcaaaagaaggaggaaggagagaagaaaatgtatctgagaaataggaaggaaggaaatggacacaactcggtgactgaatgtgggaccagggaataggcaagaggaatgagtctgagatgacatttagctttctgtcttaggttggtagttagtagggccattcacttaaataggcaatacagacagaatagcaattttgggggaaagaagatggtttagttttgatatatcagacctgtatggtgcttctggcacttccaagcagagacatccagaggcagctgggtgtacggttttagagctttaaagatatagatttgggatgtaccagtgttacatgaagacatggaaatgaatgaaatcatacagaaaatcatacaggagaataaaaccattctgtagagagagaagagaaggtgtagaaggatgagaatttggtggacatcaatattttaggccgtaattcttaatctttgcgggttgatgacatttctgaaaatcagatgatttctagagaaagccaaatttcacagacttacagaattttgtaatttccaaggtgttgagactccccttgtgaacttccatagatttcagctgtttaaatggtggaagaggaaggggagcccatgaaagacagtgagaaggggaatcaaatagaa

SEQ ID NO: 126159 - DNA, 1058 bp, Homo sapiens
ggggtgaggaagtgaactctgtgaggtagatatttgggaaggagcatttccagtggaaggaaaggcaaatgcagaggtcctgaggcaggagcttgtttgagaaattgcaagtggcctgtgtgggtgaagtgagtgaggagaagagtagtgggagatgaggttaggatgaggttagatgactgaaggcaggaagctagatcatgtagtaccttataggtaatagcaaggtcatggctttcattctgagtgaaatggcaaatagaggaatgatataattggacataacacttcagacagaccatttggacccatgttttaagaacagattgaagagcggaaaagagcaaaaccaggggaggtgaatgatgaggctactgtggtaatccaggtgagagggtgggtgtaagccttccaccctagtggtggaagtgttgaaagaggtcagactgtgaatatgctgtaaatgtagaggtgacagaatttcctgacagattgggtttgggctgtgagggaaagagaagcatcaaggatgactcaaaatagtttggccctagcaattggaagaatgtaattgccatttcctcggatggataaaactgagggaggaacagattgagggaagggacatggtttttggacttgttaatttgaaagcctcttaaatattcaactggagagatacagcaggcagttggccagatgaatctgaatttatggggcgaatccagggtatagctgaaactctgggagttacaaacatgtagattgcatataaactggttaagatcaccagtggaatgagtgtagatatacaaagaatctaaggttggagcttttgagaatccagtgttaaaaactcagggggaagtggtggatctaggaaagcagaatgagaacatgcagcttgtgaggtaagaagtctttagcttcctgaatggcacctggaatatagcagatgctcaataaatatttgttgcatgaatgtgggatgaagagaacaaccaagaagactgccttgaagccaagtaaagaatttaaaagagtaaggagtgattagc

SEQ ID NO: 126160 - DNA, 2134 bp, Homo sapiens
attgaggtgttcttcccttattatctgtggtgagacagattttagaatattattaaatagtaaaatttatatatctgtgatatgtatgtatgatatgtttaggtagtcacttttttttcttttgttggacattaaaatttttatcaaccttgttgatgtgcaaggaattgagaataaaatctaaatattcaaactggctagttttcttctgtagttgttagtgttaatggtcggctagttcctaatttcctgtgaacttttctgatttctgttggtttgtatccttggtcagaatcgttccaggtagatgtgactgttaagacaaatgatcatttatttccatgcagatataattttaacagctacaattactataattgtgatttttttttcttaaaggaagaattcagggaacttcgagaacagccaagtgaccctcaagctgaacaagagcttattaatagtattgaacaagtatatttttctgtggattcatttgatattgttaaatatgagctggaggtaaacagaatttcattaaaacataactaaggcctgttttgttcagtgattggatttatgagatttgaatacttttttgaggcatttatgtatttttggtaccagaataggtctgtgattaccacattgtgattaaatcaactgtcagcattgtttggcgatgaaattattattttttgaatgtaactttaaatacaaccgttcagggaaacatttctgtatttttggttttcaattgttagtatttaatgtgttagtatgctgtttctatcctattttatagtatctatgtttagagaagctcagacttttaattacaaaatatgtatttacataattgtttagtgatgataaaaattcttatgccatagtgtttataatactgacattttaaatttataagaactttaacgaaagtcagaatagtgaaatttagtcttagatacaaccaaatgctgtatgcatatatactttatatgcattattcacagtcagtccccagctcagtttgaagtttcatcagtcagttgactgagattgtttccctgtatatggtatgcattttttggttagtttcccatactgtcctctgaaagctgatgtaatccagaatgtagtccaacaactgtcacacagtagtacttatggtttgtaatattccagaggagaaatctgttttgagttctatcataaacaaatagagatatatctgtggatggtagagttggggttaggttagttactgtctcacattctcctgtcacaggccgtggcagcagtgtctgtcggcctagggtccagagtccccagtggtagtggggtttctcagaaggcagagcagcagcagtgggggtaacaaggctgaatgaggggtggaaccagagggctgtgtactaaagatgtataggcttttgtggttggaacctaggagggaggttgggaggacaggtggcatggagggcagtgggatgtgacactgttttgtatgcacagtttgtagttcactagtcagaagggtccaggtaaatgaaaccaaattaaacaatttattttttcctcttctttcatgaatttttttctgtagaagcttccacctgttctcaatttgcaagaattagaggcgtatagagacaaattgaaacaacagcaagctgcagtaagtaaaaaaaaaacacatttctttctggcaaaactctagatgaaacacaacagagaggtataatgtttgcagatttatggttttaactaacaattaacatagaaacaaatcttgttatttaacatgactgattcaaatgatgcatttacattaaaaatttaatgcgtatggttttccttatgttaccttggtagatttacttctagaacttggaattttctctctggaatcctaaatgtgatcaaagaactttgaactttgttttagattagtaagtacctttaggctccttgtcatagacgtatgatttccctacccatagttttgtaactgagtattcctttttgttttttgagacagggtcttgctctgttgcccaggctagagtgcgattgcacgatcatggctcactgcagcctctccctcctggactcaaataatcctctcacctca

SEQ ID NO: 126161 - DNA, 3479 bp, Homo sapiens
tatcattgatattctaagaggaattaaagttttttgattctgtaacttttggttagaatatgaacagagatttttttttatcaggggctttaagaaaaaatgtttctattccaatgactcctgttgttgttaccttaaggaggaagattatccaggagctattcagttgtgccttgaatgtcaaaaagctgccagcacttttaaacattacagttgtataaggtaaggtcatgtaaatgttttaaagcagattctgttgtcagcttcttatgtagcagctgtgtaaaaatgttaataaacattgaaaattagtataaagtgttgtgttctagtttaacattcatatttatatatgggcagtacaataaaattataaataataggctttaaggtgtgaaagatcagatacttttcattcctgctttttcttgtcacctcattgaaactcatttttcatattttttccaatccaactgattctatttttatagagttgtagacaagaataaattatctgttcatatctccaatgcatctcttgggaattcttccttaactttgcccagcttataaatattgaggatattattgcagcttgttttggagatccagatggttcaagtgtttggctcatcatgataaaaagtcttttggaaaatttaagtatggtttcaatttatataataataatgtttgtaatagttaagtgattatgtattcaatgtgttatgtcttttgtttattattaaatatacaacagaaaaatagccactgcatattttgctattatctctaactttattaatagcattttggtttgcttaaaatgaaggatttgcattgcttgtgacagtcttggggaagctctaatccctaggtgtaatttccaacattcctctagagccatcacaaataaatgtacaatctaagtaaaatagtgtgcttgccaaacaaatctagtttcgaattaaattcatacccatcccagattgcatcccctttgtctctcctatatggaaattctgacattcagtgagcatgactcactgttgttgtagatgttgattgctagtacctgaaaactaaaagaattataatagagcaaaacattaatataagtttgaattaatttttaaaaaattatctcatattacaagtctttgctggttataggctaagggctagatattttcctcccagaaatgctgtttaagtctctatggtttttttttttctttaaaatgtgcagattgaagttacatgtttttttgtttgtttgtttgtttgtttgttttttattttaaagatggagtctcactctgtcgcccaggctggagtgcagtggcgtgatcttggctcactgcaacctctgcctcctgggttcaagcgattctcctgcctcattctccagaatagctgggattacaggtgcacgccaccatgcgcggctaatttttgtatttttagtagagatggggttttgccatgtcagccaggctggtctctaactccaccgcgcccagcttgaagttaacacattttttatttggttaggatataaattgagtagtaccagtgatactttcattttgtccattttgagagtgattaactgtcattagtagaaacttgacgatgtcatttacacttattaggttaaataaatagagaattagttttagtgtgttgaatgtatttagagatttccaacaagccattctgggtcctgaaaaagcaaatccatttgaaccaaagcatccatttagttcattttgtagtgataaatctgttatatagtaacagcttattgggtgaaaataattcaggcagtttacagagtgtttatgccaggtactttgctttgaaattgtcagtatggtgataaaccacatacagtgtaatcagtataatccttggtttcataaagaacataatctatcaagaaggacttatattaaagtaggcacccataaaattaggctgtaggccgggcgcggtggctcacgcttgtaatcccagcacattgggaggccgaggcgggcggatcacgaggtcaggagatcgagaccatcctggctaacacggtgaaaccccgtctctactaaaaatacaaaaaaattagccgggcctggtggcgggcgcctgtagtcccagctactcgggaggctgaggcaggagaatggcgtgaacctgggaggcagagcttgcagtgagccgagattgcgccactgcactcccacctgggccacagagcgagactccgtctcaaaaaaaaaaaaaaaaaaaaaagaaattaggctgtagagagaaggaagttgtgcatacagtggaagcattcggatctaactctccttccgggatcaagactaaggaggacctgaacgaggagcaggaagacttgaggtaggccaggatatgagagttgtgaataggaaactgtctacaccagaaatgaaatctttgttgcggagttaccaagcaaaatgaagactgaaaatatgtatctattggatttatagcaacaaagaagtcatagttgaccttttggggacagatttggtgggagttggttgaactatcaagtgtaaggtgaggaaattttgtgatgaggacagatgcagaattaagaagaggaaacctcaatattggaaaattggtaggagagagtgagaagctgaaaataaaatagcataataatatactaaggctttgcagggattatagcagagattgactttgaaaaggtcactgtctgttataataggaaagaatgagcgtggaatttggtggcaggaaattgagggagcaggtgatgtgttgaaacttttatataattaaaaatctattttagctatgctaaagtaaatgtcttacatgatgagtgttaactgtaaaaaatgtctttgaaagaaattcttatttgggcttttaaaaattgatatcaagtggcttctcagcactttttaaattaatggatatactgatatgtggaggaggtgtggctacagttatcgaatgaggttaaaaggttgaaatggaaaagatttaaattaatagttattttaggtaatacagtgtataagaagcatgctatgtttagatatgtgagtcatgcatgtgataataagaagaattggtcttattctctgcaaataggtaaaagtacatcacacatacattcagatatcccaagaaattctttgtaatggggttttactttaggtatcttaggaaaacttagataaagttgtgtttttaacttggtgatttagtgacagtgtcagggtgactcagagagcagggctatcagttggagctgtctggtggtgatgatagcccctccgctagcatttcttctccaccccataccagcacagtatcctttgccagccaccattcacctgcctaacaccattccctctttcacttcacctgttgtttcactcttttgtttatatgggagaacataataagtttgt

SEQ ID NO: 126162 - DNA, 1025 bp, Homo sapiens
tccacacttttaaaatgtatttaattgacttgggcttgtggaacttagccgaaggcaagatttaatctttgcttggacatgagtgaattagagtgaataagcattttacattctagtaatcttaggagcagtaattaacttccaactgaatttatatattctcaattttaaaaacatttatatctattctaattcttgttgataactagagaatcataaatgttttccttttagaaatgatttttgagagaatcaccccatgatatagaatatttctgaattctgatgtgatttttaaaaaatattttaagcaagtttatatgcacagtatacctacttgtctacttgttaattttttcttggcagattatgtgttcctcttttctttcctagtcacatcactcctttattggaaataaggtttttgtttttggtagagtgcaaactctctaaggagagttacttggaatagctgagatggaaaaacttaggactgactcttatgattctgaaaataggaaaaacaatttacatatttgcttctgcataaagaaatactgactctatatcttgtaagtctcagattatatgactaggtagtttaatacatgaaatgccaagtataatcggctctctgtatccatgtgttctgtgtctctggattcaaccagctgaaaatggaaaatatttggaaagaaaaaacagcaacaaaaataacaatacaacacaaaaatcacaatgcaatcataaaaataataaaaataaaaaataatacaatataactgtttacatacatttgcattgtattagacattataagtaatcaagatgatttaaagtataaggaggatgcggataggttatatgcaagtactgtgccattttatataaagaacttgagtatccgtggattttgatgtctatggagggtctcagaataatcccccacatagactgaggaatgattatcatataatgatgcacccagttggttgaaaaatgaaacagaagtggcacttcctctg

SEQ ID NO: 126163 - DNA, 2540 bp, Homo sapiens
gattaggtcagggatttctttctttctttttttggagacagagtctcactgtgtcacccaggctggagtgcagtggtacaatctcggttcactgcaacctctgcctccctgattcaagtgattctcctgcctcagcctcctgagtagctgggactacaggcacacgccactacacccggctattttttaaatatttttagtagagatggggtttcatcatgttagccaggctggtctcaaactcctgacctcagatgatccacctgcctcagcctcccaaagtgctgggattacaagcgtgagccactgcgcctgggcaaggtcagggatttattaacagagttaagtgaagttaagtgaagacagacatctagttagatccaaagtgatcttaggaattctgttatagcctggttatatatggtttgaaggatcacatagacacttcatggtacttaagagttgttggtttaactttagaatgttgaaaaatcagtttctctgaggtctgctgataaattctctgcttcctgtaagtagattgaaaaccactggaataggctctgatttaaacagactggaacgtcagtgtcttagggccatggagatacagtataaacttggaagtacatttacttaagctcattctaaaagttttataactttactgaaccatgtacaaattgggcaattgagtaactcgtcttcagcatataatagaatcatgaaacattagagctggaagcaaccctttctatctggcccacctttatgtaggaaactgatgcccagagatattaaaggacttgacttaaatcatatggttcattaataacagaccagggaaagatcattaagatattatcgctgtgccatcttgtctttttgtatagtcagatttgttcaaaatctttatttctatgcaacctttctaggactcattcttgtgagtgtatgtgtgtcctagattagttgtttaaagaacactattaattggttctttatggataatttattcctaatatttcctgtagtgatggtaaaaaccctttgcagaattgtttgattcgttccattcagcttgcagaccgcttttaaaggcttttagccttccatcttagaactggtaatttcttgaccataatgttgcatttatttatcaaagtgtttatgaatagatccttttaacatactttaattaattgatcaaaatggattgaattcatgtttctaaatgatggctaagagcttctttaaaagctgtacagttaatgtccactatttaatcacataacttttatatatgtatttttaattagtagtaaattgttgtcaaattgcagttgtacattttgaaagcatttttaatgaaagccaatttttgatttatagatttttatgtttgtagtcttccatatgctgtttaccttaccacatttgcattaaatcttaataaatgggatatagaattacttacctttaataacagccataaaaacatctaggtttattataatttcataaaccaacactaaagcccatttgttttgatagagaagctgaagaaatcgttgctttcacttgtgaatgaattcagatatatttctttttcctccagactcaaaatattccctaaaggaaaatgtttatcagttctgaattactcattattccacttgtccttgcctctctgcttctgttactctaggatcagccttgggtgaaattttgaactccatatgatagaggaactgtctttaactcttactcatctctcttttcttgctaaggctcctgcagaccagagttcagtgtggttcttctaaaacattctcttccctttcctgctgtctctgtagttttatttattgaggtagagaataggggctaatggaatgatggcaaaattttaccatttttctttcaattacaaatttgacttagaatatttattacctgctctgagttaggtagtaaatttagttctggggagtcactggtgagtaagccacagtgccttaaacacttgtgccttggagacacagccacaggtattccttactgtagtacaggaattcgtaaacagagtattatgaaggttgtgggggtagttacttagcagggaaggacttcccagagaatatggtattcgaattaagcctggaaagatagatggatgtttgtgagtgagaaaggaagaaaggatattcaagttattgtgagcactatgtacaagaactgagggtgtgaaagtctggagtttggttcaggtgctgtgcacagtacgtatgtctaaaatataggcattaagaagtctatgtgaagttatttttttcatgtcagattgttaaaggtcttacatgccatactaatttggggcttttctcgttagtttaatagggagccaccaaaagatttaaagcaggagattaatgtggttttatttttgctttacttaagagctgcgctcagatgtctttagggaccaggcaggtcatataaatgtgaggctgccagatgtaagaccataggaaatggta

SEQ ID NO: 126164 - DNA, 1360 bp, Homo sapiens
gaatgcaagatgacgctgagattttcagctttatttgagtaggtggtgatgctgtgaattgagacagagaacatgggagaaggaacagctctgagggagagaagatactgatttgttttgttttgcttttcttgtggttgggtgaggatttatttaattatttgaaagtgttaagatactgccatagctatccttttgggggaattattttggggacaatagttttcattcttcattcacttatttatccattcattatttttttggcaggagttgtcctagaattatttttttaaggaaatttcagtcctacctgcaagtattcccttaatctatgtctgatatttcaggcacaaatcctggttagagatcttaatttttctaataaggtatcagtcctacactgttaattgtcaaaggatatagttttgctcacttccagtttttactagagaatatactctccagtcctcaacttcagttcaaagtatgcttatgataaatactatttgcagaaaatgatctaattcctctagatgtttggacatttatcattgagagcatcaaaaactgtgtgcttgtattacattggttttacttttctgacagattgctatctatgtctatctatatctcactctggtattatctctgtagcttgccttgaaaggctctataagaagcaaatgcaaggaacccattattgtatgtattgtaaggatattgtcagggggttgtgcctttggagatcaagacactggcaaaattttctctcagaacttaatgcaaacaaaagtgattttttatatttttgttttgatttatttttcccctttgagctactggtatgttcttctgttatagacactggattaagtactatggccctccctatttgctttggctgctaggaatttgagagtcaagtttattatcagtagatagcaattttaaaaacctttgattttggtgtgctaaacgtctttcacttgtttgtactattttaagaacaatgaggttttattctttcttgttaaaatatgttctctgtgattgcatttattttgttagacatcacatcctttttagtagtgagataaaattcaaataatgttagttctattgattttttttttttactgacctcgtaagaattaaagggggaaaaatctagattcaatcacgtgtcctaagtgtatgagtataactcagtaagcttttataaagtaaacatagttatgtaattaccacctagaagtagaaacagagtatttctgacaccccacaaacttctcgcatgtctcatcccagtcattcttctaaggtaagcgctgttctggcttctgtcaccaaaattagt

SEQ ID NO: 126165 - DNA, 1154 bp, Homo sapiens
aaaggaagagatatgtaattatgagcatgaagcatgttttgcctgttacatatattcaaaattcatctctttccttgacaatctttgcaaaggagggtattcattttaataaataagaattatttgtatttggtttcttctagtcttttattgttttcctgataagagtatttataaaagttgagattggactttcaaattaccttttgagaaagtaatttttgaccacaaatgcaattatttgctattaaataattgtgagaatgacagtttatttgatagtcacagaaacaactgctttgagtggcttaagttaacaattccctgaatattttaatgaaggctttcttttgagagcccaggatttcttcacttttaatagatattattctgtatttatattaaaaactcttatttcaaagtaaaatcattgaaaaagaaatccataaagcatggtaatttagataaaagagcttaaaccttgaggaatatacttttaaattcaatgtagttttgttgagaattccttttcgttgattagagaaagattgttttattgttctccagtagtcccacaaattcagtttatataagattttagcagatgcttgaggaaacattaagtagtagtaagagtaagattcattacaaaactattattttgtttcctgtaaaacactaggcatgggttttaaggcatagaaattcacatgttaatatcttggtaaacttgattatagttgctaataaatttacaattgcaatttataactttatttaaatttgtttttgacttctaaatctggtatgatagtaaatgtatttaaatgttaactaaaagtgagaaattagtcttaatgttttcttctcattgccttgaaaacataattccttaaccatgtcttgcttcttcttttaattatataggaacagctggacgtagctctttccaaaatctgcaagaattttgacattaaccattataccaaggttcaacaagcttatcgacttcttggaaaaacacaggtttgttacaaaaggatgtttggatttttccttaatcaggaatttgttgtccttcatgattaagtctgaatattattaatctcatgtccttaaaaagttttatttaacgaagtacatttttattctga

SEQ ID NO: 126166 - DNA, 2390 bp, Homo sapiens
ctgcctttttttgtgtgatctcaggcagcgtgagggttaatagcatcttataacttgaaactttgaaagataattatatattctgattatacatactttgcttgttttctaatattgagctgtctatttgattaaggccatttaacagcaattagaataacctgccaactaaagaagaactttttatttcacaatttaacgggtgctagttacttaattccaagttgggattatttatatcatacatattacatgtcttatgtgtatatacatatttagcattaatgataaaatgccgtagatgagaatgagtgtttttctccccgattatatttgtttttaaatcatgaatgaatccagtgagttgcaaggaaagttttgctaaaagcatatgcatatttttgtctatggagactcatagcttttaaagcttcagagggactctaggagatttgctttaacccttggggtttagatacatgaattgctatgcaggagtcatgatcaagtaagtgacaaagttgggctccaagcccaaacatgtttcatctagttcagtgctctttccactatgcagtactacctctctggtttccaatggctggaaacttcttaagataatcatatttcatacagctaggccctcacagaagtaattagatattggagtaattaaatattagatactggctcagacacttccataggtccagagttacccccaaagatgttttcaactccctgggcctggtgctgttttgaccagcagcatattttcagaagccactcagataagcaggattctccccagcagcttctgatgatgtgagctcatagtactaacagcattcatctaaagatactgataaccaaccctttgttgttttttgaaatccatctatcactgtgtgtgtgttttggggggtggaggcactgggaattttggatctctgtgaggatgccaaaacatctgttccctttatgtttgttaggatgtgattagagtgctaaatcaaaacgtggaataagaacaaaataattcattacaaccatccctaagacttttcattttgatgctctaatataaaaagcattactttgaaatttttgtagggatttagtaatagagatttcttataagtattaaagtaaattatagaataaaaagcaaaagactagcagcttttcctcccgtatttactactttactttgcatttaaataactttcagaagatgacattcttttattgtgtgcttcaaacttataaaggctgcttatattaatttctggatttacactgttctttgaaaatggcctcaacttatattttataatcaagactgagatgttgctggttttgataagctagtttcatcatttttattttaaccaggtaggttggctgaggtggttaatagaagaaatggaaggtgccaagtgttactgtgaactgacagtgataagagatgggaaatcagatttgtggattttgtgaaagtgttaatcaaaattggattaaggaatgaattgtggcgttggaatgtgaagcatagtggaaatgctgtgagcttcttgcatggaacatccagtttcttcatcttctccaaatccttcctcctaggatatttgtttaccttttatgatcgccaaatttattagacatgtatgttgtctctgttatagagtttatggattttttttaaattaggatggttaaaatttccttttttttctgtgcatttcttgggatatttcccaaagattatatgcctattttatcttttcccctcactttacagtctttgctaaataaattgaagctaatagctttaagtggaagagtagcagtggaaaatagttttagaacacagggaaatatttggtaattaaatttcgatttcttatctattcttaaaaaaatttcaagatatgttatttagctcttggggatgtcttactatgtgaatattttgtaaattgattcaatcaatactttcattgctattttccatatgtgatgtgaacatagaactgggattataatatggtgctcctctgctatgatattcctagtattatgccaaatgagtctccccttcacctgaactgagtttcaatgttaggtatttagtaataaatgaatgacttcaaccagtgatgaaataggaagatacaagtatctctaacacgtttatgaaaggtgaagctgagaaccagagtggtttattatctaaggcatgcgactgtaagtttgtggaactagtgccagctggaatccagggattccaattcttaatttaggtctctttccattatgctctgcagatgtgaagaattgatgcttgggtggaacactcaggttcctcttattagcctgccttttatttt

SEQ ID NO: 126167 - DNA, 1109 bp, Homo sapiens
tgcatcttattgtagttttaacttacatttgtcctattacaagtaaaactacacatgcttttctgtgttgaagggccatttttgtatctctgtttatgaagtgtgttcatgtgcattttttctcatttttttgataggagttttagtctttttttccccaaacttttaagaattctatataaatgtggaatatcagctctttattgtgaatatatgttgtgaatattttacagagttgtcatttgtcttttgacctcacatatggtgttttttgctatacaaattgtacttatatttttatatagtaaaatcaaatgttacttttattacttgtaaattttgtgttgtaattagaaagtctttttctatatcaatgttagagagaaattgattcatgttttcttctagtatagttttatttttgacatttaaatctcttattcatttggagtttattcttacgtattctggaggaatatgtctaattttatgtttttccagctaactatacaattttcccaaaactatttgtaaagaaaacactatcttcatctaagtgatgtgcgatgccatctttatcatataccagatttgtatatgagaccagatctttttctgtacttttttattgctatctcagtaaatttataaattaaggaaaattgacatcttgatgatgttgagacatcctaaccaagaataagggatttctttccatttgttcaagtctatttttatgtctcttgggagtgtttcatggttttcttcttggttttcaatcatttcttattaaattcctaaaaattctctcttgttattataaatgagggtttctcattcagtgtctcttctaaatgtttatttgtatacaaatgccattggtttgggcatgtacattttacaacttgctactttgctgaattcttttattgtttgaattagttttattattggttctctaggaatttctgggcatatttttatgtcattagcggatataaatagtttcattttttcttgtcctattcttttgcctctgttttctgtaatctaattgcattagcttgtacttctgaatcattgttaaataccagcccatatgctgtgaa

SEQ ID NO: 126168 - DNA, 1058 bp, Homo sapiens
ttcacagcatatgggctgatattcttaatgtgtacgaaaaagccatgttgagatgggaattatttaaaaattttttttctccccattgaattttctctttagatatgtcagttgaagaaattttcttggttatttctaatttttgaatatatttgattaataacctattttattataactgttagagtaaacataataatttgaaagttgtctcttatcattttctttagcatgttacaccagacagctatattccatgccttgcagacctgtgcaaagcactatgggaagttatgctcagctattataggactatggaatggcatgaaaagcatgacaatgaggatactgcttcagcttctggtaggaaaatatttttattttattttaaaaattgaactataaatatcccacattactggagtaagaagaaaggaaaggggcaggaatgcctttgggatttcaaagattacagtgaccataggctaaatattgagcaaagaaagtgattcagctacttcaaatgttctattacctttagagagtaactgggccaaaggactttttaagtggcacatagtactagtttccagaagtgtgtgctgatggctttaggactgaatttataaatttttgttgttgttaatattattagttgcaaactagataagacattggtctgtctaagtttactgtgaaattaatgctagatggtcaatattaatctatttagccaattttcaagttacagtaataaagctaggttctaagaattaattatattgatactttccttcctgaaaatgaagcaagactagaatttcattttcaaaatgatgttttaaaatattcatctttgaatggaaaatataactttaaatgactgtggtacagtcagctaaataataaagaatacgtctttgaaaaattattgtatttattaatcattctatttaaattgcttcatttgtataattatatatcttaactgattatccttgaacagtagctgagattgaatattcagaatacttataaaaacagtaaatgattttatc

SEQ ID NO: 126169 - DNA, 1008 bp, Homo sapiens
ggaaatattgttggggagagtaaaggaagggagagaaaggcagagagaaggttgggcacacagccaggattccaggtcagactacttttacccaaaacttatacttttaccctgtactacccctgggaccatgagctctgcgatctgagaggcctggcttcaagttttcacttctatttaccaaaggtgagaacttgaagacactgcttatttttcccattcttcagtttgctcctaaaattggtcagttaaaaagcaaagcaaaaccaaaccaaacccttagagtagtaacgcatctaccctgcagggttgttgtaaagtttggacagcatgtaaggtacttatattggtggtggttaatatgatgaaatgaaatggatcaagagataatataataatagtgaaatacctggagactgttaagacatatttgcttttctagtacattatttaaggagaaaccaaagaaaacgtttggaatagaattaacacatattttagatatcagaatttaggtgacagttatgtatatattcatcatggtaaagcttgctttttgctttaggccaatagtttacattcgttggaatactgagtcaaagtgaaaactctatctgatccttattactcaaccctctttgcctaatctgtatattttatggatattcaagtgctcaagctgtcagctgatagtatctaggactataaaaagttacttgttcacctgaaattaatccttttatattcaggaataaaattgtagaaattagtaaattgaaaattacttttcatggaacttcataaaactgaagaggactctagactttatctgctgtatctctttagtgataatatttgatactgtttggtaacctaatactttaacgttctaaggtaaagctctaaagctatagttcaggtgcactgccttaggctgctggatccctaacagccataccatgggtgtaataataaggcttacgttttaggagtgctcagaggcaaact

SEQ ID NO: 126170 - DNA, 2533 bp, Homo sapiens
aaacacaaattggattaaatctaaaaatatatattgtcttttattttcagaagggagtaatatgataggtactgaagaaactaattttgatcgtggctacataaaaaagaaattagaacatggacttacacgaatatggcaggtttggtttttttaaaattatttttttcacagaagcaatagaaatgtcatgtcatagttttagaaattcagttttaagttttctatatatgtattctttgcagatttaatcatatgtttctgtttggaattaggctatcatttaatttctgtaatgtatttggactataagtggcaggaaaaaagttttttaatttgaaaatctccactggaaatattcatacatgtcttgagtacatcttttgttttagaggcctagcaaatttccactatcatagagaaatgtatgctttctcagtgagatgttctgtttattatttcatttatctgtgttttcttaatttttttttctgttaattttagaaaaggagtaactaagtagatagcatacttaggtcagattatagtttagaatgaataattctttttttctcagtcaatgatctttgtaccttgagggaatcttacatgcttattggctgaatatatctggttttagtccatttgggctcctataacaaaatattctagactgcatagtttataaacagagaagtttatttcttagaattctaaaggctggaagtcagagatcagggtgccagcattgttgggagggagggcctgcttcctggttcatagacattgtcttgctgtatcctcaaatagtggaagggatgaaggagctctctggggtcccttctataggggaactaatctaattaatgagggctctaccttcacgatttaatcatctcacaaaggccccaccttctaatatattatcaccttggaggttagaatttcagcttcggaattttgggtagacatgaacattcagaccatagcagtatcttattaagtttttctttacaatttagtaactcagttgttgtaatcagataatttgttacttcttagatcacagtgtaatttctttgaagataacttactctttttggacttctttgaaccttggaagactatagaccctttggccatgttatggtcttttaaaatgtatttttgatttttctaatgaggctgatctttattttgaccatctttttttttctttctttcttttgattgattgattgattgattgagacagggtctcactctgtcacccaggctggagtgtggtggcagagtcatggcccagtgcagcctcgacctcttgggctcaggtgatccttctgcctcagcctcctgagtagctgggaccacagatgtgcaccaccatgcctaattttcttaaattattattggtggatatggggtcttgctatgttgcccagactggtcttgaactcctgggcccaagtgatattcctgccttggcctcccaaagtgctgggattacaggcatcagccaccatgcccagcttgaccatcttttataggatatgttttgaaaaaaattgtttaggaaaatatattttgaaaacataaatttcttcatgaatcagttaatatttataatttagtgctcttctaatttttgataattttgtattcgatatgctatttgattttatgctttagtatttaaaatttatttttgtggttgtaagaggtttgacatatattttctcatttgtctatattaaactcataaccatattaaacatttattaaaattaaatatttaatttatcattaattgtggatttaggctgactgttttctgagtattatgcataaaaagaaaggaaaatcttatagttattgaatatacacccaggatcagatatgatttgtttctgacttagtctcccaataggccttaagtgtactttggtaaaattttacaatctatgatagaatttctggtaattcagtgtactttgaaatactgacttagcactttatgtagctactttccattcagtttggcaacctgatggcattcctggtataggaaatgggattgtctctattacatcccttaaggatgttggctattggcctaaatagatattcgttaacaaattaggaatatattcctgtctcattttaatctggaactatagagtaaatgcttctgataacttattttctatattttgggtttgcttgattttctttttctttgccttacaggatgttcagctaaaagtaaaaacctacttgcttggaactgatttgtctatattcaaatatgatgatttcatctttgttttggatataatcagcaggtagtatttaagatcttgtcttattctttagtttgagtcattcaaccatgataaatcatgagctagtgagttatcatctataacttctttatggaaatgaagataatttttgctgctaagtttgtgagtgtatttaaatatttctgccctttgggtgtttgtaaacctttatggatttgtgatctttagaa

SEQ ID NO: 126171 - DNA, 1131 bp, Homo sapiens
ggaaattcctcacagagttcacattaataaaattagaaaatacagaaatgaatgacttaaatcttcctcaaacactcaacattttaaataacttctcttagaaacatttgtgaaacttatttctcattgatgtggctgtgctatattattagaaggaaagctgggttgagtaatagtagacttgggttcttgtcgcattttttgctgcttaccaactgtctggtattggcaaatcctttaacctctctggcctgtgattttatgcattgtaaaatgaagtggccagattaaaaggtctccataagtgttgcctagacatcttgacccgtttttttgcagtattgtatattgtaaaaattggggcaggttaaacagcaaaaatttaattattacttagtattcttctttttccctagtatttaaacaaaagtttaaggtagtctagtttctatcctgtctgtagtcattttcgctctgacagttgccatcaggaaaattatagtggaagtcatttggtaaagttggtgcaaaccatcaatgtgttctaaggtatatttgtttctttacaaaacaagataaacttgaacagaaactttagaaatgatactagtgtccatacattgaattgactaaagtcattacattagccagtgatgaatctaaatctgcaaaatcccaatttaatatcccctttgccagtcattctacataaatactgaaaaactgtatgaaacatggtgaaatatagatcaagtatgttcttattttgctaatagaagtgtttaaatgtgcatacagtttggttcatggtcctctcctgccaaatatagctcttgagaatgaagaaattcttgaaccaaattattctgactttcaatctatttaagctattggtttgaatttatagggataataaaaaggtaaaaataggagcagttttgttttggtggaacatctacttatgaaatgtattaatgttagttgtggtagttgtatgaaagtttgcattccactctctttttctaggataaaactgtatgaacacatgagggaacacagcgtctattattgattgtttctacttctcaaaagtataagttttatttcccattttttaaaatattcaggtac

SEQ ID NO: 126172 - DNA, 1881 bp, Homo sapiens
taaattttttcttgatgttttagcatcaatatataatcagctaaggatattttaagtatgtgagttggagacaagcttttaatttagtcctctaataaaactgtcatttcctatgcattacttttgcaatatagtaaaaatacttagtttagtaaacatttgagagagtttttctctcaaggatgataagatattaactaataaaagtaaacatttctgtttactgtgttaatcagaatgggttctcaaagttgattatgatcatgacaataatcctataattatttgtattgtacattatttcctcaattcttgtgtgcggtgtacttttcttctcactttttggagtgttcattttctttttttaagaacacggctcgatgaactgagaatgttcttagagaatgagacttgggaactttgtcctgttaagtcaaatttcagcatcttgcaacttcatgtaagtgtttcttaagaacaaagaaatctgtcttttagtaatgtattttacccttttttttgaaaaaaaaaatccagaaatatatgaaaacatttataaaataaattaaggagcagtttcttatcttccttccttgaaagtcattagtagccagcctctttttaaaggaatgatccttttatggttgcgaaaaatcagtcttacaaaattcagtttacatactttaggaaatctcttttgcctaaaaagagttacagttaaaatgatattttttgtttgttttgaattcagaaaagggtgactgctgtatttaagttttgcagataatcaattagctatattttggcatagtttaatacaaatgcttatttatatttgtagaatatttttcatttcttaaagggactagtaggttcctaatttgtgctgcaattcttaaatttgcctgtaatgaaaaaatgcctcagaaataaaagaggcacttataaaaaatactcttaactaatttgtattagttaatcaattcctggaatacttacagaataagcagtctttgaaaaagtctttaattggtttgatttttcccttggttgaaacacattgtagataaatattcttgtgtgaaagattgtgttctggaaatatcaagtgtcaaaatgcagtgcatatagttagatccttgttcagaaagtatggtgtgtttagtttctgcctttggaaggagtggctttctagaaagcaattttcttattctggataaatgtaaagaatacataattacaagtttttttttgatagggattgtctttatgctcatattgtataatagcttcttatccagttttattatattgttttcctattatagaaatattaaaaaccctggaacatagcaattaataaatgctttaaagacagcaaaattaatgttaatgttaattagtattaacataagcattaacattaaattaacataggatttaagaattctcaaagatttaaggtaattccttaacatcatttagaattctaagtttaacataaattttagaatatctattaaataattttatttgaactcctttttaaccatcagactgtgtgtgtgtgctgtcacgttgtcaaacttagtataattgtaagacatgttttttaaaaaaggcatgttgaagcattcccatctaggtgaacattatctcctttaaagtagttaccttgaaaactattcacagcttagtgttcacctgacatgcattcatgtggatttgattttctaaaaattagtctcattgatgtatattcactccttatttagaattataaaaataatggcatgattcttaggcattataatatatatgattaaatgtatagttgaaatgcaaaaggaaaataaacacatatatcatttaatacaacaa

SEQ ID NO: 126173 - DNA, 2057 bp, Homo sapiens
gtcatttttgttcactatttgaaccttctatcaaggtgtcctattagtggttgagttttgttttatgataaactgacctcttcaaaactatgataattataagagaattttttcttaccttttgccagttaaatgggcctgattctggaatgttaaaatgacttgatttcatgactatcatacatttagtgactatagatatactttttgcttaatgatagatttcttaatgatagattcttaatgataagtatattcttatcgtttaaccctaagctacctatttaatactgtttaacttgaaatctcgactgaaataattctgttttcaaaagtgagcaattcacgtagttgtagctattttaattgaaaaaatttgttctattggtttttgcgtatgtatgatattaagtgtcagcatgatctactgtgaactgaatagaactattttgttggaattctttattagatgtgttttgggaatattttggccaaaaggaaaggtctatttgaattgaaatgtacaagtaagatagtgtctgccagtacatgtgtatatacctccatttttggtagggttactggagccccctaaactttttacccttaagaagtttgaattgaacaaattagtaactgaagccaataaattaatagatattatcagttctaacttgtgtctcttgaattgaccaatttttcttgtattttaccactaccattctagtttatgccaaagttatctctgtgccagattattaaatcaactcctttaccttggattcttgtctctaggcttgccccattccaaacaactcttagatctaaatttaggggttttttttttcatagttacaaatttaatcatgctgtttttctgcttagcttttagtgactcaccactgtgttcaagataaggttcatatccctcaggtttgattgctttcagagatatctggcctttacttgcctcctttcttgtcacttttccctctgttcacttcttctacatgcgaacgtggtgaactccttgtacttttctgagcgcactctgttctctcttatctctgaccctattttatgccggcccttttttctgtgctgaccatatagcttttacttttcttttgaaccttatgctgccccgtaaccccaaatactgccatcaatattctgtacttaattcacgttcttaggagggtattttttcataagtttctgaaatcaagaaacagtacatttgcacctagatgtattattatcctggaaaatcagttttttaaagagatgtagcttttttagtggttgataatgttttataatcgaagaaatgcattatggtactttatttttttgcttacttatttcccttatggattgtaaattttataagaagttaatttctatatctttacctaatgcatagtaagattttcattaaataattagttaataaaggctagggacctatctgactaacttattggtttattacttgacaactctagcaactctgttttgtttttccatatcaagtgtttctcgggaaactctaaaaagcaggaagaaatcagattacagtctaaataaagtgaatgcacctatcttaacaaatacaacattgaacgtcataagacttgttggtaagtagctacacctttaaaaaaaattataacagttaaattagtttgttaccgaatgacttttacttgtggtttttattgtcttgtatactccagtgctctatgcaatgagggatttaaggttatcatatgtcaatgcttctcattttaaatgttccaaatactataatactaatagtaatgccagtttttctttttcagttacctgtttattaagtctttgtatcttacaatttttctaaaatatttcagttaattgaaatgcgatgaaaaattctctaggtaggttagaggtatgtgtaagataagttagtaccagtttcacatttatacaatatttttgtacttagttgtttcataggtctttaccatcttctgtcaggcagagtgaatagtgactttctggcattttca

SEQ ID NO: 126174 - DNA, 1014 bp, Homo sapiens
ctatctatggagatggtatttacctattgcctagtttgattaaccttagctctgttgaaatagtctgtgttctttaagataattcttaaatttaattaatgaataggataaaatgtacagaatgctttttaggagtcacggtttctctagaaagagcaaaaaatattactgaattgagaagaacagaaaggtataccttttcatgatgctcagaaaaaaggatagattctaaaaagctattctgtggctaattattgccagggagctaagcttttcttcttcttccaagagaactgactgaacatagtgtcagaaataactctcgagaatttgtagaatcagaattgggagagtgctgagtggtcattggtgtaagttgccatgaagtcggttgtctttctgtaatgtctctcatacatggtagctgtctagcttctgtttcatgactcccagtcattggaaacacagtggtttgcaagactactcattctatcattagactgatctcattagtagaagtatcttccctaaggtaaaccaaaacctgtctctctgtgattctagcctttggtttgtccttttggtctaagagttatgcccttagaagcaagaagaataagttcgtgcatttttttcttctatttcttctattcttctatttcttctatcttctatttcttctattcttctatttcctctatcttccatttcttctaattcttctattcttccatgtgatcacttttcagatatgtggtggtagttatcgtgcttccttttctcataccgaccaccccacaatccatttttcaggctccatgggctcagttcctttatcttgtcctcactgatagaaattcagacctttcagaatcattgtcatcctccttagccttctagactcagcagttttcaatgtccgaacacattccttgagatgtagtcagcttttgctagattatgttgaagtaacaagcaactgttggtgcatcaagacgttcaaccacaaagttt

SEQ ID NO: 126175 - DNA, 1043 bp, Homo sapiens
ataagctctatattatgtgcttacctctgttattgaagctttttataaagccatgattattaattcttttaagaaatactgttgcaacaattgttatatgccaggcattgttaaagagctgggaattcatcagtgcacagaagagatatttcctgtcttggaacttgtatttttttggagcagagagacaaacaaatgtgtaacatagtgtcagatactcatgagtactaagatgaaactgaagcggtgataggatggggatcttgagcagagatgtgaataatgtgagtgaggcatgtactgatatctcaggtgagcgctgtttgggcagaagaaataaatggtatccttctctcttaacatttggagatccttttacccaacacatttttaaaaatatagtcatatcacttaccttggcacataacattgcttcagtaaatgttcatagagtaggtgaatataccccagtcgctgagtttcttgtttcttggcataacttggcttgtttttttggttttgatatttgtttaatccttgatcttcaatttcagagtcaaggctccttatttgatccaccctttttgtttctcttttttcttttcttttttgtttttagtctttgttttgtaaaatccattggtctcagccccacttgcagttttctgtgtttcgattttgattcttcttatttgatacttaagtataaccttgagcatcaaatcttattctccagatcttagtccacagctaaagtttttcttggttcttactgaaagtcccaagattgatgggccagattttaccactagggccattcaccctggcatttctgtgtcatccctgctagctactatcttgtgatcatcaaactccagttctagatttgacccttaagatgtggatttctgcctcagattttaccacatagtgtataatgaattattactcatactgataaacattggtttgttattttagaaaatatatttgtcatttactagaacttgcttgatctcaggattttttaagctggtatgtat

SEQ ID NO: 126176 - DNA, 8207 bp, Homo sapiens
atatttggagtgattggtaactcttgagctggcagtcttctggtactctgtcagctactccgagtagccagccttgtgcatctttacccatgatctcaagatattcccatcctcctggcaaaaaaaggtggccagtgtgcctgggagttgaaatgtgtttttgtttttttaactgtttgctaagagcttagtaaaaaatgagtcccttgctatgtattgagaagttgagtaagtgtatctttgaaactcttcctttgccaacctgtttgtttataacataggatatgtttatatgaagtccaagaatgtacataaactcatatccaaggcattcgttgcctggcatcagaatacctagaaaggtaaattagtaatgagaagatttctaatgagtatatcatcagatgaaagtaaaactgagaaatttgaagtccgatgagttttcccgaccacaaattagactgcatcactcctgttgactacatggctgtgtaactgaatcagtggttctctcctggatggtgctgaagagcctggcacaccctgcttcctgggtatccctttcctttgttcacattgaccatcttccttcttatcagcagtctgtccccagacatatacaatacagttggctctgttctagtttataacttcattctagtcctgccttcttgagattatataccagggtaaccttcattaaaatttgggtgtgagatggttaatcaaaaaataattttggattttatcagcatggttctcaaggggtaatcatatttctctcatttacaagttcttgagggccatctcactgttgtcactgtgaaacatctgtcaattcataaagagtccttgtgttgacagactttaggtcatgtacagatggtagcatgtagagttggatgatattatgtaggctcattctcatttaggattaaaaagaaggttccaatagttacaaacatgaaagcaggataaaaagaactgaacctaaatgtaattaacgtgtgccccaagagtattttaattttaattctaattttgtcaaaatcacgtggtttattactgttagatttgttattccaggttgtatatctattgtattttcaggaagtttcagctgatcctactgccacactcacagcagcagaagaaagaaaggagaaggtgccaagtccacacctcagtcacctagtggttttgacatctggggatacgctgtatgggttggcagaaagagtggtagccacggaatccttgtaagttgttcaaaacagttgcgttgccattaaatatttaagaaactttataaaagaagcattgtttaattagacttctagttagctgcatacatctaccacttctaaatatcacttatatgtttctgagaagtatattctaacacagattaccaattgattttttaaactgcatggttggtttttcagttatagaaatggaaagaaggaaatcttttaattttcagcctttaacaacatgatccatgctttaagtacaactttaaaaagcattatactatgcttcatattttcctattgatgacttatgatctcaggagaagctgtagttgcattgtcaatttagtgttaagtatagttgatccttgacatcaataagaatgcttcctggggagaagccaagatggccgaataggaacagctccagtctgcagctcccagcgtgaacgacacagaagacgggtgatttctgcatttccatctgaggtaccgggttcatctcactagggagtgccagacagtgggcgcaggtcagtgggtgcgcgcactgtgcatgagccgaagcagggcgaggcattgcctcactagggaagcacaaggggtcagggagttccctttcctagtcaaagaaagtggtgacagacggcacctgcaaatctgggtcactcccacccgaatactgtgcttttccgacgggcttaaaaaacggtgcatcaggagattatatcccgcacctggctcggagggtcccatgcccacgaagtctcgctgattgctagcacagcagtctgagatcaaactgcaaggcggcagtgacgctgggggaggggcacccgccattgcccaggcttgcttaggtaaacaaagcagcctggaagctcgaactaggtggagcccaccacagcccaaggaggcctgcctgcctctgtaggctccacctctgggggcagggcacagacaaacaaaaagacagcagtaacctctgcagacttaaatgtccctgtctgacagctttgaagagagcagtggttctcccagcacgcagctggagatctgagaacgggcagactgcctcaagtgggtccctgaccactgacccctgatccccgagcagccgaactgggaggcaccccccagcaggggcacactgacacctcacacgactgggtactccaacagacctgcagctgagggtcttgtctgttagaaggaaaactaacaaacagaaaggacatccacaccaaaaacccatctgtacatcaccatcatcaaagaccaaaagtagataaaaccacaaagatggggaaaaaaacagagcagaaaacctggaaactctaaaaagcacagcacctctcctcctccaaaggaacacagttcctcaccagcaacggaacaaagctggacggagaatgactttgacgagctgagagaagaaggcttcagatgatcaaattactccgagctacgggaggacattcaaaccaaaggcaaagaagtagaaaactttgaaaaaaatttagacgaatgtataagtagaataaccaatacagagaagtgcttaaaggagctgatggagctgaaaaccaaggctcgagaactacgtgaagaatgcagaagcctcaggagccgatgcgatcaactggaagaaagggtatcagcgatggaagatgaaatgaatgaaatgaagcgagaagggaagtttagagaaaagagaataaaaagaaatgaacaaagcctccaagaaatatgggactatgtgaaaagaccaaatctacgtctgattggtgtacctgaaagtgacggggagaatggaaccaagttggaagacactctgcaggatattatccaggagaacttccccaatctagcaaggcaggccaacgttcagattcaggaaatacagagaatgccacaaagatactcctcgagaagagcaacaccaagacacataattgtcagattcaccaaagttgaaatgaaggaaaaaatgttaagggcagccagagagaaaggtcgggttaccctcaaagggaagcccatcagactaacagcagatctctcggcagaaactctacaagccagaagagagtaggggccaatattcaacattcttaaaagaatttccaacccagaatttcatatccagccaaactaagcttcataagtgaaggagaaataaaatactttacagacaagcaaatgctgagagattttgtcaccaccaggcctgccctaaaagagctcctgaaggaagcgctaaacctggaaaggaacaaccggtaccagccgctgcaaaatcatgccaaaatgtaaagaccatccagactaggaagaaactgcatcaactaacgagcaaaataaccagctaacatcataatgacaggatcaaattcacacataaccatattaactttaaatgtaaatggactaaatgctccaattaaaagacacagactggcaaattggataaagagtcaagacccatcagtgtgctgtattcaggaaacccatctcacgggcagagacacacataggctcaaaataaaaggatggaggaagatctaccaagcaaatcgaaaacaaaaaaaggcaggggttgcaatcctagtctctgataaaacagactttaaaccaacaaagatcaaaagagacaaagaaggccattacttaatgataaagggatcaattcaacaagaaaagctaactatcctaaatatatatgcaccccaatacaggagcacccagatgcataaagcaagtcctgagtgacctacaaagagacttagactcccacacattaataatgggagactttaacaccccactgtcaacattagacagatcaacgagacagaaagttaacaaggatacccaggaattgaactcagctctgcatcaagcagacctaatagacatctacagaactctccaccacaaatcaacagaacatacattttttgcagcaccacaccacacctattccaaaattgaccacatacttggaagtaaagctctcctcagcaaatgtaaaagaacagaaattataacaaactatctctcagaccacagtgcaatcaaactagaactcaggattaagaatctcactcaaaaccgctcaactacatggaaactgaacctgctcctgaataactactgggtacataacgaaatgaaggcagaaataaagatgttctttgaaaccaacaagaacaaagacacaacataccagaatctctgggacacattcaaagcagtgtgtagagggaaatttatagcactaaatgcccacaagagaaagcaggaaagatccaaaattgacaccctaacatcacaattaaaacaactagaaaagcaagagcaaacacattcaaaagctagcagaaggcaagaaataactaaaatcagaggagaactgaaggaaatagagacacaaaaaacccttcacaaaattaacgaatccaggagctggttttttgaaaggatcaacaaaattgatagactgctagcaagactaataaagaaaaaaagagagaagaatcaaatagatgcaataataaatgataaaggggatatcaccaccgatcccacagaaatacaaactaccttcagagaatactacaaacacctctacgcaaataaactagaaaatctagaagaaatggataaattcctcgacacatacactctcccaagactaaaccaggaagaagttgagtctctgaatagaccaataacaggagctgaaattgtggcaataatcaatagcttaccaacgaaaaagagtccaggaccagatggattcacagccaaattctaccagaggtacaaggaggaactggtaccattccttctgaaactattccaatcaatagaaaaagagggaatcctccctaactcattttgaggccagcatcatcctgataccaaagccgggcagagacacaaccaaaaaagagaattttagaccaatatccttgatgaacattgatgcaaaaatccttaataaaatactggcaaaccgaatccagcagcacatcaaaaagcttatccaccatgatcaagtgggcttcatccctgggatgcaaggctggttcaatatacacaaatcaataaatgtaatccagcatataaacagaagcaaagacgaaaaccacatgattatctcaatagatgcagaaaaggcctttgacaaaattcaacaacccttcatgcaaaaaactctcaataaattaggtattgatgggatgtatcgcaaaataataagagctatctatgacaaacccacagccaatatcatactgaatgggcaaaaactggaagcattccctttgaaaactggcacaagacagggatgccctctcttaccaatcctattcaacacagtgttggaagttctggccagggcaattagtcaggagaaggaaataaagggtattcaattaggaaaagaggaagtcaaattgtccctgtttgcagacgacatgattgtatatctacaaaaccccattgtctcagcccaaaatctccttaagctgataagcaacttcagcaaaatctcaggatataaaatcaatgtacaaaaatcacaagcattcttatacaccaacaacagacagagagccaaatcatgagtgaactcccattcacaattgcttcaaagagaataaaatacctaggaatccaacttacaagggatgtgaaggacctcttcaaggagaactacagaccactgctcaaagaaataaaagaggatacaaacaaatggaagaacattccatgctcatgggtaggaagaatcaatataatgaaaatggccatactgcccaaggtaatttacagattcaatgccatccccatcaagctaccaatgactttcttcacagaattggaaaaagctactttaaagttcatatggaaccaaaaaagagcctgcatcgccaagtccatcctgagccaaaagaacaaagctggaggcatcacactacctgacttcaaactatactacaaggctacagtaaccaaaacagcatggtactggtaccaaaacagagatatagatcaatggaacagaacagagcccacagaaataacaccacatatctacaactatctgatctttgacaaacctgagaaaaacaagcaatggggaaaggattccctatttaataaatggtgcttggaaaactggctagccatatgtagaaagctgaaactggatcccttccttacaccttatacaaaaatcaattcaagatggattaaagacttaaacgttagacctaaaaccataaaaaccctagaagaaaacctaggcattaccattcaggacataggcatgggcaaggacttcatgtctaaaacaccaaaagcaatggcaacaaaagccaaaattgacaaatgggatctaattaaactaaagagcttctgcacagcaaaagaaactaccatcagagtgagcaggcaacctacaaaatgggagaaaattttcgcaacctactcatctgacaaagggctaatatccagaatctacaatgaactcaaacaagtttgcaagaaaaaaacaaacaaccccatcaaaaagtgggcaaaggatataaatagacacttctcaaaagaagacatttatgcagccaaaaaacacatgaaaaaatgctcaccatcactggccatcagagaaatgcaaatcaaaaccacaatgagataccatctcacaccagttagaatggcaatcattaaaaagtcaggaaacaacaggtgctggagaggatgtggagaaataggaacacttttacactgttggtgggactgtaaactagttcaacccttgtggaagtcagtgtggcgattcctcagggatctagaactagaaataccatttgacccagccatcccattactgggtatatacccaaaggactataaatcatgctgctataaagacacatgcacacgtatgtttattgtggcactattcacaatggcaaagacttggaaccaacccaaatgtccaacaatgatagactcgattaagaaaatgtggcacatatacagcatggaatactatgcagccataaaaaatgatgagttcatgtcctttgtagggacatggatgaaattggaaatcatcattcgcagtaaactatcgcaagaacaaaaaaccaaacactgcatattctcactcataggtgggaattgaacaatgagaacacacggacacaggaagggaaacatcacactctggggactgttgtggggtggggggaggggggagggatagcactgggagatatacctaatgctagatgacgagttaatgggtgcagcgcaccagcatggcacatgtatacctatgtaagtaacctgcacattgtgcacatgtaccctaaaaaagtattataataataataattaaaaaaaagaaaaaaaaaagaatgcttcctgacctttataaatccctaaagttagtaatacaattaacgcatataacttctttggcatttctataaaatgtagtccaatataacataagagtttttgcattagtaagaaaaagcagaaaaagacagtgcctggatgcagtgcaactgcaggcagtagtccaggctccttcaccagcccactgactcccattcctgtacccagcctctggcacctgtcattcatctgtgatactcagccaagttacagtctgctgcctattaggaatgttggggttacttctgaaaagtgtcagatattgaatctgagatttcaagagtctgttgtgtataactgaatgagatctttaaaagaaatcctttaaaaaaatacccttgtgttcttttttcaacctgctactctgggctcacatcttacatttgaagcacatgactacacctcatcataagctgcttggctcctttgaagttgttcttctttcacctcaacttccattcagtcataaactca

SEQ ID NO: 126177 - DNA, 1891 bp, Homo sapiens
aggaatttacatgccagggcagagatagcagtaaacaggtaaattgagatataatatcagatgatgaataatgctgtgaaaaaaaaagcaaaatcatctgaagagagatagagaatgacaggatgtgagtggaagaggaagaccatgtattgtcatgctcagagaaggaccctgataaggtgagactggagatgaggcctgagggaagtaaggaaataaagtgtggaaagagcatctgagaaaatgaaagtaactttcaggaaaaatgtgttttcatttttgtaaatgaaaagaaaattgtcccttcttaacctccttactttaatctcatttacacaatcattcttacctgcttagaccaagtcaacaaataagagcctaggacagctgagaaccaatgaacagagccatagatttaaaatagagatggtaatggagttccttcagtcacccaactcccagcaatttatggtcccctttggaggcctaggttgaagactgtgaggctgtctccagactccgggactaattgtgccaacatcagtaaccaattgctaggagtttccatagagatcttagcggggaatgacaccaagggtgctctatatttgccactctggaattcagagaccattgaccttgaaagagaatcaaagaaataacttggtttctagagcacccaggagatttcaattgcaaattttcatttggaatgtaaaagatgaatgtaatttataaataatgataccccttcttttttttttaacaattctgtttttgaaaaaatggttctattttttatgacatgctgtcttagtcctttaggatactacaacaaagttccacagactaggtggcttataagcagagcagttatttctcaccgttctggaggctgagaagttcaagatcaagatcaaggctcaggcagatttggtgtctagtgaaggtttgatttctcatagatgtcaccttgctgtaccctaacatggtaaaaaaggcaaggcagctctctggggctcttttataagggtgttaattcccttggtgagagcttggccctcatgacctaatcacttttaaaaagccccacctcccaataccatcaccctgggattaggatttcaacatatgaatttagggaggatacaacattcagaccatagaacatactaaccatgatccttatagggtgcaagaaaaaaagatttctgtgctcaacagatacacatgctgtgaggaggctgcttgtttcagttatttgttattccagttataagaaagaactcgtgttactcagagtattaacctgagcccaatttttagcagcttaaggccttctttaagcataaaggttaattatctgtgataacttttgttctttctgttacttttctaagtctaagcatctaaatctaaacaatctgcttatattgccccaaaagaatcataagaaaaatgaaatgtttgtatgattcattttataacaagcatttttgagcatttaatttagcaataagtagaatgttattttgtacacaaagcattttatacatatagctttatcttttaaataaaatattgatgaaaaatattgaattatgactcttgaaatccaaagcagtttaaggaatgcataaataaatacagtaacaaatactactactctcctagatccatgaaatgaaacaacagacaaagagcaattatttgtatagttttgattttcaaaggtaaattttgtgaattgacaatccacttctttttaataattaaaagcaacgaattgttaaaaataaattagcaagaaaaattgtgatttaggaagtagcaaaagagcagaggataacacagttgtcattagcctgagtggtgatcagattagattttt

SEQ ID NO: 126178 - DNA, 3506 bp, Homo sapiens
ctcttggcagccagattaactggaataccagtttaactttcttacagacaattatgttgattgaatacagagatccgtggtctgtagaacaacaaagagacttgaactcattggatctctttgcaaatgagaaaactgaggcccgcataggtaaaatgacagagcacaaacacaacccagtctttctgactcaaggcttatgttctctatttcctataaccctctcatttctggggaatctgtccaaatataggttagagaaaacttcaaatacctgacagttttttgtttctaattatcctataatgtatttttttttattgttttgcatcttagatatgccaatgtcaagaaatgcagtaatgagggtcgtgccctgatgcaattggattttcaacagtttttaatgaaacttgaaaaactaacagatattagacccattcctgataaagaatttgtagaaacttatattaaagcttattacctaactgagaatgacatggaacggtggatcaaagagcacagggtgagagctggaaaatagttaattaagtttttattcctttttctttgtgctgttcttgttgggtgtgttatttaattcaaaatcatgagagtgaaatataaagaaacatttgcttttttaatacaaactacttaggtcaattctttgccttattcagattaagggcaccgtatctaagcagtgccctttgactcatcaaatctttttcagccctttgtgaactgttactgtaatgatctagaaatacagccaaagccaagacattagctatatttttcctgcaactgtgttataggaaaaggctgaagttgataaatactgagacagattgaatacagaaacaatgaaatgattcataagccataatcgattatgtaacttaaaccttctcatacaaaccttctcgtactcctcaacgatgaaatggtaacatcctacacactgacacgtattagtgatgagtgaagacattaatatttaaatggctaaacttaacttacatcttacattagattttacctttaatatagatttgattatttttcttttgtatgactatatagataacgaaaaatactattgttacgtaggatgccgaatttttgacacagttcaactcagtgagcttggtatgggaagcttttctgtatatggcatgtgttaaaattatcaccaaatcctcattgctttgataactctaggatttacattttcttaacctatgaatgtcatgggtaaaagctaagtcaagttttatttcatttgggtaagaaaataattatttgtatatacctgctcagactcatcctttctggccttaacactgtaaagagataaaatgcattagcctagaacattcacattggcgtgaatcttgtgtgaatgtccccactcttactcagtttcggatctttagaagcaaagtaggaatgtatgtgttatttttaatgagttcgaccagtaaagccagattgagaaaaacttcaccacgtttagccccactgacatttgataaccaaaatgttaaacctagatgcagatagactgcttaatgttgctagaatccatttagtaaagtaagctgtaaacacttctgggttggtactgaggaaagggttttgggaaagaatacaaagtagccaaggaggaaaggcacagctctattcgatgcaagaatgatgcccgttttttgaatttcctcttttaatatagtagactgatttttttttaacttagtactttgaaagagctttaactgattgatatttgtaattcagtgacatttccccagcagcagcagggactcttttctgtctttgaaggaaacttcccacaatgatgagtccagcgatcactgacgatggatcctcactgaatgctgagtggttaaatgagattacttaccaggcggggacaggtgctctcagagatcagatacacaagctgagcagtttgccaagtttttaaaatcaattctttctcctattttgaaattgtactatatttagtggttaccttcaataaagacacattttcttttcttattagataatagtacacagctgtctttccctatctgaactcttgctattcaacctccagtaccaagtcaatctgcagaaatttctgatgaatccctgtttattctcatcctagcaattcagtatctaaaattcaggaaccagatggatttggattgcgaaagatactcgtagtcttaattttatttgcagctccctgactttgtgatccttgttaccttattcatttgttgtatcttagaagagttgttcttctgttgttggagattttttttttaactaaagtgtttacaaaatgtagagggccagaaaaatacttcatcagtagcatttaaaaaatttgaaatgtcagtgtattttgatgactcaataacaaagactattacagaaacaagtgtaaagtgtgtgatcatcaaagcagtaagaagcatacgcatgtcagattgctttgccatattaaaacagattctagtgcttactgtttcaaatgtgtactatagtattcttattctctcctattacagctcagtaaacaatttgccttccatgtcccaactgtaatttccactgtttttcactggtttataatgctcagtaactatccactgcacctgaatatccgcctgttcttttgttgcactgatcagatacattccttttagggtactaaatttggatctttcttctttgagcaggaatattcaacgaagcagctgaccaatctggtgaatgtttgcctgggatcccatatcaataagaaagcaagacaaaaacttctagcagctatagatgatatagacagacctaaaagataatgaacacagctctctttcctcaatggcattgatcctcactcaacatatatgacctgaaagccagtttttttatgcacttctgacaactatctgctaagaaaactttgtgcatgtttttttgactggaaagtggaaaatattgaaatgtgtgtggtgttctcatgacttttatatgctgtggtctcttcaacttttggtctcatttgttgtaatctgaaatgatgttgccgccttgtcataacaatggttatgtgactacagttatacattttacagaagaatgtaccataagtatataattagaagaacagtggcttaatatatgtatgggaagtttatggaaaatgaagttggcacttttctaccctctgagcttggttcttaataagcataatgtgagggtgaatatgtagtatctcctaattatgagcactgcatgagaattaaaaaacacatgtaagtaaaatagttgaaaaatcagtatgttctctgtttttaaaatgtcaaagtttatgtcagggttaatttagttataacaaagtgatcataatggtgaaatttaataaatatactctagtatgatcagcctatgtgagactacattttgattttttgtgtggcatg

SEQ ID NO: 126179 - DNA, 1100 bp, Homo sapiens
aatggtagtataacttaaacaaggatggtggcagaaggcctcccttgagaggaagggaagaggcttgccatgcagatgtctgagtgagtgtagcaggctgagagaatgtcaagtgcaaaggccccagggtggaggctgctgtcagagaacagcaaggagggcagtgtggatggcatagtaagcagaagaaagtaaaagcagagaggatgtggcaggaggggacacatacggggaaggactttggatttcaccttcagatggaagcatttgaggggctgtgaaccaagtgatgacctgatttgtgacttagggtttaccaaaaccactctgtgtatttgagaaagagctagagagggacaaaaagcaaagcaaggaaacaagctaggaaactaatttggtaaaccatgcgaggctaggattgcagtagcattgcgggatatggtgaggggtggtcagacgctggacatatgttgaaggtagaaacaaaatgattggtatttgaggaaagagtgtgcttaaagactttctggaggaagtagaagtctttgggaagactgggtttgtgaacaagatcaagaaaacagttttggacagggaagtttgagatacttggagataaattattggatgtgtaggagagggtagcggcatgcaagtctggagttcagagaagaggtcagagctatagatgtcaatgtgggagtcatcagaatataacgtaaagccaagatttctttaggaggcagaaaacttacaggcataggaaagtaaaaaaatttaaaaaggcactactcccccatccccttgccattgtttccatgaaaggtgagacaggaccaggatactgtgctggagggacagttttctagagcaaatataagaacatcttgccacctagggacctaccaggacctttggacattgtaactcctttaactgggaagccatcactcttgtcggaagatacactctggtgcagcttgtcatctgggggactgagtgagttccagggtcatgttgtctcagagtgtcttcctccatcaggcactggctaagcattaagaatgctctagtggacaggacagatgacgtgtgccctc

SEQ ID NO: 126180 - DNA, 1101 bp, Homo sapiens
gaatattatgaatagcaaagataaatcatttttatttacaagctgcgctgagttaacccagctccataaggttataaagtaaaatgatattttataaaatctccaagaaaagttctaaaagtttaaactttaaaacaaattcactttattttatcctttgtgatctcattgcaggctatatgtcccatcatttcagagcagtagtttattacatgcattatgtatccatttccctggcttgaatatactcacataaacaaggcccaaatcttttacttctttttttttttgtccaaaatgtgtttattgagatggtttcccactcatcttgactcagagtgcttttagtgctgctttctcctgaaggaacatccttctgtaagccttgcttttcctcctataggctggcagaggacagtggagcagccaacacacaaaactaccgtttgtgcatggctaaagaccgtggtgattttatagcatcttgggcatttcacatccatgaagtaggaattggggctctgcaccaggcgtttcttcttgtgtttcctcttctcttctggagagggatgaaggagatcctttgtgagaggcatgttctcgtatgggtaggtcgtcactgccagaaaggatcttttacttctttacagtacaaagcataaaggtcagcacttattgttcactcagcataagtaaatgagtgaatagcttgtgcacaatggttagaatagttagagtagttttcctgtattactgtgagtttagcaaaaaccaaaaaccaaacaaaaaaccaacaacaaacaaaatatctgtaggcctacctttaatagacgtgtttaaagaaaacaaaacagattttcctctacatggtaatacttaaaactttagcttatagactaaataggccaaagatttcaacataagatggttaatgataactttgccagatatttgaattttatattctgaaaataatgccaatatgttaagaaacatatcttagctttctttgctagtttctgcttctaccaccaaataaattaagtttcatattttagtagtaaaagttttaggaaacttatgcttttgttttagttcttc

SEQ ID NO: 126181 - DNA, 1058 bp, Homo sapiens
agcaatggcacaacaaaaagtggggaaaaaaatctgtgtgataatgcacaaagtacttacatttattgttaattttttttatccacataattggaataacacctaaatagttttgagttgttgaattactctgtggagctgaaagaagtgtttattggacaatgaaagagctttttattcgctgagagtattactgtattttgcatggagaaatcaggctgattatccaaggttatcaacaggctcctgaattgattaaacacaaaactgtcattacaaatgtactatggtaacagttattcaattacttggatatgcatatgtagactcttagaatctaactgtgatattttatttgcctttatctctgataggattcacaatttgattccacaactggatttctaggtaaaactatgggcaaactgaagattttatccagagggagccaaacaaagctgctgtgctatatgatgctgttttctttatttgtcttttttatcatttattggattattaaactgaggtgatgcatgtaattgtgaatttggaatttgttccaacttaatggcttgcagtaccactttgataaaaatcagcatcaaaacattcctagtgttcaaatactgtggcattttccattgaaaattgctgaattttgcttattttataaatcacattagttaatacagtggtctttgaatactgtttcttaatgactcattttagcccctattttcaggggtagtgagagggtgtggctccactaatttccagtttgtttttctattgtttgccaactgtcagattaaatagcattataatattttgttgtaatcataaatgcaggtttatgtcccatgtaaggaaacttagtgggagagtaacagaatgcctggagagcctgactctgagctcttgaagtagtcagccagtttgtggtaaaatggtaattgaattttcctaactgcatcaactgtaatgatatactcccttctcctcctttatttagttaaaattgtaggctgatttctttttacctacaatcttcctaataa

SEQ ID NO: 126182 - DNA, 1035 bp, Homo sapiens
aaagttcacgcctgtaatcccagcactttggggggccgaggcggatggatcatgaggtcaggagatcgagaccatcctggctaacagggtgaaaccctgtctctgctaaaaaatacaaaaaaaaaaaaaattagccaggtgtgatggcgggcacctgtagtcccagctgctcgggaggctgaggcaggagaatggcctgaacctgggaggcggagcttgcagtgagccgagatcgcgccactgcactccagcttgggcgacagagcgagactccacctcaaaaaaaaaaaaaaagtatagttaactaacaccctgaactatgccgtttcctgttaatcgcccaacatatttatatatgtattcactaaggcccactccatctgttgtttgatagcctgatgactatgaagtactatattaggcagggaggtgtacattcttatcccttagagttccataaaagtagcacctagaaagaacagtggatctgatacatggtaattcttcaaatatatgttgaagaataaatgaatctccctcttgactctcagctagcattctgcataagttattgtgtctctttcctagagcttcagtttgccccctccctgctttggctctttcctgtccaactgtctatttaagagaaagagatgccagtaaagaaccctcgccgctatgagctcccgtccttctgtattaaccacttttcccttcctcttcacagccacgctttttcaatgggtagatgatgttactgcttttagaactttcattaaaatatatgtttctcttgagcagggaatgtatcctgaatattcttgtgtattagtacctatttttgtatcttctggacaatcaataagcaatccagaaatgtgtatcaaaatgaactgaactgaatattctttggttaacagagagtaatggaaagaattggtctgatctctgtttggttatttattttttaaattcatttggagtatgaatattagagacatatgtggtttgcaaggccctccaggggtctttttc

SEQ ID NO: 126183 - DNA, 1069 bp, Homo sapiens
tggtgtgaaggtaaatattaaattagaagcactgtttttaagcacttgattgaaattccccatgacctccaaaaaagtatattatactgaagactacccatattacaaaaagtatttttattttttttctttcctgtacttcaaatccctcaaggatggggactatgagagtctgtgaaaaaaggtcaattattaatatttattaaaattcaatatctattaaacaattgagataaaaataatattaatagtttcttgttccatttcctttcctccctctataattccagtgtatctctgcagccaaaataaaagtaaataaacatataatcagagattacgacactctgtattattttaaactgtaaattctcctttgccacacactaattagataggtacattcatgtcgctatacacttttcaacctctttcctgtgatttatctgtgcacactcaaaaaaattttaattaggtaattaaagtctcagaagtgtgttatctcttggctaggctcttctctgacagcgttttcaactataaaatgttctctttcctattaaggagataatgtgatattaaagtgaataccaacgtaattacaaattaatgagtaacgaatactagcgggaccagaaatgaacatgaatatggagaatctattctaactttccagctgccacacaaatggataaggtcaaactcattctcccaagagcccgatataacagctcagactactaatcactgtatcataaaatgttagagctgcaaggagctttggagaccccctcattttgcagaggtgggaaactgaggcttcgtgagagcaattgacttgcccaaagtcacacatctagaggttagaaagtcataggctagaaatgatccccccttgccacttcaatgcttattcccaaagaatagacttcacatagaatcctggaaattaagggtccttatgaggtctcttaaaccatatttcccctatatctaaatcagattatctttaaaaaaagttcttttacatgtgccatagtattaaatcccactactactactactacta

SEQ ID NO: 126184 - DNA, 3589 bp, Homo sapiens
gacctgctggcattcgaggccctcagggtcaccaaggccctgctgtaagtatgatttggggaaataataaagaagatcacggacctaaggaatgttttcttcagactaaaccaagacaactttgacaacccattaaagttagccccatttcaatatatcctctaaaatatctggaaattgtctatatgcaatgggcttgttaagtccatccctgcaagtgtgcctgggggctcgttatttatttatgtgaacttgattattttttactgatgagaacatgcttccgtgtgaagctcaactgaaaatctgctgccatggatgtctctcactgtaacaaaatataaagcctctcctatctcactttcacctttgcagggcccccctggtccccctggccctcctggacctccaggtgtaagcggtggtggttatgactttggttacgatggagacttctacagggctgaccagcctcgctcagcaccttctctcagacccaaggactatgaagttgatgctactctgaagtctctcaacaaccagattgagacccttcttactcctgaaggctctagaaagaacccagctcgcacatgccgtgacttgagactcagccacccagagtggagcagtggtaggtcaagatgtccagaccagactgacccttctcacaagttgagcttttcaaaattagtttccattgacatttagagtgaaaatgcatttgggtaaagattacattatgtgaaatcacacccaattaatggagcgtcatcttctcccaaccagcacccaacctcatttcccttaaaatgtatttttgcacttttcatagtaataagtaccctgatttgatttttcatggaggaggggagggaaggaactgtctaatcttaaaaatagccaccctcttcctcttaaatatggggtagacaatcaaaaatgttacttatgagagtcagtatctttcattagttattattagaatctgtgttctgctcaatgagaagtttcatgatctgaatgttattttcttaaaaggttactactggattgaccctaaccaaggatgcactatggatgctatcaaagtatactgtgatttctctactggcgaaacctgtatccgggcccaacctgaaaacatcccagccaagaactggtataggagctccaaggacaagaaacacgtctggctaggagaaactatcaatgctggcagccaggtgaggaatcccacaaacacctctccttctgctaaataatattttggtaggactgtttgttaattatctgcattttaatctctgacaaaaatgggcttattaaaaaaagacctgttcctttcctgggttccaattttgtcctaaattgcacattagaagatggattgattggacacatccatgtaattcaaagttattattcaaatttgacttaattggtaatcattgaaaaaactgactaatgtcatttagtgtgaaggagcactggccagctatatgccacactcatacatatgcattttcagaatgtgagcagcttttctgaatttttaatcaaaccttttcaccaactttactgaatgcctactggaattccataaattacaaaatgacagaaaaagaaaaatgtcagaatttctacctcctcattctcttattctaaagaagaagcatatgcaaaaaggattaattgaaacagataacttttttagatgaccttgcctcagtctagtaggtcttatgttcatctaggtaactgatacttcaaagacaagtgaattaagttttctttaaaagtacccttttcctaagcttggatctgagtctactcttcctgagatctttttttttcttttttttttttttcatgtttgactcttagtatctgagtccttctccacttaactggaatttcatcctattttctgtagtttgaatataatgtagaaggagtgacttccaaggaaatggctacccaacttgccttcatgcgcctgctggccaactatgcctctcagaacatcacctaccactgcaagaacagcattgcatacatggatgaggagactggcaacctgaaaaaggctgtcattctacagggctctaatgatgttgaacttgttgctgagggcaacagcaggttcacttacactgttcttgtagatggctgctctgtaagtaatagtgaaatatgggaatagctttgggaagtgggatggagggggttctaacttagactgcccccaagggggggtctaaaggggggttaaaagaacagaagaatgagagaactaacttatttcataagtaaattcagtttttgtatgtattttatatttatttatttatacgtattaatttcgtacttaaattcagatgataaattcagagtattcttatcagatagtgccttctgaaatgctgaaatgtatactatgtccatgcattgttttttctttagcatgttttttaaatggtaatgtgtgcccagaacttaaaatttcttgagacttcagtggcctaaactataatttatagttatgtgtattttattttacttattagtatggcctacatttaacttttaatgctttttctacaatatgctataaatataagaaaaattaaaattcactaacagcaagactacatacccacccaggtcccgctcccaaagacacacatagagggacatacacacaacaatcctaaaaatgactttgtagagataggtcacttggaatgtgtgttgaaatgttgttggtttttttggtttgtttgtttgtttgttttttgttagactgatagggagcccctcccactaaagacacccttgatactgttatttcaaggatgaacttatttatctgggacagacatcttcagaatgacacatgccaaacagtggttcttattaaatcaaaggttcagatattatcagattcagaaatagtgatgctttgtgtatctattttcttctctttaaacagaaaaagacaaatgaatggggaaagacaatcattgaatacaaaacaaataagccatcacgcctgcccttccttgatattgcacctttggacatcggtggtgctgaccaggaattctttgtggacattggcccagtctgtttcaaataaatgaactcaatctaaattaaaaaagaaagaaatttgaaaaaactttctctttgccatttcttcttcttcttttttaactgaaagctgaatccttccatttcttctgcacatctacttgcttaaattgtgggcaaaagagaaaaagaaggattgatcagagcattgtgcaatacagtttcattaactccttcccccgctcccccaaaaatttgaatttttttttcaacactcttacacctgttatggaaaatgtcaacctttgtaagaaaaccaaaataaaaattgaaaaataaaaaccataaacatttgcaccacttgtggcttttgaatatcttccacagagggaagtttaaaacccaaacttccaaaggtttaaactacctcaaaacactttcccatgagtgtgatccacattgttaggtgctgacctagacagagatgaactga

SEQ ID NO: 126185 - DNA, 1042 bp, Homo sapiens
aactagaaggggatgtagaagtatctattatacacagtttagcaaattaacaaaactaatgaaatcacctcctagagtcacccacatccatttttcactcctttaaatcagagtaaacccaatcattagtaaggtaaacacagtcattaacatgaacaacagatatatccactataagaaaaaaagtgtatatattcaaaatatgtagggtgaccaaattttagtattctatttcccttaaaaattatctaggtgtccaagttatctattaaataacttgatctaagaatagactcaggttttaaagttaaataaggatcttagttatgttgacaaactacaacttaccgtattctaatttaagaatttagaccatttgtattcacatagcttaatgtggggacttagaacagagactcccccacgttaatttgacttacttattgtttaagaaattcttgcccagaaatataaagctataaaccaatatataactttactacttgcttcaggaaattcctgaaaagcaacttgtctatatagtttgttcatctggccaagcagttcttctatcgggataatagattgcttatctggccaaatgggcagcttattaaaaaaattacttacgggccgggcatggtggctaatgcctgcaatcccagcactttgggaggctgaggtgggcggatcacttgaggtcaggagttcgataccagcctggccaacgtggcaaaagcctgcctctactacaaatacaaaaataaggctgggcatgttggctcacacctgatccagcactttaggaggccgaggtgggtggatcatctgaggtcaggagtttgagaccagcctggccaacatggtgaaaccctgtctctactaaaaacaaaaaacaacaaaacaaagcaaacaaacaaaaaaactcgccaggcgtggtggcaggtgcctgtaatcccagctgctcaggaggctgaggcaggagaattgcttgaactcaggaggcagaggttgcagtgagctaaaatctcaccattgcact

SEQ ID NO: 126186 - DNA, 1047 bp, Homo sapiens
aggacaatggctggtggttctgggcgccccgagccgcccgcgctggggtcgggggcgccaaccctggacctggccaaaagtgctgctgaggtccggctcctgagcggtctgggttcggggagacgctccagatcaggggctcgcgtgcaggaagtcggacaggcggtccttgggggcagcccggggcgcatgaagcccaaggccgccctgcaaggggcaccgctgccagcagtggggtcgcaggtcctgcctcttaagggtccggctccttagcctttgtttaattttgcctctgccctgtaacacccagtctgggctgttggacagcggcaagggccgcccccattttcctttgccaaaagggcgacagctggcaaaagatgcctgtggccaaatggaagaggtgccacccagcttttgtgatgcagaaacgtttaaaggcttcggagtgcacactttttacaaagttaaggcaccagagcagatttttggaaggaagttgtgggttgacaggcgtaaaggtgggcagttgaaagcaagttgtaagcactttgaaagcaggccttggccatgggttttgaaattggtgtaaaggggaaaaggaaatatgacctgatttgagaatgaattatctttcagtaatcaagggatatttacttctccttgctgattgattgttttttttcctttgtaaaaatgtcactgggagagaggctgacaggcagagggaaattaataatgataggatcttttatttttggctcttaatactatcaaagccattatctggccagctcttggtgactgtgagattaatcagtcaagatgtaatgtgtaatggacaggtgcaaattagcgctgtgcccgtttaaatttacacctactttggcaaaatatccataaacgggttgttggagtctgcgctgtattctcatcccaggagatctttcaattttggtcagttttgctgctttatttcttccaactcttgagaattaaaaatattgtactctagagccatactgggtgaacagcttttagtatact

SEQ ID NO: 126187 - DNA, 1024 bp, Homo sapiens
tttaactatattttttccaaatgttatcaatttctaacattatgaatctcaaaatgtccattattagtttgattataggtgtcatttctgtgacaaatggccaatatctgtagccttaaggatagttccaatctggataaattttaattttttaaattgataaagttaacttcaaatgccttaattttgttgaaatcaaattcttttttttttcactaagcatattaaatgccagtgctaaatgatattggatgttctggagaaaaataagttgaaagcttcagaaattagagcaagaaagcagcagctctgggtctcttagccttttctttctttgactgttagaaagatcctgatctttatgatacctcttgtaatgagacactccttgcttgtctaacgataaatcttaatggtgattttcagcacaggctaaagtataacttgctgtatcttaggcaaacaaaatattctatggactatactgtaaacttcatgatctcgtattttaatggttggtagtaggaaacagttttagcaggataattcggtctaaatttaggtgcagtgtgccagagatattctcttcaaaggaaaacataagttggggtttatatgggccatcagatgtttcctttagttgttacattttatttttcagtttgtttttgtttgtttgcttttaagtatttttctatcacagaaaaatcatgcataaaattctgagattgtagattgacaaaccagaatgcttatacttaagataagagaataaagaggaagacagccattcatccagataatcttggtgttggagatagctgaagtagatagtcctgtctcttagtttctttgtgtgtgtgtgtgtttcttgcttgatttatctgaacgcctggcaacatttatctcacattagttgtgttaaaatagctatcaaaattatactagacaattgaaaataacaaccgaagttttgttttgttttgttaggtttgtttgttttgttaggtttatatttagtgat

SEQ ID NO: 126188 - DNA, 1453 bp, Homo sapiens
ttgttcttttcacgtgcttcgttttacagggagttgacaagagatgaggaagcaggtactacattatgaatgatatcctcagccatactgggggagtggatttattttatctattttttaactacttctaaatacttcagggtgtattttctgaaaataagtacgttgaattgaattgagggtagtggagaaccattgaaagttttaagcagaatgatgtgatacagtggaggagtggaaggaaattaggctaacttgtaaagaaactggcagtttagatgtaattctgtaagtgaatggaagtcattaagtctgagctattgaatggatttgggtagtcttggtatggattgaggtaatatttgaagttatttgaatggaagaaattgaataggcagagaatttagagattaaagaggagagagggcttatgaggaatggaattaccaaggagattctgagaagtggcagtaaaaggagtaggaagaaaaccaagggaggaaggactgtaaaatcacatacaggggaggtaaggattttaaaagatgggtagtcaccagtgtccctttcaaaacttgctaaggtggaatgaagctacagcatttggcaatccagagttcactaatgggctctcaggacagttttaatggatagtgaagcccaaattcaaaacttaagttgaggcataaatgagagataaagaaattggcatagtgagggcagaatactctttcaagtaatctgttggttacaggtgtaagacagggttcaaggaaaactttttgaggataaggatgatttaacacttttaggttgagggaaggaaagagagtggaggaggaggacaagattgatactatgagagttggaggacataattcatggatcatagctccagaagtgaaaagggaggaaatgtagacagaggaaggcattagccattgagaagaatagggacatattttctttactctcttgtcagaggaagatagctgggggagtatagacaagttgtaagaatgaaggaaggaaggcaagagcagacttgtcggatgaattttattttctctatgaagtttgagaattaaactttatgctgagaaggagggcaggagagactgtatatggaatgtaaggtttgggataaccaatgtaagttttgggaatgagaaagccacctagggatgaggaaaaaatatttaaaattttgtatccactgaaaattcttcaacagtgtaaaatgaagcatgctcaactggaaatggtcatatatctaaaagaaaatggatttattttgttatttttctctatatttgtagtattttacagtaagcatgtattacctttatagtgaaaaagtgtcatttttttacattggtcaattttttgttattaaatttcatgcttgtttttaattgtttcttgtgtgtatgattgcaatatcaggtatttg

SEQ ID NO: 126189 - DNA, 1171 bp, Homo sapiens
agtgttttgatataactaaatttgtggtaataagactgtctgcacctgtattcattgtggaacttcctctttcattggaaactttcttactcaagaatgacggcagtattgttttcttatatgtgcaatgaagtggaatgataaacagtatgcctttaatttatatgtgttcttgttctgatgttgtttcctgaaatgatttttcttcctaactgtggttttcgggtatgcaagcctaaatctttgtacactttgtctcacagaatagttctgaggctccatgacagggttttgtcattgttgatgttattgttgcttcgttttataaaaaagccaaaattttttttccaatccaaacgttcacctgtttcctttcctcaagctataccagtgtaataccagttaccctgtggatccatttaatatgttatccccactaattaattttcgtatattatttccaatatttggaaagctctttatagccatttggtatttcctattacccacctcctattttaaatatttatcagtctaaacttgtgcagtgtagtaaacatgcaagttgttacgattgagctgtattaccataagtagaattttaagtaaactggtgaatttgggcaataaatgtttttgctttttgtttgatttttttttacaagctaactgttagaggtatacatttatttatctgttgtacagatttgattatgattttaatgtttgaaagattgcacttgtttgcttttactatatgtggggtaaaatatattttctgttcacagtatatgaaaatatggagtaatttaaacagtaaataaacattctgtggatgcttatttttgtattggcaaagtatcaattaaactatatgtgttctttttcaaaaatgctggatccattcatgattggttcaaatatctaattatttcctcaacttaaatttgctttttaaattgcttaatatgtaggggtaggttaccaaatgatagttggataaggaatcatttagttatcagagcttcagagggtcatctgctttccaccaaggaagtttaagcattatggttcattagtgattttgcttgaagattttaaaaatgtacttattatttatttagcactggatttatgtgctactgatatacctccattaatagaggaatat

SEQ ID NO: 126190 - DNA, 1050 bp, Homo sapiens
attctttttgtttattgtgggaggaattttcagactgtacctcttgggaaatacaaaatattatagctttggtccaagaaggagaagactaatttagaattttttcttttgttttctgttttttaaaaaaaccaaatacagagaaataatgcaatgtaattattttacattgtattaagaagatggaaactttctccttgccataatttgctttgctcaaaatctaaaagtatccatgccctgactaactcctgcccatattcattcttacacattgcaggtaaatggtatccctgaagaaagaaaactgactgaagcaatgaatttataatcagacaatatagcagttacatcacatttcttttctcttccaataatgcatgagcttttctggcatatgttatgcatgttggcagtattaagtgtataccaaataatacaacataactttcattttactaatgtatttttttgtacttaaagcatttttgacaatttgtaaaacattgatgactttatatttgttacaataaaagttgatctttaaaataaatattattaatgaagcctaatgactggtgaaatttacttcagtaaactatttgcttcctatttagtagaaatcttttaatcgctagaaacaggtttatgtgttcattctcattccacaagactttagtgcttcctatgaatatataaaatgcctgtgcctccgtgttccagttgagcaacccatttaaataatactttaactcttgtggcctgtaaatcctgttgttttatataccacttgggagtgttttcgaataaacctagttttatggattgtgaaactgatgacacccaattcatgcagggcagcccacgctgcgtacttacttgacttcataatcagatatttggtgggtttttttttctacagctacacctactggaatgggaggacatttggatctagaagcaagacaggagctgttacacaaaaagagaatagttactgctaatgtgacatcagttagctccaaaaccccagagtaccttgcagtaact

SEQ ID NO: 126191 - DNA, 1012 bp, Homo sapiens
tccattgatctgtctgtctgttcctatgcccgtaccagatgacttgcttactgtagctctgagtaagttttcaaattgggaattgtgagttttccaaatttgtttttccttatccaaatttgtgtgtgtgtgtgtgtgtgtatggctattctgggtgctatgaacttccttaggaattttaggatcagttagtcaacttctgcaaagaaggcagctagaattttgatggttttacttcattttacattgtcatttttttcctagcattgtcattatgaaaaggaacagtatttacttgtagtattttcctggttttctcttttcttttgaaaggccaatgagattcctatcttctcaagctgctccaagattatttaaatactgttgtcactatttcctgttgtgaaatctttttagccagttaagtagagatctttccccataattcccccaaaccaacaaaatattttgtttgcctctttgtgtttaccaaacaatagttttacccttatattaatgtcttagataaaagattgcaaggccttctaatgagagaccaagcatataggggtttgtgtagtagaaaaactaacagaactgataggtaaaatagtaatgtctacccaaagctccatacctccagggatgtaatttaaaagttttattacaagaaaattaagtgaaatgtattacttagttatttattattgtagtagtggggttatttcctaatttaccttaaggataatgttttaatgtaaatatctactaaatatagtaattactaaatatagtaatcagaatatgatgcatgtttatattgaatgaaaataaatgggatgaaataaagtttttagaaattaacatagaatggagagagtatctggtataccaaagcactcagtaaatattggttgaataaaggaatgaatgaaaggaagcccctacatgaatcattgtttttagagccgaggcccctacctcagggatgagtctagttaatctctcaatt

SEQ ID NO: 126192 - DNA, 1032 bp, Homo sapiens
agcagatgcattttacatttccaccagcaaaataggagagttccaacttttccatatcttcaccagcactagctattatctgcctttttgattatagccatcctagtgaaagtgaagtggtatctcattgtggttttgatttctattttgctgatggccggtgatgttgagcatctcttcatatgcatattagatatctgtatatcatatttggaaataggtctattcatatcctttgccatttttaattgaattattcattttttgattaagttgtaagagtttttatatgttctatatacaagtcctttattaaatatatgatttgcagttattttctcctattccatggattgtcttcacttttcttaatggtgttctttgaagcacagaacttttttattttgatagagttcaatttattttttttctgttactgctggagcttttagtgtcatattttaagaatcattgcctaatccaaggtcatatttacacctgttttcttctcagagtttaatagttttagctcttaaagtctttgatttttttgtgcgtatactatttttaagagaatttttaggtttatagaaaaattaagcataaggtgcagagattgcttttgcatcgcctcccccattatcaacatcccccaccagagtggtatatttgttacaaatgatgaacctacactgacaactcactatcacccaaagtccctaccttacattaggtgttactcttggcggtttatattctgtgggtttggacaaatgtataatgacatgtttccatcattatagtatcatacagagtagtttcactgctttaaaagtcatctatgtcccacctgttcatccctccttccccccaacttctggcaatcattgatgtttttactgtctccatagtggtttttcttccagaatgtcatataattggaatcatgtagtctgtagcctttccatatttgcttatttcacttagtaatatgctttgaagtttcttccatatcgtttcatggctcgatag

SEQ ID NO: 126193 - DNA, 1039 bp, Homo sapiens
atcctgcctgggtaaagttattatcaagacaaactttgatctttaatttttaatctgtaggttgaggcagatttgcttttcctacctcaatcctataaaagtatagtctgtggaataaatcacattttgcatagcatattcccctttcaacttcttcgcccataatcctggaaacacttttatacaggtgatatctagaattagctagaatacctggattagtaagaattaaatttaaggatagctttaaaggagaactatgtacacatggatgcagtctgtgggtaggtaaaaggcagatggggaaaaacagtgagctgtaaagtccaacttaaaaatttcagaattaaattttatcttctgttttatagcaatggattttgaaatcagtcaagcatacatagaagtcctttgaggaaaatggttgctttatctcttgtctatgtacctagttggctttctatatgaaaacataattctagagcttaaatttttacttcatagttacagttacaacatggttctctttcctataaagtaattaaagcagaaccgtggaatgagatgaatgggggtatcttccctgaaggcattctccaaatatggggtttttaaaacagttttcttaaggtaatgtgttccacaattgttaaaacaatgaccaaataatgttggaggaaacagcacaaaaacaaggcattggtagagtttttcattgttgtgctttattctggtctcactttttctcgttagtagtgcaggtcccacccgtcgaggtacttttagaacctgaactaaactaaattgaaccaagcaactccataaaccaaactgtgacctaaagcactgctttccaactatgtctagcctgaaaattgccaatagaacattactaaaaatatagataggttcctggcctttgttccccctagagactgattctttgagcctagggctgggcctgagcatgtgactctatattaagaacagaatttttgtcctacaagtacttgtttgagaattcaatcactaactgact

SEQ ID NO: 126194 - DNA, 1012 bp, Homo sapiens
aataatcatttctctggagaagaactttaaatctgtatgtgaagccccattacattatcttcttcttctcagatagtttcacctagatgtccaactagtaccctaagtttaacatatcctgaatcaaattaatcatctttctcttgaaactgacttttctgaggttcctaaagtattgctattctatgtcattctagataaaaaattcaaaggcgtctttgattctccttttatccctgcacctagcagtttgaaaaagtattgtcagtattatctccattatctccatgtcagtattatctccattacaaggtgtcttgtaattggcaccactttttgtttccttgtgcttcaccctgactgctatctgacactcttgcagtagcccctacttagtattccttaacccctatgctagtcattgctgccagtgtgaggaaaattcaactgtgaatttaaaaggtactttaaacttaacaacattcctagccagagataattgcttccccattagtgttcttatagcacgtatgctttctaccatttgtgtgtataattagtatgatttattatatatgtgtgtgtgtatatatgtgtatgtatgtatatgtatatgtacatgaattgccaatccccatagattgtaagctccttcaggggcaggaactatgccttggttgtcttgtatccccacatactccttgtattgacatacaacaaatatttgctgactagaattaaacagttagctgggctggaaggaatctgatcccagttaattgtaggtgatctgtgacagtcattttaaaaaatcatgacattaatttcatttttttgtacatttgttttattctgaaaagcttttttattaagctgtgctgatggcataaatggaacagttaactggaagaccagacaggccaacaattttattatcagcagaaaaatggctgctgggatgaaagatggtgagtttaggttgtaaatctaaatccctttgggggagccaatt

SEQ ID NO: 126195 - DNA, 1043 bp, Homo sapiens
agtggatccatgatattggacacacaattaaaaataaatagttatttccctattattaaagtttctccctcaatatgtgggacttggtttaagcacatcattcgtggcatcgtgtcttgcctttagtgatattgcctggggagtagagccataaaacattgtccttttattgggatttattggacttcagtcttctgtggtcaaagtaggacttcatctggatcaatacaaacttttaaaaaatgaatgtgttcaaaagcagtgctggccttgaaatacagcaatatctgtgtgttgtgtttaaactattctaccctgcctctctgtttaaacaattgagacaccaattcaatttgctttttgaatcctgtaaaagccaactagactgcccttatgcaggacctggaaagtatgagcaatgatgcattgattcactagccaaggacatgtagtggtgttaaatcttatgctgggttagtaggattctaaaagcaagagtgtaagaaaaaattccatagacctaaaattatcctagtaaatcctttaaatagcccataaggtataatatgtgtaattttgtatataaaactctgaacaataattcttatgcacaacatagtctgagaaccactgagctagaataaaggaaggaacaaaagagaagctgcctgggcactcaccccattctttctttatggtaactacccagttcatggagaaatggagagttctatagagtgtctgcttgcctgcaggatttacttcattatgctttaagattaagcccctataatcttcagacacattaatagatgatttggttttgtaaggattgaattagacagtatatgtgaaagtaccttgctcaggagctggtgatgggaagcagttaaatctaaatgttgcttgtcatatccacaaatacattgttctttggaacattgtagagaagaatttggccacctgtttcttgtccttctagttgggatattccactatccagcaaggtcttgcatgtttttacaaattggttgtacctgtaa

SEQ ID NO: 126196 - DNA, 1961 bp, Homo sapiens
ccataatctacccaaatcctttccttaaaacttacccttccatattctgtaaacacctaaatgcatattctaacacttatttcctacctccagtgtaaaaaaatgactctaggggaattgatgatatgggtctgtgttcgttagaaattcttgggctggaggggagatcgcttagtccatagcttcacagaaatatcaatatgatggctgttttctttctatccctctcaacctccccagcagagacagacagacagacagatgtgaggagcatacatagactaacgcacactccattcaggctttttctaaacttcggaatccagttctccagtctgttatctccctgatttccagaaatattaagcctaaagtagcagtacgagaaacaaaaaaaaaaaataataaagaagaaaaagccaatgtttctaggtatcaataagtcttttcaagtgaatatgtttctgattcaagttttcaggttgataggatcagatagagtctcaatgctcttaaatgctatttcacatggattgcttccaagccaaattctctcttcataattcccagtgttttaaattctgtaaccgtattaaagacagtattaagtaaaaaacaaatctccagtttccacagactgactctggaacaaccatttccattgatgttgtatcccttctagtctttgttctgtgtacataaatatttgtatataattataattttaatatgtatagatttcttacactttgttttgaaagataagttaatcctgctttctgcaaagcatttgtcaaggatgcaggatgctcttgtgtatgaggtggtgtgcagattaattagcagtattgctgtgtgagcgggaggcagactgaaccagcaccggcgaggtgtatacgttcttgggtttgcgtcagggtatcgtccctggttaaggatcataagcctttgccctgagttttgtcttcctcagcatttgtacgaatgactttgatgaagatctaagaggcttgctttaaaatccatggattaattgaaaagggatagctgttagaaataggtaacaatttagagttaacatggtttttaagtgggctgcaatgctgtgctgaaagcaaaaaaatattttatagtagtaaatgcatcataattcattggtatggaagtatggagatgactttgtatggtggcagttctttaggaaaatgaaggttattatgaaccagtggcatgatatggttgcaaaagaaaaaaaaattagttaggttctggtagtagtatagtgtccatatgtcacaaaaattaatagtaccctgctctaatcaaccacatctgtagtattgtgtccatttctggctgtcacatttaaagagagattttgacaaattagacaacttccagagcagtccatggggatgttgaagggtctggcaatcctgtcatgggaggtatcctcacagggtctggaagtgtttaacttgagaagactaaacagtcaacatgaactctctgatgtttgcttcggaaagtagaactagcatcggtgggttaaaggtacagatagatttcaacatgaggccttcctaacattgcagctcaacaaaacaatcaactttatttattctgttctttaaatatcagaaatattcacctttcttgcaatgaatatttaacttgaagaccttgataacattttagtgtagacctgaaagataattgtgatgagaacattttatttttctgataaactgtctaaatagccctatgtgttgcaagttcatttcttacaacttgaaaatagctgcaacagggtaatttaacacacaccctcctatctctcccattctgtttcaaacatgaaaacctgagaagaagatgaaagattccttttccccctgcaaagtgtcttaacttgcttaatttgcttcctagaattactctttcctggaatttcttgctct

SEQ ID NO: 126197 - DNA, 1095 bp, Homo sapiens
gctttgaaggctcccagctaccgacttttggtggcgattacgaggtttacacagagaccttgcttcccttgcaacgttacattttcctaaatcttgtagggtgaatgaatgcgtttagtcacggcaaccgcacgtttaatcctttccagcgggttgccgagattcggccacaaatatttgcgtgcatttgtactatgaacatatatattttatgtcagggaaaattgcagtggctgataagacgctaaaattctgatgaggaaggatgctaaataaaaccttaacgcggattcccatctaagcgcctcagtgtcaggtgcttgggaaactgacaatctgttgatgatcttagtaaaacaagtttaagttaaaagggaaaaccaaattgtctacagctgagttaggtttctgaaacacagatgaaacgctttcatatttgaagagcaaaattgagcacattttagtaacattgctacggattattttatacttggaatatcaataagaatttgacttattgtcataacaacgttgcagacaccgcactttaaaagagagcctttctaggaataaacaaaactgtagcccatttactgagattttactttttattagaaaatgcccactatccggaatatgaatgaatgaaatgcagctttttaacaaagacatttccctaggaagttgggtaaacacaattatactttttagaagtgccttttaatttaatctttaggatgttcaccctcttctgcaagatagaataattccaggatttcttatgcttggtagagtactgttctggtgaccgctgtcaaattcttaccagttttgtttgtttgtttaaattcgaaagttacttcacctagttaactgagacattatttttctaaaaattgagatttaaaaccagtatagatgaaaagcaggaaaaattaaagttcaaaaatccatcttaagactttaaaagtttgaacaagtttgaaccaatttgattttttcatttcaaaatgctaaccaggactttttttaaaaaacgtaattagtattttaccataataaaagtaatttcaggtcattgtacaaaattcagga

SEQ ID NO: 126198 - DNA, 1035 bp, Homo sapiens
ggaatgaacgtgatctttaaaaaaaaaacgtcctcaccgcatactcaccacgcgaggactcctctgcgaagacaggaaggatggggtcccacacctgagccaggcgcggtctccactgggtgctccgcagcccggagtggctccggacgacagcccgctcagcggacctttcgccaggctcggtggaccttctccgctgttctcctcagggcgcagtcaggtttcttcgacacacaccaaccgaagttgaagcgcgtgtaccaggagcgcagactgtgagccttatataggttgcaccgaggaggggggcgccaaatcccagcgtgctccgcgggctagggggtggaggggggtgcggggatgggggatgggggtgggggcggtggccacgctgcagtggcccgccgctagagggagtacgggattaccgagggggtgcgggatgctgatgctgaactggccaagctgggagggaagaagaaagggaggggaggggagaatcgaggacggacggcctagccaggccaagaatgcaattgccccggtggtgggagctgggagacccctgtgcttggacgggacagggtcgggggacacgcaggatgagccccgcgaccactggcacattcttgctgacaggttagtggcctgcgcgcgacgtggaggtcccggggccaacaggccgccgcctccccctcccccgctcgggttccgggcgcctgagcgcgccctttgggcaccagcctctctttctgtcccggaccccaccgtacccctccttcagtacaccctgtaccccatttccccggcccagcttctctctccccaggcttgacccctggcctttttttcctctccgcgcccccgcgggcccctccctgctctgcgggcgcagaaattccatctccaattcctgttcccaacatccccctccccgcccagccccagggtagtcctctcccgatccctgtagcaaagagctgggggtcgttgcctgtttttctggggggcccgtttccccgcgattgggctctg

SEQ ID NO: 126199 - DNA, 1088 bp, Homo sapiens
gcggagcacgctgggatttggcgcccccctcctcggtgcaacctatataaggctcacagtctgcgctcctggtacacgcgcttcaacttcggttggtgtgtgtcgaagaaacctgactgcgccctgaggagaacagcggagaaggtccaccgagcctggcgaaaggtccgctgagcgggctgtcgtccggagccactccgggctgcggagcacccagtggagaccgcgcctggctcaggtgtgggaccccatccttcctgtcttcgcagaggagtcctcgcgtggtgagtatgcggtgaggacgttttttttttaaagatcacgttcattccccgtgcttatcgggagctgcgggagatggagtagcaccccagaatgtctccacgcaaaacttgtcacgccttcactggctgtaccccaaaacaaatggggaaaccaagccttaaaggcttgggtttccaggaccaagtccagatacgggctgtagacagagatgagctgcggacagtgatgagctgcagacggtcaggagctatagatcgatttgcaatttgctcttcaaatgcgctaccaagtgccatgctttacaaacagataagcgcttcaaatgcgctacaaactggcgcttcagatgcgctacaagcacgcttcacgcgggcgacaaactgatgggagctacaactggcgcttcattgcgctataaactgatgggcgctttatgtgccacaaactgacggatgggcgcttcagtggcgctacaatccagaacgaggagcagcgatataggagctgcagacagaaaactgaattgcgctttacatgcgctgcaaaatctgagctgcagaagagtagcactacaaaaaacgctacaaaaacgatgcgattagccagcccgacaacagcgcttcattgcgctgcgaggcacatgaactgcagaggtacatgagctgcggaacaattcacacctaagatgcactacaaagtggtaagagctgcagaggtacaggagctgcagaccgtttgcgctacaaataaagcagccgtagtgggacatgagctgcggagtacaattcctctgttttcttgga

SEQ ID NO: 126200 - DNA, 1094 bp, Homo sapiens
tatttttcacctaacttctctaattaccaactgtgtatctttttggccttattctatgtaatttatttggcgtccatttttgcaggtaaatcacatagtgagtatccagagaggaccaacttatgtatttaaacttttgtttatttaaaagttttataaactttctttaaaagttttaaactttttaaatcaaagttttttaaacttttttaaacttttacatattatgttttaaactttttatatatttaaattttccaaatatgggacttgagattattaataaaatttaaaataattaaatcattctaaatgcatttaactgtattttcaggaagtacacaggcagacactgtgtcaggatttttatgtgtgtgattgtcattacactcataattagaatgcttaaacacacaccctacccccacctccccacacacatccactcaccccctaggagtgcagccctgtcccaccttaacattacaaaccttcatttggggctatgctgacaaatcttcattaaaaactatggattacaaactggtaaactgcaagacaaataaggccttgaatttgtttgaccaacacagtatttttaaaaaagtaaatgtctttaggtgggaaatgcatgcccatgttgctatagttgcagcccctccctcttttaatcccactctttttacacagatagtcacctttctattttctaattaataactttgttcatatcagctaaccattgttgaatactcactacataatttacctgcactatttaattaagtcctcataattagtttgaggtatactattattgggcttctttgaatgtcccattttatagcttttcctaggaggcatcaattattatttcttgaatgactgcataatgacaaaggaaactgacatacacatattgctgcttagtgccatttctgtcccatagagaattttctttggggatttaaattatggtcagaaaagtaatttaggcagtcctgtggtttttgtggtggtggttgtttgatttgataaccagttaccttctcggtggcagtggaatagggttgtgacagttggccagagtaccc

SEQ ID NO: 126201 - DNA, 2468 bp, Homo sapiens
tgtataagttggatttatacatacatttatctttatttacagaaataagcgggttttgaaaacaaaaaaaagaaggagtggaagagggggccaggatccaggcctccatccccacagaagtgaagctacagctgggaggtctcctcccaccccaaccgtcaccctgggtcccgactgcccacctcctcctcctccccctccccccaacaacaacaacaacaacaactccaagcacaccggccataagagtgcgtgtgtccccaacatgaccgaacgaagaagggacgagctctctgaagagatcaacaacttaagagagaaggtcatgaagcagtcggaggagaacaacaacctgcagagccaggtgcagaagctcacagaggagaacaccacccttcgagagcaagtggaacccacccctgaggatgaggatgatgacatcgagctccgcggtgctgcagcagctgctgccccaccccctccaatagaggaagagtgcccagaagacctcccagagaagttcgatggcaacccagacatgctggctcctttcatggcccagtgccagatcttcatggaaaagagcaccagggatttctcagttgatcgtgtccgtgtctgcttcgtgacaagcatgatgaccggccgtgctgcccgttgggcctcagcaaagctggagcgctcccactacctgatgcacaactacccagctttcatgatggaaatgaagcatgtctttgaagaccctcagaggcgagaggttgccaaacgcaagatcagacgcctgcgccaaggcatggggtctgtcatcgactactccaatgctttccagatgattgcccaggacctggattggaacgagcctgcgctgattgaccagtaccacgagggcctcagcgaccacattcaggaggagctctcccacctcgaggtcgccaagtcgctgtctgctctgattgggcagtgcattcacattgagagaaggctggccagggctgctgcagctcgcaagccacgctcgccaccccgggcgctggtgttgcctcacattgcaagccaccaccaggtagatccaaccgagccggtgggaggtgcccgcatgcgcctgacgcaggaagaaaaagaaagacgcagaaagctgaacctgtgcctctactgtggaacaggaggtcactacgctgacaattgtcctgccaaggcctcaaagtcttcgccggcgggaaactccccggccccgctgtagagggaccttcagcgaccgggccagaaataataaggtccccacaagatgatgcctcatctccacacttgcaagtgatgctccagattcatcttccgggcagacacaccctgttcgtccgagccatgatcgattctggtgcttctggcaacttcattgatcacgaatatgttgctcaaaatggaattcctctaagaatcaaggactggccaatacttgtggaagcaattgatgggcgccccatagcatcgggcccagttgtccacgaaactcacgacctgatagttgacctgggagatcaccgagaggtgctgtcatttgatgtgactcagtctccattcttccctgtcgtcctaggggttcgctggctgagcacacatgatcccaatatcacatggagcactcgatctatcgtctttgattctgaatactgccgctaccactgccggatgtattctccaataccaccatcgctcccaccaccagcaccacaaccgccactctattatccagtagatggatacagagtttaccaaccagtgaggtattactatgtccagaatgtgtacactccagtagatgagcacgtctacccagatcaccgcctggttgaccctcacatagaaatgatacctggagcacacagtattcccagtggacatgtgtattcactgtccgaacctgaaatggcagctcttcgagattttgtggcaagaaatgtaaaagatgggctaattactccaacgattgcacctaatggagcccaagttctccaggtgaagagggggtggaaactgcaagtttcttatgattgccgagctccaaacaattttactatccagaatcagtatcctcgcctatctattccaaatttagaagaccaagcacacctggcaacgtacactgaattcgtacctcaaatacctggataccaaacataccccacatatgccgcgtacccgacctacccagtaggattcgcctggtacccagtgggacgagacggacaaggaagatcactatatgtacctgtgatgatcacttggaatccacactggtaccgccagcctccggtaccacagtacccgccgccacagccgccgcctccaccaccaccaccgccgccgcctccatcttacagtaccctgtaaatacctgtcatgtccttcaggatctctgccctcaaaatttattcctgttcagcttctcaatcagtgactgtgtgcta

SEQ ID NO: 126202 - DNA, 4335 bp, Homo sapiens
ccacctgaggcacatcctctctgaaacggctatggaaggttagggccactctggactggcacacatcctaaagcaccaaaagaccttcaacattttctgagagcaacagagtatttgccaataaatgatctctcatttttccaccttgactgccaatctaactaaaataattaataagtttactttccagccagtcctggaagtctgggttttacctgccaaaacctccatcaccatctaaattataggctgccaaatttgctgtttaacatttacagagaagctgatacaaacgcaggaaatgctgatttctttatggagggggagacgaggaggaggaggacatgacttttcttgcggtttcggtaccctctttttaaatcactggaggactgaggccttattaaggaagccaaaattatcggtgcagtgtggaaaggcttccgtgatcctctcgctgcacccttagaaacttcaccgtcttcaaactccatttccatggttctgttaattctcaaggagcagcaactcgactggttctcccaggagcaggaaaaacccttgtgacatgaaacatctcaggcctgaaaagaaagtgctctctcagatggactcttgcatgttaagactatgtcttcacatcatggtgcaaatcacatgtacccaatgactccggctttgacacaacaccttaccatcatcatgccatgatggcttccacaaagcattaaacctggtaaccagagattactggtggctccagcgttgttagatgttcatgaaatgtgaccacctctcaatcacctttgagggctaaagagtagcacatcaaaaggactccaaaatcccatacccaactcttaagagatttgtcctggtacttcagaaagaattttcatgagtgttcttaattggctggaaaagcaccagctgacgttttggaagaatctatccatgtgtctgcctccatatgcatctgggcatttcatcttcagtcccctcattagactgtagcattaggatgtgtggagagaggagaaatgatttagcacccagattcacactcctatgcctggaagggggacatctttgaagaagaggaattagggctgtggacactgtcttgaggatgtggacttccttagtgagctccacattacttgatggtaaccacttcaaaaggatcagaatccacgtaatgaaaaaggtccctctagaggatggagctgatgtgaagctgccaatggatgaaaagcctcagaaagcaactcaaaggactcaaagcaacggacaacacaagagttgtcttcagcccagtgacacctctgatgtcccctggaagctttgtgctaacctgggactgcctgacttcctttagcctggtcccttgctactaccttgaactgttttatctaacctctctttttctgtttaattctttgctactgccattgaccctgctgcaggatttgtgtcattttcctgcctggttgctgagactccattttgctgccacacacagagatgtaagaggcaggctttaattgccaaagcacagtttgagcagtagaaaacaacatggtgtatatctcaaattgcctgacatgaagaggagtctaacggtgaagtttcacttttcatcagcatcatctttcacatgttcattatcatctgctcttattcttgcatgtttaaacacttaaaatttttagtataatttttagtgtgttttgaagtggtgactaggctttcaaaaacttccattgaattacaaagcactatccagttcttattgttaaactaagtaaaaatgataagtaacatagtgtaaaatattcctttactgtgaacttcttacaatgctgtgaatgagaggctcctcagaactggagcatttgtataataattcatcctgttcatcttcaattttaacatcatatataatttcaattctatcaattgggcctttaaaaatcatataaaaggatataaaatttgaaaagagaaacctaattggctatttaatccaaaacaactttttttttccttcaatggaatcagaaagcttgtcaatcactcatgtgttttagagtaattacttttaaaatggtgcatttgtgcttctgaactattttgaagagtcacttctgtttacctcaagtatcaattcatcctccatacatttgaattcaagttgtttttttgtcaaatttacagttgtcaattgatcttcaagctgcagggtgcctagaaatgggccgttgtctgtagccctggcatgtgcacacggacatttgccaccactgcaagcaaaagtctggagaagttcaccaacgacaagaacgattagggaaaatatgctgctgtgggttaacaactcagaaagtccctgatccacatttggctgtttactaaagcttgtgattaactttttggcagtgtgtactatgctctattgctatatatgctatctataaatgtagatgttaaggataagtaattctaaatttattattctatagttttgaagtttggttaagtttcctttcactcaattgatttattttgttgttaatcaaatttatgttaattggatcctttaaattttttttggcattttccaacaaaaatggctttattcataagaaaggaaaaaaatcaatggaatttgatatctaaagaagttagaaagggagcaaaataaaaaacataaaggagatagatgaattagtaagcaaatcagtagtcgagtttttcaaactggcaaaattaattaattgacttttagcccaaatttacattgttaattaaatcaagaaggaagaagatctaagagctcccattgataggcaagcctagagagaactagctaaatttatcatgctaggatattgaaacacagaaagtttacatacatttatgaagggtcaatttagtttggacagtgaggtatttgtcttagtggaaaaaaggagaattagtctgatcaaatcgtgaagtaatacagtgaacttgcaggtgcacaaaataagagggccacatctatatggtgcagtctggaattctgtttaagtttgtaggtacctcttggacttctgaattgatccagttgtcatccaccacagacatctcacatcagatacagacagttccaagattgacaacagagaacaacctgctggaaagacctgggcagaaatggagagccctgcgggaaccatgctacattttcatctaaagagagaatgcacatctgatgagactgaaagttctttgttgttttagattgtagaatggtattgaattggtctgtggaaaattgcattgcttttatttctttgtgtaatcaagtttaagtaataggggatatataatcataagcattttagggtgggagggactattaagtaattttaagtgggtggggttatttagaatgttagaataatattatgtattagatatcgctataagtggacatgcgtacttacttgtaaccctttaccctataattgctatccttaaagatttcaaataaactcggagggaactgcagggagaccaacttatttagagcgaattggacatggataaaaaccccagtgggagaaagttcaaaggtgattagattaataatttaatagaggatgagtgacctctgataaattactgctagaatgaacttgtcaatgatggatggtaaattttcatggaagttataaaagtgataaataaaaacccttgcttttacccctgtcagtagccctcctcctaccactgaaccccattgcccctacccctccttctaactttattgctgtattctcttcactctatatttctctctatttgctaatattgcattgctgttacaataaaaattcaataaagatttagtggttaagtgcaaactgtgtcctgatcatttcagcatctaccagcatcaagggaatggggtggggtagggtggggaaggctgagagagtagggagagtgggagaggctagagtagggtggggctgtggggagggtgggattgttggaagggtagggaggtaggagggtgggtagggtaggggtggaattgagtttgggatagtggggtggtggtataaagaacattattgattacaacctagtatgaattatatagccagaatactccaggaaatcagttattccagctgcaaaagtttaacatataaaataaagatacacaattaatagcaactctggttgctattatcacaaactttaacatcagttttactttaaatacttgagattcattaatataaaattatgaagtattaggacatagaagaagagtttcaa

SEQ ID NO: 126203 - DNA, 1065 bp, Homo sapiens
gggtgggttgtggtggaggagcaataggttgaagatcggaggcattatcagtgggatctattgtttcctggcacattgggaggaaaaacaaagggatttattttcattaccctgtaattttttttcttttctatttttttaaatgtggccagggagctcgtctctctccgtgtcacagtgggatccgcctggcagccgccgggagctgcagccaatgtgttaggacttcaggtgcttcttggcacaaagctagactgcgacctcctaccatagcgcttggcgtcacctgctctcccggtcctgccccagggccgagggattgcgtcccgaaccgggcttgggaatcggctgcctctcaagttggtgttatttatgtttgtcttttgtgagggcaggttttgaatcccccggcggccccatctcccccgcccccgcctccttgggttggaattggcgggggagggaatggggggtgtgtgtaggggagaggggagggtgtttgtggctttaaaaagaatggtcagggtaaaaggagattgtcgatgctttacaaaaaaagaaaaaaacaggcaccacactccaaagcctttcttgtttgtctgcatgggccatgcatgcgtgctgggccaggagccgagtttggagacggtttaagtgaaagtgtgtgcctcctcagctgattgtgcgtgagggtgatgtggctcggtctaatatcaaaacaaaacaaaaataaaatgaaaaatctttagaactgcctgcattgtctgctcctcagcatatcttgaagtatttgattgctggcttattgatataaaatcctgctgtgggcttaaagagaccagcaagcatgcattgcgttgcgtgttgaactgtagtaagttagaggcaagaaagaataaacaaatcagggctgtgaaaaggggtgtcacagtatatttgctttctgattgtcacattcttacgcatttattcccttggtagtctgcatcccactccataattaataataaccactgttaggaaacttccaaatacttgttataactgaacttagtgaaacttatt

SEQ ID NO: 126204 - DNA, 1120 bp, Homo sapiens
tttcaaatatacttatgtgtagcttgtatttgtgagtgtgtgtatgtgtttgtgtgtgtgtgagattttgataggtatctccaaattgtgtttggaacttttttttttttttttttaccaaagaccaatcagaatgataactttttgacttttaacttcccatttcaatgagtaatctcttctgtttgccacgtggctaagccatttggaaaaaaaaatgtatgttatttgactagacataaattcaaataagtaaatgaattcagaaattcattcttttctattgcagatgaacctctagtcttgctttgaaaaaatcattctgtgtaactcttgactgtgactaagttcctaatacacctgttgggacgatcactgacaccgtataccatttgagaggtacttttcttgacccaatactggtgattagagaagagaggtatcttggtttttggtttttttctttgatcattatgaacattggcttttcacccctgaagtgaaaatgttgaaaactgagtcttcaggtgaacgaaccactctcagaagtgcctctcctcacaggaatgcatatcgaactgagtttcaggcactgaaaagtacctttgacaaacccaagtcagatggggaacaaaaaacaaaagaaggtgagggctcccagcagagcagggggaggaaatatggctccaatgtcaacagaattaaaaacctatttatgcagatgggtatggaacccaacgagaatgctgcagtcattgccaaaacaagggggaaaggtggacattcatctcctcagagaagaatgaagcccaaagaatttctggaaaaaacagatggctcagttgttaagttggagtcttctgtttctgaacgaattagtagatttgacactatgtacgatggcccttcatattccaagttcactgagactcgaaagatgtttgagagaagtgtgcatgaatcaggacagaacaaccgctattccccaaagaaagagaaagctggagggagtgaacctcaggatgaatggggaggttccaagtccaacagaggcagtactgattccttggacagccttagctcccgaactgaggctgtctccccaactgtgagtcaactg

SEQ ID NO: 126205 - DNA, 1019 bp, Homo sapiens
cctggtgaagagatccagcagagcaaggaacccgaggactccacatctaatcaacagactcccgacagcattgacaaagatggtcctgaagaaccttgtgctgaaagtaaggcaatgccaaagtccgaaatcccttcaccacaaagccaactgttagaagatgctgaagctaatttggttggaagggaggcagcaaagcaacagaggaaagaacttgcaggtggtgatttcacctctcctgatgcttctgcatccagttgtggaaaagaagtacctgaagattcaaataattttgatggttcccatgtgtacatgcacagtgactataatgtgtatagggtgagatccaggtataattcagactggggagagacaggcactgagcaggatgaggaggaagatagtgatgagaacagttactatcagcctgatatggagtactcggaaattgttggattgccagaagaagaagaaatcccagcaaataggaaaattaagtttagtagtgctcctattaaggtaagtgtgttttctccattttgttttctaaatttgtttttagtactagggcctaattgtatgtagaatagacttgacaactagtaggagtttttgtaagggattcaagattgttgatacctttaaaatcacctgttgtcaggtgattttaaaagttcagagtttgagagatatcaattacatttcttaaatgtgctttataatggcatacatcaatagtgagtaatattaaagctgaagaagttcgggaattgtgagatacgttccaatgaactggagtatgagtattgtgagtactgaaaaccaggagtgttagtttgaaatgtaattactttagttttacctaaaattattcataaataatattttctgaatgtacacactttaaggtatgaagtataatgtacaatgggagagttttggtaatctgggaataatattcgatttactttcttaaaaaaatctgagttattaagtgtaagtggattgtgaggaatttt

SEQ ID NO: 126206 - DNA, 2186 bp, Homo sapiens
ctggaaggttatggtggcagaatgtgtagttttagaccacattctaggggcttctagcttacacagtgtgtatatatgatagacttggaatttgatatattcctgtaaattttctcctcaaaatctaaaatcactgtctgttattttcattttgggaccttccatataaggctctaaaatataaatttacatagaaatatttaaagagaaatctgacattgttctgattatgaaatactattctgaaataaagtaataatctatgaaattatttacagatgttagcaggcagactttcattttattagtgtaaggcagaagttctgggtcagaatgggtcatgttaagttaaactgtagtttaaaataaactacagatgtcaattcagtttgaaagtaagtttctttgcagtgctttaccaccttcctttgtgattatctcctcctgccttcctattcctccccaacccccactgccctactctagatggtctttaaaggtgcctttcccccaagcctatccagtgagctcctaaactttgccattcgcatcccccttgaacatcatctttctaccctttaggaagaaagcaataagattaaatcgtttcacattgagaaaggcaggaataactgaaatgaactcttcaaggagttgttaaacccagtgactaactttttaatacaagggatagcagcttatgaaaatttatcaagtagaccactacccagtcaaccaagtgggacaccagcctgtatttgggtcctgtgctgcacaaaacataactgtgcactagttggtttaatggattttaaaggatttatcattgaaatgtgtctgtttatatgtgaacaaaccagctttttgggaatgatattttgaagttcaactaatttgtgctatgattgcttataacaataagtattttgcctcttaattttcatataatgacaattttatctagcaaataatgaaacattacctacatttaatgcatttcatcaagaataagatttctaaaacaaattagatcaagcataagacttgtgaaacaaagataatgtattgcatttgattgggcagttaacaggacttcttggagtggattaagtttgcaaacagaagattcattcttagccctttgtaatgaataacacaattactctttcttgctgcttccattgttaaatatgcaagtggattcacttggaaaatttgagagctgctttctactggtcatggtggtggccatagtgtttaggttattctccaattaagattttttttgctgcagagggtggtaataccttattagatccaattaaagtatttattgaaggcttatcatgtgtgttctctcatgctgttagctgaagaagacacaaaaatctgtaaggttacccctttcctctgtgagtttgtagagtcaattcttaaacacattgtatttaaaatccataaaaaacagtataaaaaactatgccaaaatttttaatgtcctgtgagtcctttagtggcacttggttgtactaaatgcatatagtgaaagggatttgatagattatttggaaaggaatacatgcaaccattttctatctgtgtttctttattcttttcataaaactttatttatggaatgggaagttgcaattcctaacctcagtcttttcctttgaagcttaaacatacttcctcttaaagaagcaacagggaatgtattctttaaataaatgatttttagaacttttacattcttttcctggctgtcactttattctgtactaggttaaaaattcctagcacctttagttttttgttatagatcttatttatcatctttgtatgtgtaatattgtcctcagtgactacttcagttctttttatagatgttttacatagatatttccataagatgtcttaaatctggacttagaaaaacatcagaataatagttgatctttcctgtgtagcatataccttgtacttgtacatataccttgatttttaaaaatggtcagactgtattgccagccatcagttagtatgactttcctatctttcacagacagttatttcttattagatagattgttatgtttcatagggtcatgaaatattagaatgggattaataatagcaaattaaaatccaactttgagatatggcatgggagaatgttatggacc

SEQ ID NO: 126207 - DNA, 1056 bp, Homo sapiens
tgtattctctccctttttgggggctccgagtcatagttagggcattcatggatatatgaagtttttttgttcaggatggttttcagggaatagttctgttgagatccaactttttgtctttgcggaggcttcctttataacagttttgtcagtgcttcttaaactttaatatgcatatgaatcacttgggagatcttgttagcatcaagattctgattcagtaggtattctatgggaaattaccttgatacaatggttgagctacaagtacaccagcaggcaagctatctcagaggttatggaatagaagactcagaaaacaaattaaaatgcttgaatcacatgatttaccaaaccagttaaacacaaatccagaagcaagaggaaagctatggagtaagttaacacacttcaggttcaaaccaggttggaaggaccacgctacctgtcctggataaacaatgttcctatgtcccatctttctttcacataacccttccccattaatgatgtggttatgaggaccagagctgatgtttgagccaagactccatagactaatgatttcctgggtcgatgatacacacttgttctgttgaagagatgtgacaaatacacttaggtacagccgtagctttgctagtttgcctgctgatgagccatgggaccatccttggtgtcttcagtagatgactgatatggaagtaatgtagctatcagtccaggcataatggtgacttggtatttccactgctttttgtctataagtaaatctcattcattttatcataatttctatttattttattgttgtcatgtcttactcccagcttacctatttattacgcatctgctgactgccttcatttcaccagcttgcattctcattatcaatacttggcccagcctgagtgttgcctctgtctcataagttgttagtttatttaccatctatgattatcacttcttaagtgtttcatccatcccattagttttgtttacctctataatagaatttcatattctgaaataatacaggaaaaccacgttaacagt

SEQ ID NO: 126208 - DNA, 1021 bp, Homo sapiens
gaaatatacttgaaggtaatctagcgtcatttcccagtcacttcaggaagcccttcagtagcatactcctgacagatgatgtttcagcttctgcttgaataattctaccgatggagagtttattactttggaaggtaaaaggaaagttagaaggaggggcatgctggtgtgtgtagggaggtggtgcactcactcttctttttatttaattttaatttgcaattttttattaagataaaattcaggtaacaaagttcaccactttgaagtgcacaattcagtggtttttagtatattcacagtgttgtgcagccatcacttttatctgattctagaactttttcatcatcctagaaagagaccctgtgtctgtgaattgtcattcccaattccccttccttcttcatcctctggaaagcagtaattgacttgctttttctgtagacttacttctggacatttcttacaaatgcttttaaaaaagaatataggagacttgaagaagaatataggagtatggcttggaatatattaaatttaagatatcaaaaggatagcacactacaggaaagtctagagagcaatggcataaagaattttcttctggttggtgatatggtctaaaagttaagtggcatgatgtgggagcaacaaatgctatctgccattttatgtgtttcatagagaggaagaacacatgaagctgaggagacagtaggattcaagaagaatgaaatgtataactgaggaagaataggtttatgtggctgagaggatggctgaacaactcccttgcgtgggacaccgcacttctcttaatgtaatctaaaattgctacacatgaagcatgagtgtttgattcagcatagggtttctttatttccttttagagacagggtcttgccctgttgctcaggctggagttcagtggcacgatcaaagctcactgcagccttgaactcctgcgcacaagggatcttcctgccccagcctcccaagtagctgggactacaggtgtgtg

SEQ ID NO: 126209 - DNA, 1148 bp, Homo sapiens
gccaccatgtcctgccaacatagggtttctttaaaggtacaagtggcattgatgctgagtttcatctttacattggtctttttatagcgtgaaggaatcctgttccttttctaataatctgatgcttatttctatcctacttctcttatattgtcactttccttattcttttactttgattggaattgttcacggacagcttcactactttaaaattttttctcatccttcaatatttcgatatagatttcctgtgcctacatgctattatctgtactgtaaccatctataagatgagtgatttgaagcagatatttatttagtttactatgtattgtctgttggagcatattactatatagtctatattactattaaatatcattaactagtaataataatggtaacatcgagaggtacttgatattctgtcaggttggacaagtgtgcctcttgaagccttgaatttcttacctgtaattgaggctgtcttacttgtaatttatcactaagattgtttctcggctttaccatcctgtaattctctgtgtcttaaacatatttgtactataccataatcataaatatttgtgctatgatttcaaagagaaaattctggacatcttttgttgaaatatcaaaatgaaaaatttatgttaaattgttcttgagaacaataattctatagattatagtagaaaccttaaaatgagtaaaatattaagtccatgggagcacaattttatagagtggatttttagagcaacttgacttttgaaagtatgggtttaactatatgttaaaacaccctgctgaggaaactaagaataaagaaagaaatgttttgtaatatagttgctgacatattaattgcttcactcacttttgctctggaaatagcttcatagcacagttcaacatgattgaaatattgataattttttttttttttacagttcccggttttcagcctaacttactctttctcatgcacatatccttacaaagaagacagcgaaatacagtatgaagatatcaggaaattttatattttaggaggaaagttttgttctttgcttacttaatctatttcattggtatttttaaaaagtatttgtggagttaaaactgttcaccaagtatttatg

SEQ ID NO: 126210 - DNA, 1055 bp, Homo sapiens
ccagcctgggcaacagagcaagaccctgtttcaaaaaagaaaaagaagggctgggcccgaaatctatgattttcatatctgtattatatacagtttcttgcttagcgtctagaattacctattatttaggatagattcctaaaaaaatataattttattaatttataatattatttataattttattaaattatatttaaattaattaaaaataaaattattttaaagccctttatatataattcagaaagggtgaattatattgttattgccggaattgttattcagaaagggtgtattagtttataatcagcactgcattggaatagttttctcacaatccctgcgccagtacttagttttatttatatgctttgtagttttcagtttggtaggtgaaaataactgttataatttctacttgatatattgttgagattgaagattttttatgtgcttataggcttttttgatatgacttctgagtggtttttattactttctaaatcagtgtttgttagtaaagactacatcaatgtgttatttaaatgagttggtaaaagttaaagcaactcacatatccagtaatagggatatggttaaattcattacgataaatgcatatagtataataggataaagctgtattactcatgttttctaagattacttaaagatgtaaatacttcatagtaaaaagtctggttaaatgctgaatatgcatttctgtcatatttttactttaaaaatatgtgtatttgcagctaggacaaagattaaaaacacatacatcaaaatgtcaactctggtaatttctggattgagagaacagtgataatgttaaatgaatgtatacttttctgaatttacttaattttctacaataagcatgtattacttctttaattacattaaaagatagtggtgggacacaattggaatgatcagcaataacaacataaggaagttaacaaaaacactttttaaaatgctgccccaaattctaataattagtcttttaatgtacttttatttggaggacaacatgtcacaga

SEQ ID NO: 126211 - DNA, 1408 bp, Homo sapiens
taaccttgtaagtattatggggaaggagaccctccaattcattttaaattgtgattatatagcatttgcataggcctgagatgttttccttaagttcgactattgtgtatatgatattctaatgtgttacttaaaatatgctttcaaacactgggtataatgaatttgaagtgaaacatattttaatgagtagtcttactaaaaataataaacatgtacttaaaggaaacttaaccattttcccatgtggcataatgtctttctgatgtcttagattattgagcctcaacaggcttgctctctgtgaaggtgagacagtggagatgtcaagttcattatcttgcttatatataatcctttgaaaaaactcatgtacacacccagttaaaaataggattttgagttctaggcctccacagaatccatttgaatatgtttcctgtcctaaaacaccagccaatatgtggtttcctgttgttcctcttaaaaaacatattagttgaaaagagattcatttgatgtatggttagactatatggtagtatgttatatttttagttagagtcaaagggtcagttcctctcatctattgggtaattttccacctttgaaaagctttggtagataatgttgtagtatataaatgatgacaaacatatttttgttgggtggcagagttttctgaaattggaagtttaaattattgctttttgtttaatgagatgagcagattactctgatcttacagttttaagcagttctgggattttataagttctggtgaagtcctaattaaattgccttacaatataatctggtgtttggattatcactttttgttaagtattcttaaaccttactacaatatggttgataaattctgttaatattttattgtatactgggtttctagtagtgatatatagatgattgtatataattataagaactatttaaagaaaaagaggcaacattaacagacaaaccatgtaaaattttgactcttttctataaaatggttacactggaaaaagaaaattggagttcaagaaaaaaataatttcactggttgtgattttgcatatttatgtaaatttgtgaatgatttgaggcagtgatatctttttttagttaatcatgtacccaatcaagtttgagacgaggcttatgtttttccatagagactatgacacttgtggaatttttatcttgctggctccttctctgtataacgagttctgtgagtagtagcattagtgaactggagctccctcaggagattgtcccatttgcagatgtggcaatcagaagagttttagtttgagttactgggttttgactcttattacctaatacaattctttatttatttagttttgagatggagtctaactctgactgcattatt

SEQ ID NO: 126212 - DNA, 1049 bp, Homo sapiens
gtactgagagttgcattgcaatagaggtgtgcacaggatgctgtgagtgcggagaggggacacttgggttctggaggcaagttccaggaaactcctgggagaagccaaactctatctgagtttcgaaggtttaataagtgttggtagaaaaagggacaagtgtgcaacctaacagcgaggcacagaaaagagaaaaaaatgctgtcttttgcagatctcagagtatgatttatttataggcaaaatattgttggtacatggtaaggcatgtaccacaaagtttaatattgttggtacatgttaaggcaagggcagattaagaagcttcctttgtgctagacttagtttgcacacttttctgaaaacatactagttggagggggttttgagcatggaaaggcatttttagatttgtatattagaaaaccactctaatagagagtggagatagatagaaaggctaggtgtggggtgggaatgcagcagtcacagtgaacacggatgagactgatgaatgtttgtcagaatggaggctgaaacaggcaaagggtaaactgggcaagctggattaggcagaagatgataagaggtgctattttgtgtgaaattaacttttaagtgcaaaaatcatatgtgactattttttatttatccatgtatttttcctactctccccacaaaggatcttgcctagtgcttggttgataacagatgctcagcaaatgagagctaatgtaggaattaactagacataaacagggaattgattgtctttgatccaatagttgcaaaatacgagggatgaactcataggggccttagagccaaggctgtggatctgagtgttagatccaggtatatatgtcattgggatactgtgaggagaggaaacatgagaataaggggtaagacagcaggagagtgttgggaggcagcatgatgggggagccccacattttggagaaatagagtttgagaaatagcgcttcagagaaagtttggagaaaaagattagaaagattttaagaagcataaaggttgctaaacat

SEQ ID NO: 126213 - DNA, 1051 bp, Homo sapiens
aggtagtctggcctgagcctgtgtttactgatgtaagagtcaggttttagaataggcccttcatgataagctatcttcttgctctatttttatcccatttggaaaatccctttaatgcttttaattgaatttgaagcagactgccattgaataacgtgatcaaagtaaagacgtatgttctcaatttgggacaaataaaactctaacatttttagtttttttgttaatgttattttatttactagtctttgaaaacttttgtgaaatagttcatatttaacagatgaggaaccagaggcagagtcttaaatccacaaaatgagggtaaagtaagaggtgacccaggaattatttgaatgtagaattttgtttgggcaatattttggcctttttactgtataaaatgcatatgagcagaggagagcactagatcaggggtcagttaatgtgtcttccctgtatcagactcacactgacagttcagaaagtaattgagtcacaacagcacacctgtaacaatttagacatcaaacacttgctttgaacattttgtcctttgtttcatctcctttaatgtgacctttcaagatctctaacatgtggtatgaatttgagagcttctcaacctttattgttgagatctatcctgagttttatcacccaagtattatccctcatgtttatagaacattttttttttttgtcaaaaagatctggcctttgaattcagatcagattcagtgtagttaagaaaatatgtcaaaacaaatatagtcagaaattcacagtacctttgtgttctgtttaggctattagctgagcctttatttaccatttttggtgcttttgttatcgatgttatgttttaaaaatatatacatgtttctggaactacatatatgtctgtgtgtgtatacgtatatgtacacatatatacgtctatatacatatatatgtgtatatatttgatgttaaaagcttttatcaaatgtgtgtgtgtgtgtatgtatatacacacatacatgtatatgtacgtatacatacacacaca

SEQ ID NO: 126214 - DNA, 1033 bp, Homo sapiens
aagagaatattatgtaatgaagtgtgagaataattagtgcagtggtttgaactttaagacatacgaattttatgttcatgaataatgtacattgtgttttcatacattgtctatggagagtcattttcactgcctgaaattggtcaccttcaattccttctcatctctccgccaaagtatgaaaagaagattgcagggctaagctactacttaaatattattccttttcataacccttcatatagcaccagtgaaccaaggactttgtacagtctagagccaaatgatgacaacatgtggcctatgccaaagataggttttagtagatattagggagcattgtgaaaaaaatggttctgtggttgaatatgtttgggaaacttcataccatgcccccttcttagaaaatcataaagctattaacgtatgcagggcccctgaaagaccacattgttacattttttaaaaagttctcttcttgccttgttttaaatgtgatattatttaacattctgtggcttctggaacacagttggataaaaattattgttgtacagttttaaaaacagaattattcttttgaattgcgtttcataagttcagttcttattgcctttcccacctcaatgattatcccagaaatctgaaaattttataataatgaatgtaggcttatgataaagtggtttcaattaacaaaagtattgctgtgataaagtagtttcacctttgagtaaaacttgttgattgcactaagtggaccatttttgccatttcattctggaaaccagagattgcggattttaaattttcttttaatctcctgaatcagcctggattataacatgctgtattttctgtctcatgataaccatattgctgtaaaatatgagaaaattataaacattgttttgtttaaataattgatagtagtaaagtaaatattttaggctatgtttacatttgtaaaagaagatttgagcagtaatttcatcccttagagaaagcccatttgggtaatcaagtctaaatt

SEQ ID NO: 126215 - DNA, 1043 bp, Homo sapiens
cctctcctaagctccctgcaaatccttctagcatgtaatgaaccatattttattgaaagtatgaggctgttcccttcactggaagttcctaggggacacagattgtcatttattcattgttatatcctcagcactgagcacacggtagttaaaaataaatttgaactgaacttgaaacttgaaaatcaatatccaatgttttaattttaaagtcttggcctgtcttttacagacttcttcaatgttgcaataatttttttccctagtataattggatcataacatagatctcctgatggccacagctatcaacatataggtaactcagttctttgcaacttacatttcagaagcttgtcatgacccaattacacaggcgtagtttcttacagaataaatgttttccaagtctcttgagataattctcctaattagaaatcaggggtgagaacctttatgtaatcagcattgtggtagattgaaaagaatacaggttttggagttgatgtttgaaagcatcttctctgtggtattctatagccatttacttaggctgagtttactggtttatgggagatccagttttttcctctgtaaaatgaagatagtattctatattaagatagggcactggaaaggctaatggaggtcttgaatgtgaaatgtttaatgtgggacttggtacaggtacgtacttgtgaaatattagttcccttcccaggtaccatcagagttttcaatcttgaggggagctgggctgacaacatattcactatagttttctatatcagtggggtactctggtagagtagaacaggggtcctcagaccctgggccgtggtctggtaccagtctgtggcctgttagatactgggctgcatagcaggaggtgagtggtgggtgagtgagcattactgcctgagctccttctcttgtcagatgagtggctgcatttgattcttaaaggtgcatgaaccctattgtgaactctgcatgtggagggatctaggttgcaggttccttatgagacctgaaactatcac

SEQ ID NO: 126216 - DNA, 1069 bp, Homo sapiens
ccaggaattcattactgtgtgatgaaatgaatctcagtggaggcactgagaaggatgatggatttggaacaagaagatctgggtttgagactcagctctggtgcttactagttgtatgactttgtgtaaatgtcttcccagcctcatttcttcatctaggaaaagggataataatactttttcacagtgttgttttgggaattaaattaatatgtcaagacactttctaaacttaaaagcattattatttacattggcagatacctatattgttgatagatattattatggcagcacttacagcagtgctggtagaaagtgagtctacaataactacttgctgaataaatgaaacagagtaacactgaactggaggaatttgcttcttagcagaagcattcagattacccctttttattttctttcttctgtatgtttcaattcaagaaaataaatattaatccaatatagatttttcatagaggcaaggttttgataataataatgagttgctgagtattccagtggactttatatagtgctttagtcagcaaaacagactaagcatacaaattattcatatcattgaacagtttatgtaacaaatattttttgaacatacactatgtacttagcacttagtgacttaggtgaacattgactgggaggataccatgtgtcccatcccagaagattgtataatgttatgacagggacaagattatatatatatatatatgtatatatatgtatacatacatgtatatatgtgtacacacacacacacacacacacacacacacacgtcccaggagattgtatagtgttatgacccaaacttatagacacctaaacacactatctcttcattccttaccttgacctgtgctaatcactgattgcatgctctacaagtaggaggttttatgtcattcacttctatgaccagcacttggtaggcccctaggacataataactgctcagttaatatttgttgagtcatgaatagatgaaagttctgatttagcagtatttctatggaaaagaatttgaaccataataatcatg

SEQ ID NO: 126217 - DNA, 1050 bp, Homo sapiens
ttttaatttttttttaagtacagctcattggaacttagcctatttcatccagatgtgtaacatcctccttaatactatttttcttcttattcccagttactctgagaattctttccctttcttcactagatctgtgagccaaagatgatgctaatcatagctcataaacatgagtttggtattaatattatatgtttgtataataaaagaaaaggaaaacatttagccttaaagtaaaataagttggctctgttagcctctagagttcttaaaaataattataagtctcttcagaatccctctaaatgtcttcatctcctttattgtctttatctgcttaaaactgcttctcttgaaagaccagaatgcaagatcaaaaaatcaaatattatatataatattgatttctggtagattcatagaatttcaaagctggaaacaatcttattttattttttagaataggaaaaatcttttgtaaattagaacacttaaaaaataagttaggacactggaagtcttagggaattaattctgccaaaatacaccttgcccagctcccatctttctgtaagctataaggagttgttcataatgaagaaacagacccctttaggcaacaacaaaatcagagaagagctgaagatttggggaatacattatgcacagttactgtgtgtcttcattttgcagaaagaaaagtatactctacttggtttgatattgtctgtgaaagactaatattttttaaaattcagaagtcgcaggacagacagtaatatagaagagatgaaaataaaatgggagtagagaggggaagaagttaaaagaaaaagcagtggcatttagaagctgttgcagagatcaaacaggacaaacaaggcttagagttagtaacaaatggacaaagcagagatcagttttgccttcaaggggtgctgtgatgagagtatgtgtaagtggtaagacaattgcctaaacctcagtaagatatggaattgtatctttacatgcatctttatccctagtaattacaagattggaattgta

SEQ ID NO: 126218 - DNA, 1175 bp, Homo sapiens
atatatgtcttacaaatgatcttttatgatttgatgatgaaagttggagtcctatttttgaaatagacaagagaatgaaaaaaaaatcattgaatttttagagaaacaatgtagttaatggaaagagcaattggctatgtttttgcatctttgtgaccttaagccaaagtttcttttttggtccttagtttccttacctgaaaagtggaataatttctggcacatatggtttggtacatcacatgaaatatatatatgaagggcccggttttgtgtctaatatatagtgctgactcagaattttataattcttaatgaggttaggaaaaaaaagaaaagaaatttaatgattaaatatctaaatatcatttctcccacttctctcttctcagtcagaatatatttctccaattcttagtcacttggcctgtcactcagaagccataatagcactaaagtcaattttgctaggctctagagaatttaacctgagcttcaaattagttctccttttgtattctgcagcaggaaacaaccacttcctagacttgggtgggagaataaatattatgaacttgtctaggaataagtcaaccctatcaatgaaaagatcatgattttaactgagtaatttaggacagaggttggcaaactatggcccctaggccaaatctagacctctgtttgcttttgtaaataaaggtttattgaatacagccatactcatgcctgtaagtattgtctatggctgctttcctactgtaaaggcagagcaagtagttgtctgccttcccagcactttgggaggctgaggcgggtggatcacctgaagtcaggagttcgaggcaagcctggccaacataatgaaaacctgtctcaactaaaaatacaaaaaattagctgggcatggtggcgggcacctgtaatcccagctactcaggaggctgaggcaggggaatcacttgaacctgggaggcagaggttgcagtgagccaagatcgcaccactgcactccagcctgggtgacagagcaagactgtctctcaataaataaataaataaataaataaataaataaataaataaataaataaataaaagtttgccaactgctgatttagaaaattgtgatcatttctttaggtgaatattcctgacaaactggtttaaaatca

SEQ ID NO: 126219 - DNA, 1045 bp, Homo sapiens
gagctttctaaatctctcctaaaagattgttggcacatcagttagaatgtaaacaaaggctttctgaaatttcttcctgtaaacaaatgctttatattttcacatggagatttcctagcttgtgccatttaagctctgtagaaatgtttatcagtgaatgaatgagttcaggttcttaggcaataaaatgggggaaaaagtaaggtaatatttactgaaataagtcaactttgattaggtctgttactcagagattttgctttgccttcccaggcaaattttatagctgtctaaaaggagaggtcttgaggaagtcaagcttatgattgcctcttaagtcatctactgacatgctttgaactatcaaggttcaaggcagtgtggtagaccttgggagatgggatggagatattatttattatgtttcagatacaaaactaggtctttgttcataatgatatttaaaacaaataaccctcatttctatgcatggaaaatagtgatagcttatgaaagagtttagaaatggatttcttgcagtggagagtgatgttgagaaaatcagtgaaggacaaattgtgacctacattttagcaaaagtaggttatttgttttaaaaatatagtcagttttctaattactgagtttgttattccctttgtttgtaaagtacttacctcatgctatctgtgtgagtgtcctaccaaacttccaagtccatttcttttttaaaattgatatataatagttgtatacattttgggggtatatgtgatattttgatacatgtatacaatccctagtgatcaaatcagggtaactgagatatccatcacgttatactttcatctttccttgtgttgggaacattccaattcttctcttctagctattttgaaatatacaataaattattgtttactatagttttccaagcttatgtctgatgacacttcctcattgaatttttcctgccttccctgcccttctactctaacacatatcccctttgatcacctgttctttcagacacctcctatgatat

SEQ ID NO: 126220 - DNA, 1037 bp, Homo sapiens
atttttacttaagggggaagagggcacctcgtttcttataaaactgtagagttaaactgactaaaagcagagtgatgacctagtgatcagaaccgtttctttgacagatttgttcatttgtggaaatcccaaacccttttcagagcagtttttgtaatcactttttgtggtgtttgttggattctcagaatctttttctcaaaatagtagatgcctggatttgctattccaggtacttctgaaaagaagattttgagagatactgtagaattttaattgcattggaggtaatgcttttcagatgtatatggaaagttagattccaaggattaaaaaaaaatgaaattcttaaacaaattttggattccaagtccagattcaccagctagttccaatgggtttgaggggatgacgtataatgtctgtgtttgataagactaaaagctttttgaaagtgtgtgatagccaagaggtaaacttttgctcctaaggatctattgattaccttgatttcatctccttacatgagatacgtaccttttagctttcatgggccatgaatataccctgtatatgtttatatgcctgtatatatgatatattcatatatatgtaaataaaaatcaagtatgatagtaaaaggatttgtgttaggtctctcagctcttagaagtttgaataatctcatataagttgcttaacctctggtgcttttctttccttttaaaaatgagggtgattataccttcttaagtgaagtttatgaggcttgttttcatgacatatacaaaagacagggattcttaaggtcaaatgaatacagctagggttaggttatctggataattaaagctgaaagcttggagaaaaaagatttcattgggatggagggacatatattagggagagtatttaaataatttaacttgattcattgtggatgtccgggtcattgaaaaattaccagtctttcattttgttttgtatcaaattgacatgaaaactgtagtcacttcatatttatgcccagttcacaa

SEQ ID NO: 126221 - DNA, 1034 bp, Homo sapiens
acacattggtatttccagcattttatattttagtgtcttcagtttccataggtaccattacttaaataagagtgatttttttttcattctctaaaatggggaatagataaaaatgtgtgaagcaactggtttcttctgtctgatttgggcttctagatgccatgcctggagagtttgtagaagaacatagtattaggacttgccttttttgaagtgtaatttagaagtcaatataactaggaatcttagttggacaatctctactttgttatggaggcactgtgtagagtgagttgcatctagcagtcaggtgaaaatcccatagtcagaatcatggtttagggatataacacagtggccaattttaccttacttttttcaggtcatgtgtctaggtggtctcacttcagttaattttacaggaaattcattaatactcatttgcatattttatttctttttctttagtcagaaaacacttaaaataatttatatattctttccataggatttagcctgtgtatattgactgtcagacttcaggcatacattatttggggatgatggaatacaaagacccacatgattgattatgtaattcaaatttactttctgcgttctgaagataccacttcactgtaccaacaatattttgacttgatcttagttactgtattttaaatgcttgcacaaaatgcaaggtaagggcaagatgtctgtttactgtttgaactgttgtcatcctaagttaaatatgtggatttttggctcattttttgtataactgcattgatctgatgtgtcctacctcagagaactgtgtttatatctttgcatcactttcttatgaattttgcattctattatttgtatccttttattattgttattagtaaatactaaaagcccaatggtcagacattctatctttttaatttttttctttgaggatttggcacagtacttgaatatggttgttacttttaagtgaaagttgttactttatagaaaagtcggcttgcaggccatggagc

SEQ ID NO: 126222 - DNA, 1048 bp, Homo sapiens
attaagcacacctgggataagccagaattttcaaaaagaaattcttaaataccaagggagaatggtaagaaaatactttttaaaactgacaaatgtattacagagctttgcccatttctatccagttttgattagtctaagcagagcaggtttgtgggattttgcctgtgtgtgagcttggctgggcttacatggaggtgactcaagggctagcacttgcttttgggagttgaaatgtcagttttctcaaaactctcatatgccttttggtttctacactcacagatttccaccattctcccacacatgcagggaggaggaataggagcaatgaaaggtgaatttcatgaggactattgttgtattaagaagtgtaatactcaaatgtcttgctggtctgacattggaggtatgaagcagggaatgggatacttaggtcaggtcaaggagggcataaaatagggtcctcagaattggatgcaagtgttgtggcccccatataaaacaaaaatgggatttacccaaaatagaaggctactctgacttactttagagactatgaagcctctattgggctagttagcagctcagacagtggtgggaatttatctaagtatgctgagccttttaatgacagtgctatgacaggacacacagctctggaaggcttcctaatggggcaggaacctcacctgggggagggtggggtggtgatggaggaaacaagttagagagcgcctaggggaggtgaatcatagggtgtgatgttgagatagtttgctcctttccactgagtgcttctctactaaggttgtcttctggctagtaaaggaggcattccaaaatggttcatgcttcaaaatgacatgttttctttccccagtaaaacagttcttttttttttttttttgaatggtcactttttttttgaacttttctgcttttcttattttttcagaagcagctattctcaaactttttggtgtcaagacccttttacctaaaaattatgaaggatcccaaaaacactttgtctaggtgaattata

SEQ ID NO: 126223 - DNA, 1512 bp, Homo sapiens
atcctccaactataggtagttattaaataccgagtaactaagtaacttgataaatctaagtaaatgattctttccataggcaaaatgaaatactaatcttgcaacattttgtgctttttcatttacatccaaactaagtcaagagttgtccttccattatcatatgctggatttagtttggatataaatgaaaattttattcctacattcaagtggttgtccattaactatttctattaactttctagtagttgttcattaactattctccaaactttgaaatcagcaaaatatgtaaccatatccatctttggtattttaagcttaattatcataaaagctcttagggaaatttaagcattaatacagaaaatgtatcttttctttgaaaataaccaaatccattttaaaaaggaattgtttatacagtctgggattttacccaagttacaatttttaatgaatgaaaataaatatataatcaatgtaacaagagagcgaatacaatctcaaagcttaatttaacattgctgatgacttaatgaaactgtatttacctcagagccctgatttgataaggctgttcattattttttagggcacacctattatttattcccataataactctaacaaataacaacataataactctaacaaataaaagtaagcaaaaaagaaaaaagaaggtgagagtaagaaaatgtacccattcacttggtgaatattttttctgtacctgccttgtgctaggcagtggcctaggcactggggataaagaggtgaatgagatagacaagggctctactatcctggaacctataagttctaatatgagaaaaataaatgaagaagaaacatcaagtaatgataagttacactctggaaataaaaagagtgatatgatagagcctgagaagccaatttaaactgcagaacaggggaggtctccaaggaagtgatatttaggcaagtggtttggaggtgagaaactatccatacacaaactccttccggcaaatcattcacaaaatttaactagttttattaagttctaggcaagtgctggatctactgagaccaacaaccacattttaggctttttttgcacacaaaatacaaagtatgtcttgtcctcaaagggcacttataatccacatttgaaactgattaatgattaataaagaataagggtctaacactagtaccttaccactaagccactttctaatctaaaaatgagtagattagaaagctgcttatgaaatttctacccagaaatcatgacagcaggcctctcaaatatatagttgctttctcataactagttagtcaaaggtagaaaaacaattaaaattgctttagttagtatggcttactgcctactattcctgtcgttcctacaaaaagaagtgtgaagaaaggggtcgtacagtaaagtgggctaagtaggatatctcaggcaccaatttttaactcctccaaagctaggcattgtatatctccatgaaa

SEQ ID NO: 126224 - DNA, 1050 bp, Homo sapiens
aggagttctatttataagcgtatagtattcaatcaaaaaactcatgttgaaaattcagataaatagctagcaaaatcacacattaaaaaatacattgaaatgatgtatgtgtaatctaaaaaaaattaatatacgtgaaatgcagtgaattccaccttaattttgggcttgatcttgggagtctgagtgactacagtgtcattgacttgagcatgaaaggactaagtatattcctgctggagtcaagctcgcatattaacacagctccctttgaatttctgtatctgtgggttttggtgtaggcagaagacttgccacagaataacaggataattcacagtagaactttcctttcctggatttgcttcctgttcatacatgctttatcagtaaaatgacttacttttaaatacatgaagtcacagaattgaaaattcaaaatagaaattgcttaaatacagcaaaaaaatctagttattcaagatacttggggaatcaggcatttgggtttatgaaaccacatagccataaaatataaacaaacaattctcaaaatattaaaatatatttaatatggaaacttctttgaataagtagtttttgtgtaaatgtgacattttaggaatttgaaatgaattttgggtttaccagttatgccacacttaacttggattggtgaagcatggaaatgaaaaccctttcttaatgagactttctaaattttaatatgatggataactcaattttaaagtatagtttctattttttatagcagctttattgagatataattcacataccataaaatttttagtatacttgcagaattggtcagccacaatcaattttagaaatttccatcaccccatccctggctcacattagccacaggcagctgctaatcatatgtttttttctggattggcttgttctgtacattttatgtaaatagaatcatataatatgtggtcttctgtgtcttctacctttcacctaacaatgttttcatccatgttgtagtgtataccaatatttagttcctttttgtag

SEQ ID NO: 126225 - DNA, 1296 bp, Homo sapiens
catgccccaccctgctttgtctcactgtctgtgggctgtacccactctctaaccagtcccaatgagatgagctgcgtacctcggttagaaatgtagaaatcacccatcttctgtgttgaccttgttgggaactgcagactggagctgttcctatttgaccatcttgccagccacctttttttttttttttttttttgagatagagtctctctctgttgcccaggctggagtgcagtggtgcgatttcagcatattgcaacctccgcctcctgggttcaagcgattcttctgcctcagtctcctcagtagctgggactacttaattttacattgttaagagtaaacagggttctgtattctgtatataaagaactgacataaggaagcatccttgagtagtggaaatgggttttctaaccatggctttagtatttaaatcttctgtacctctaatttcttacatagtaagtggaagttcaacaactggaagatctctgtggtctttagcgtcctcaccctctctctatgctttctcattcagcaaacatttgtcaagtgtctactctgtggcagaatttgtgtaagaacttggggatagtctgtcttcagatgagctcagagtctagtaggagagaggggaaagggacaaaagagaaaaaaaagcaatacttgtaagtcaaccgttagaagccagtgtggtgagtgcctcaagagtgataatcacttagtggtggaccactgaggagcctcccactgggggtcagggtgcagtgggggaggtctaggaagatttcttggtagaaatcacatttaagtaatcctcaggtagtcagccaagtgtattaatgggcaaatggcattttatgacaaaagctacttggtaatcatttcatgcttgaaattttggataaatgaattgctaaagatgaccaagcaagaaaagactgcaacgctttttttctttattacccatggccagatttcctagttattttctcattgcaaaagaatgtgaaacaaactgattaagtgtaaaataactcttaactcttatttagactatcgtagtcatcttcaaaactctttgagatcatcttgagaattcacagttttctattctttttgttgctagcaggtgaaattatgtacctttggaaccctctgtatgggtcagtctgtggtactcacagtagtctttatataggagtgtttgcatgtgattgcaggtcagcggagaagcaaacaaagcaataaccaaaaaaggtgtgctgaaagttgctgtttcaactcatagac

SEQ ID NO: 126226 - DNA, 1083 bp, Homo sapiens
cgtagagacagggtctcattatgttgcctaggctggtctcagactactgagctcaagcaatccttccacttcagcctccctaagtgctaggattgcaggcatgagccactatgcctgacctcagaaattttaatttgaggaaatgtagacaccatttaggaaattgattgtggttttaggatcctgcactctggcaacaatagtaggctttgagagatgaaggatgtgatattggatgaactgcatgagttaaggatgaatctgagatagaggttctgaaacttgagtgtgtattaggatcgcctaaggagcttggtaaggttctgattttggcaggttgggtaagaggacagaaattgcatttttaaaggcagtctcggcatttctgatgtaaatggtaaacaagttcctagccagagacaccaggataatcatagatagagaaatggaaattaggagaatagttttataagatgaaatggtaagtttagttttggataagttgagtgttatctttatatattgcaatgagtttgatgacaggacatccaaatggaacgagctgtccaataaaaatagatctttgtgttggattgtagtgtgagagtggatgatgtatcagaggaaggtgttggaaaaagaacaagagcatgtccttttcttctgattaattcatctaagaaacactggggcagtgatgggtctctttagttacgtcaggtcaacacagtttcattcttgtttctcttctaaaaaaacattgacgcttcttgttttattttcttaactcctgggaaacgtacataaatgtctttgccacagtcaagctggtcttgactggataacagcattttcaatcactaaagtcagctatttgagttgttcagtagaggcacattaaaataactcataaataagtcaagacaagttatagagaagagaaagttatagagaagagaaaacagaaatggtgttttaatttgaggaaatatagacaccatacaggaaattgattgtagttttaagatcctgggctctggtaagcagtaatagaatttgagaggaaagtttatagtatctgat

SEQ ID NO: 126227 - DNA, 1024 bp, Homo sapiens
aatgaactcttctcttaatttggaaaaaaaatactgtgttgcagtctttagaagaatcttagtatataacatactctggtctcaaaatcaaataagcagtgacattgtgctataacctaaaaattgatatgaatcactgtgataaaggaagtttactctagtttattcatagatgaagaaaagtagcctggtagcttgaagctgttcttttagctttgctgcagatttataaaatgttcaacatttccatttacctctggacaggctgtagtttttttttgtttttttttttttttttttttttttttaaggattaagatccttgaagctagaggtctttgaaactgcatctgagtggaagaggtctagtgtaaagtgactcattcttaaacatattcagaaatgctgtgggccaaattgaatcccttgaaatataacctgtatacacagtttccagaacatgagctagttgtgtttcagaagtttatgtgtaagacagctgtttggaactcagaacacattttttttttccttattgaagcagtacaaaaattactggctatgttcccaggccagttcacaaatatttttcacccaaatgtactttaagtattaactgtacaatttccatttattgagttgatatttttgtttctgtgggaaaatatatcccaaatcagtttgaaagaaataggttatctttgcttagctggattggggtcttctcagaagatgtcactggtcattcataaaaaccagtaatttattaattgtacatttttaaccccttcctctcaattataaaggtacaatttcaggttattcattcccctagtgattactattttagaaagtagccccggtttctctgtcttcctctttctttactttctcttttctctctaaatgttgggtcattattaagtttatgtctctatatcagggattgtgtgttcaggtttggttacaaaatggttagtgctcctgtattttttttagccagcattgattaacagagttaatc

SEQ ID NO: 126228 - DNA, 1268 bp, Homo sapiens
gcctcccgagtagctaggattacaggcatgtgccaccaggcccagctaatttttgtatttttggtaaagatggggttttgccatgttggccaggctggtctcgaactgctgacctcaagtgattcctccgccttggccccacaaagtgctgggattataggcatgagctaccatgtccagccaacatcaacatttgtagtgatagaatttgagttgtttagatcaagtttatggtgctttctgggcaaattctgaagggagagacagttggtttactattagagtttacttgtttgagcaaactcttttattttgttaatcagatttgtcatatatttgtagtgccagattacatttttagtttttctgcaataaattgtattaaattcagtttattaatagccaggtatatcctgtatatctccattagtgagtctttataggagagtgtagctgttaatcagtgctgtctctgtgaattttcttggagatctctcaatgggatttgtggtttgagtgtatcacccttaggtttttacaaaagataataagcactaatgttaaatgctacttagcaaatggatgcaaagctttgacagtaattttaggttatttctagatagtgtggacttaaaaaaagttttttagaaagctgttttcagttgacttagagttacttgtaatctgttattatcaaggtcaccccatggaagatctctgaatacccaatgaggcaagtgtcattattacctcttaattttctccaggggaaacaccaaattctgtggtggcttaggtgaaggagtaaggctctttactcagcttttgtttttaattgtaactgtgcagatgtctcctatgtcctatggccagttatttaaaatagtgaaagccaaatgctagtttggtggtgtgcaggcataactcaattatctgacaagagaaaaagaatggttgagtatatgttactttggttgacaatgttaaaggtatttttttttggttttggggtacctttttagtatttacctgtaaggattgaaatattaagtcagaaaattcataatacttgtgaattggtataattgtctagactaatgcttcttttaccattggcgtaattgtctagattgatgcttgttcttaaaatttggccacaactctacactctaagctggggtgtccaatcttttggcttccctgggtcacactggaagaagaatcgccttgggccacacatgaaatatactaacaatagctgatgagct

SEQ ID NO: 126229 - DNA, 1033 bp, Homo sapiens
agtggtcagcaaactgactttctattgggggtagtcagttgaacctccatgggacagaattttcttgcatgtctccagactagaataatttacattgctctcagttatctacagcagttaatcaacaatttgagttgcagtatagctcgaagtcaatgaaaagctagaattagaaaacgtggaaggttttgtaccacaaagtccatattttttcatcttgagtgcactgtcatcttttttctcattcccaatttccttacagtggctttttaccaaactcctcaggtgattctgatgcagtctgaagtttgagaaccatcggcttaatgtaacagacaaaatatttagtatatttgtaatacttatttactaaatcatgttttcttatacaacttatttcttatacagattatttcatacgtagccagttcattatttgaaaaatcaaggtcagattgcccctgttagctgatattttaacctcttgattgcctataaaggaattaaatatgcatttatataataaagtagttgtgaagtttttgaacataattagaaaaaagactctttgttgatcgagtataaaatgtgcttcatgaagcgtttgattagttaaaatatgaaaaattttagttgaagagcttttaatagggcttatctttagtcagtcattttatacataataaaatgcctctcacaattctgaaaggacctagcgaatttaagaagctgggtgatgtaatataaagagccctggatttaggaggtcagtcttagtttattccctttttgtagctagtaagttatttaatttgtaattcacaatggtggtgagggcataaagataaatgcatcacagctcttgtgatgacataagtgcttgctttctggatttcagttttctcatgtgcaaaataaggattatagagccaaatgagacccaaggttgtcttaagcactaacattatgtgatactttgaatattgcacagtggaaaacattaaacaagtgtgtgctaaatcggagttgttca

SEQ ID NO: 126230 - DNA, 1742 bp, Homo sapiens
ctggtctcaaactcctgacctcaggcgatccacctgcctcggcctcccaaagtgttgggattacaggcgtgagccaccacacctggccagatactctgtatgtttttggtctctaaaagttccattttcttttatatatcttccattttttaaatcatattcatattttgttgtaaatatttgagcctatttatattaattattttaacatttccatggtctactaagtttattatttcttagatttttgggtctgttctagtctctttttttcacccatttatgaatcacattttaaaattcatatctgaaattttttattggatgttggatattatgactattatactattgtctagattttattatcttcttttaaattttttgaaatttgttttgagtgctgtcaaagctactgtggtttagcttcattttttgaggcttttatcaaaacttcgttatagtgggtctggtgacacccctgtggaggcagggtagctctcctactaagatgtaacactctgctcagtgtttagggtgtttgagtctctctattcatgtctgtcagaactcaagcatcttgcagcccagtgagaccactgggaattatttagcttgcagctccccagtaataggtcacccagtctcatagaattttctcctctgtgtatatgtgtaacttagtagttagctattggcgtaaggggcctctgtgaagatttctggagtttttctctgccaagctctgagctcactagtactcagccctacaaactctggcctcttcagtctccctagagtcttatttttaactcctcaaccgagtgagactgctgtgatctacttgggattcctagcctgcactgttatggaaagggtcttatggaaaagggatttactcagtttttttccttcactcatggatcataattctgggctgcctgttgtctcaatgtttgaaaaaaaattttttttcctcagttttctagtagcttacagtaagaaggtatggacaattttacttattccatcatggcagaagtggaacagtttctgtttttaatagaagaatttattttaattgtgactttgaataaatataacctgaggttgtttatttttcttgtttagtgagtagctcttcacagaattagagccctccctccttttttaaaaaatgaaattctacacaggaccccaatatagaaaatagttaaaacttcatctgctctcatttaaattaggtttatagctctgttggtctctacctaacaccaaagcaatctggtactcccaaaaataaaatttgaaaacctgtgaactatttacccctctcattttacaggaggaaactaacttctagaagggtcaaatgttttgtcttaaagtaatgaatcttaaactgtctggcttatatgagtttttctagcatttgaaataagacctcttatatcctaactcagtgtctgatttttcttagtcagcttgattttttttaaaaggtctctttgattttgagctgtttcagcatgagattcttgagaactccatttcctattaatctttgtatggcgcattgagtccacatgggctctgttgtaacttctagctgtttaaacaatcttggaatagtttatattaaatccagtccaacatttggtttattctgttttctcacacttcagtatataagatttctgcttatccgttttacaaaaactgtatgaagatggctacatact

SEQ ID NO: 126231 - DNA, 2926 bp, Homo sapiens
caaatcttattttatgtagtaattgatgctttttcatgtactcttactatagcctacataatttgagttctttttcctttatttttttcctttttccaggtgaaaatttcctacctattggaaatataatttgtagtttttgactgatttatcttatattgataaaagatagggcatttaggaagaatttttatgcatattattttgttttctccctcaacttctttgtaaggtaggtgaacagatgaggtaaatgatgcagataggctaatcgtctctctccaagtcacacagttaagttgcagggttaggattccagggtcattgttccttttgctgattctacactatctctgaatattctctttcaaaaaaggatacataatctatttgctttagttaacgcagaattgacttgcaattttggttaaagagaatgaaaaggaaatcactgtatttagtgggaaaatgtcatttcaaaggttgattctgatctttaaaaattgtaattgtaattatcttgtgtagagccctgtgtcttaacatcctcatttaataatttgtttgtcatataagcagatggtgagaaaacagtgattcccagatctgtcattactgctgtggtaatttgatgttttatagttaagaattttgactggtagaaggctgatctagaattcacatgtctctggggacctgtattgtttggatttggaggtatacttgtatttgaattcagggaaggctgttataaataaggacttggcttgcatgataagtaacatttctttatatagctattcagttgagctattgaaagtaaaacatacaaacaaacaaacaacaatagcaaaaaacgctttgtgttgttgttgacagaaaagttgaagcttttcaatggtgttttcctctctcatgtcgcataaccatgatggtgataagcgtacaattatatataaaggcaaaaaagttcaaagtccagaggtattaaatctttatggtaaatgagagcctgtaagtcatgtaatacactaagaagtatgttctgaaaatcttaagagatccaattgccatgtgactctcacaatgttatcctttatgaggagaataaaaggatgcttagtgtgacttttgcaacatcaagcccagttgaaacacaaattttattttgatttgtgagtccaatccaaccagttatttttcattttccatttaccatcattttgattagtattttttgttaatcagttcagagttactatttgcagccctctgaaagctggagcctacattagaagttttctaaatgtattgaagacaaagccatttattaaaatctgatattaaactgtcactttccagaggcatatttgaaaaacagaaaaacaaacaaacaaaaaaaacacaagggaaaccatagagctcttcctgagatgctttaattcaggagtttctactcaaaaagttaatcactgacaaaattctttgaaatgttttagtgttcgtgtgagtgtcacaagccatgctttttagaaaccagaattttgtaataagtgctctctctgcagcaattaaaaagtggcgtcatctatggtaaacactaagttggtctattgagagggaaatagctagcccttcaaaatacctttgtgggagtgaaaattacctttcgtactgaaacttactaacccccagtgattaagaggccatttcatgttcaaaaacatgttattaaaaataatgagtgtgatattttaagtacatgactattactacaaaaattgtaatattatagattaggatttattcatacactgaaggtctcatatgttgatatgaactatatttcatttaagaaggccttgggaggaggagtcaggatcatgaacaatctgagagtttatccaagacctgtaagttataagaaggaagagttgagaggtagctgaggtgggtgtctccaggtaggacacgtgaagatgggaataagttcaggggacctgagaaaggtgcttggtgcctaaagtcagaggaaagtcaaattagggattccttttagggaggtgaggagagcaacttagacgtgatgttgcatttgtgagcttggaacccagagttaaaagaaaatatacagaattgaaaaatattacctggcctaaaattggaagtagaatgatttcgcaggaaagaaaagtgaaagaggaactatcatctcctaggcaaaaacagaacagtgtagagtcaggaagaaatcatgatttgtcttcaagctgagattagttaattggatggcacagtataggtgtctaacttacccgtacatagtttactctcttcaggtgtccttaaactgtgatgtaagtgttcatctgaatttactctgtatttacattctatccatgatgtctgtaatagctatgactataaaagggagggccagcctcattactccttggatggctacactgcagtaggacccagaggatgtgagtatgggaatctgatcctgagtcctgctggttggagagttgccagtgtcatcataacttgtaaaaaaagtcccataagacacttgtaaaggataagtcttaaagtatgtaagaataaatcagaaaattgccttttttaaaaaaaagctttttaaaaagctttttagctggtgattgtgtctttcttttctttaggattctttaataagtaattttagtaaagtgtcattcttagttgctaaagaaaacagtcgtctcctgttttcagtcatcagattcaagcctattaggaaaaacttgaataattattcttacacgtctccattaatatgaagaatcatgcataaaatgtagtccatgcttatctctaaaataaacaaggaaataaaatttccgggttctgttagttgttagaaaacatggtaactcaacttgtt

SEQ ID NO: 126232 - DNA, 1064 bp, Homo sapiens
gaaaaaataaaatttactacattctaattataaagagtactttgccatatcccttacccttctcaattctgatatggtctcctggaggtgagacagggtttatttgctaatagcctgttgagcaattcagttgtcttaccattgtctcctttccctgcctgatcttttttcattgaatggccataataattttttttttttttgagagacggagtttcgcgcttgttgcccaggctggagtgcaatgctgcgatcttggctcatcgcaacctccacctcccaggttcaagcaggtctcctgcctcagcctcctaagtagctaggactacaggagcacgccactacactaggataattttgtatttttagtagagacgaggttttaccatgttggtcaggctggtcttgaactcccgacctcaggtgatccgcccatctcagcctcccaaagtgctgggattacaggcgtgagccatcgtgcccggccataataaatttttgaatggccatcctaaattttaggtgcctcattggagtacagagttttgccatagattgtaaattattctagggagatatttttgatgctattgacatttaacccagataattctttgtcatgggagactgtcctgtgcattgtaggatgtttagcagcgttcccagcctcaccccaatagatgccagtggtacctcctcgcccaatttgtgacaaataaaaatgtcttaagatgacgttgcttgaatgtcctctggagggcaaaatctgcggttgagaaccactgctctagggcaagaaggtcttttgtgtttgtattctctcatttcccatacatatgtctcctcaattgtgttattatgtataagaacccagtaatttttacttaattgaaatagtaactttattttaaggcctgattatcttgtattgaaatggtaatttttatgttatagcctgtatgtatcaacaaatatgtaaaaacctggagaggaaatattgtataatccatgtatagtataaataagagttagctttaggtatctgttggatcgattttaaatac

SEQ ID NO: 126233 - DNA, 1052 bp, Homo sapiens
agatatgtagcatggattttattgtttctgtttgaaatttggggaaactgagtcccagaatttcctggttttaggtcttatttcacttgtcatgctggtggatgtcaaagatgcagtttatcaccattcctgtgtagctagccaaaggtatccatccgtgcttctcttggttgcataaaattatggtgagagttagtagatggtgcaggttcatggacgatttctcaaaatgcattttatgaaaacatgtcacagagagagaaaacttgatacttgtgtttttactaagacataatctttttttttttaaattgaatgagaaactgagatctagaggagcaagctcactattcaggaagatttactcatcaaactaagggtaggaatagtaaaactaattgaatcatttcccccaaatctacccttatctaaagcttatttcttcagctttagctggtcaatttctagaccaatgcccccacttccctgtaaccttctctggcaaaagcaatatatcttattatattctaccccacaatggtgagtctgactctagaacaacaaaatggggaaaatctgaatctagaagttccatttttcaggagaatctttattttgggctatatagcctgtgttgtctggaaaattgtcactgagttcttttagtacaattaagacagtctgctatattacaaaatatatacaaaagtgtgtaaaactgtcttatattgtgtataattacgagtaattataaaataaacacctgtgtaaaccacctcctacattaagaagtagaatattgtcttcacctcagaagtctctaattcttagaggtaaccactgttcctgatttaacagtaatcattctgttacctttaaaataatattatttaatgcattcctaaatagtagtagtataccttactctttaatttttaattttttaatttttttattttgagacagagtcttgctctgtcgcctgggctggagtgtagtggcatgctgttggctcactgcaaactctgcctcctggattcacgccattctct

SEQ ID NO: 126234 - DNA, 1499 bp, Homo sapiens
tttaaaaattgttgaattttgatctctctctccatgacaaatgtattatttggagacttcacttagaaaagaaaaagaggaatttatgacttcatcagaagcctcattagggaatatgtttggctttcatgttgagttgtctttttttccttttctttttttctgctgttgtttgttcccaagaaattcacagtctttgaactcacataatttgggggatttcaaatactgtatcattcaaccacagctgttttagatatgccacaaattgtagttctatgaacttgattttttcccctgaacatggagaaaaagcaaataataaagaaaagaaaagggggaaaatttaaattgtctccgtagtaattaaataactcatacagccaaagtgctatattttagtagtaactaccttgtttttaatgtgacatcaaaagctgatggtttgtttctcatttagtgcagatgtgaaatagtctacatctctagaacggtttaaaagaaattatggtcatggtagagagatttaatttgggtctactccatgaacttgaggcattttccccacaaagaactagcagatgaatttaggtacattaaagaaatgattatagacagcttatacaacgtctaaaacttgggaaaccatccctctgtttaattttttaaattcctctcagatctcatttgttaataaccctattcttactcatttttattccttgcacttacccagctttctgcttgggataattttcagtgtgatagaatccacttgactccttcttcctatgccctttcagtatagtattgaagaggaattcattatattgaatgaatgttcttaaatttgtttcacttacttcctctctaataatccattttcttctcagtttgaactttaggtatgggtaatagatcaggaattggggagacctttgttctaaataattggaatgaccatatttgtcaattagagagatatgtagaccaatggttataaaccagagtactagaaattcttgtagaacatcagggaacatgtattctgaagtttgtaactggagagtctgattcagtaagtcagaagtggccctgtgaatgagtactgtaaataatcatcttaaataatactgtaaggattggtcttttgttcctttgtagattgacctcccaaaagttctacctttagttagattgtttagttgaatttataagtaaaaaataatggcttaggctaaattaaaattgttaactggactatttacagatcccttactaggtattagatgttataactgggtaagatagagaatgcaaggaatttcaatatgtttttcctggaaaaaacaaaacaaaacaaaattacacacaagaagatgtacatctgggccgaagatgcttttagagtggcagcttctttgttgtaatttgaaccaagtaaatgagactaaaggggagaatgtaaactgagaagagaagagggctgtggaatcctc

SEQ ID NO: 126235 - DNA, 2035 bp, Homo sapiens
ggaggttgttacacaggcccagtttcttgtacctaagggaccagccagacaagtaaatcacttttgcctggggtgatgtgagtaagtgggaggacctggaggcatacactaatggatatctcttcccttgaaaaataaagctgggaaaaggtgattgcttgtcttttagtcagtatttactgctgagactggaaaacattaatgcagtgataatttgctactctcaaatagcaggtttattgtaggtacagttttggaatttcaaagctgaacgtgatcttggagatcatttacttaactcccctcgtttttacagatgaggaagatgtgggcctaaaaaggtcaacttacttaagataacacaagtggaagagcagatcttctgagtcaccatgccaacgtctatttataagtaggaatgctaatgcattgctttttcaatagaaaattaagtgaaatttctcatttctattttcttatatagaaaaccaaaatatgagaatcttaaacacaataaagcaaattagtactccagctactttacaatgactactaccacttttacacatttcttttcaaatgctttttaatgcatacaatttatatgtgaggtgtaactgcagcatccaaattggaatacaagagggctccatctctttcatgtgaaaggactcattttgctgcttgtcttttttatagagaaccattctgaaagaatacaaggtagatatatcaagaatactctgtatctggaatttttttctaacataagctttgaatagctgtgtgaatgtgtacttctttccttgaatctaaaataagattagaccagatatggcaaatacgtttcttttgtccttcccttaaattgatctcatagttaactgctttggagattctgggaagatggctgcacttgcctcacattcttcacctggataatccaccacagggagcggagtcccatgccttgtggttcttttcatccctacttaggtaattgctcagctcccattgggttataacattctgcaactgtatattttagaagctcgtttttttttttctgaattaaactaacttataatattactgagttttacataaagttttattctttagactaatcaatatgctagaaccatctatagatgtaactcagggaactagttcttctgttgtcatatgacagattattccacacaaacacacatactaaaaaagccattgtgaactaagctcaggaaatttcaactgaagcatggtattattattattatgtttctcagcatgagcagtagttttccagaccctcagccaaatgtctgaaagaagataaagtacagtggactttcctataacatagtctgagaattaaaatcaaagtgtcccagtaactaagctgtcttaaatgggaagtgagatcttagattccctttgttattaaggatcaagtctttggtggtttttagtatttaaggtcaacactcactaatcctttttttgaggggtgaatgacagcttaactgcaaagcatagtttcagtttactgcctggcaaatacaagcttattaaaaaaaaacgcctgattttattttgcatttgaaatttatagaatacaaggtctttttgtatcatagtctcatcattgtaaacatcagttatcactaagtaaatgaacactggaagtgctattaacatatattttaagttaatatatagacaaatttgcttttatagtgtatggaaagacttatgcccattgatcattcatggttttgtaatgagcgtttttaagataacatttaccaaagctctatattttaataatccagaaaactataaagaaaataaaaaatcagccaggcacgatggctcaagcctgtaatctcagcactttggaggccaaggtaggcagatcacctgaggtctggagtttctgaccagcctggtcaacatagtgaaacaccatctctactaaaaatgcacaaattagccaggtgtggtggtgtgcacatataatcccagctacttg

SEQ ID NO: 126236 - DNA, 1007 bp, Homo sapiens
accttcttgcacataaaagcctgagctcagaaaggcccagtgagttggccaagcccacagcgtgtggcagcacaagttctcattgaccgctgccttacatgtgggccccatgcagtttcccctcaatattctttcctactgcagtcctagctaggttggctttttcttttctaagctaggagtttaagtatggaaataatgatattatccttatgaaatgctttaacttgtcaaaagtgtctctgtaacttgtaggtgttgtaaatctgcggtcttatttctacttacttgtaaggaagtcatattcctgactaccttgtcaaataccaaaaagttcagttttgcagccagagaatatcctgtttgaaagactttgtgatgactcattttatgggtcaacgttggtaggccacagtacccagatatgtgggtaaacattattctagagtctatgaagtatcttttagatgagatgaacatttaaagcagtgggctaaagcagattaccttccttaacgtggattggcctcatcaaattcattgaagaccttcatagaagaagactgacttccatcagagaagaggggattctgccagcagactgtctttggacttgaactgcaacattagttctttcctgggtctctggcctgcaggcctaccctgcagattttggatttgctagtccctactgtcatatgagacaattccttaaaatcaattttaatataaatatatatagtatgtataaaaaaaacacatataaagatattaattctatttttctggaaaaccttgacaaacgtaggcttccttgtgttgccgtttgaactagcatgctctctacctcccattatatagagtatgtttggttttttttcacttcttttttttttttttttttgagacagtctcgctctgttgcccaggctggagtctggagtgcagtggtgcgatcttggctcactgcaagctccgcctcctgggttcatgccattctcccgcct

SEQ ID NO: 126237 - DNA, 1054 bp, Homo sapiens
gttttaggtttgttttatttaatttcagaatactctcaaatgaactttataaactagcccgaatagggaagaacattctgatatcagagtgtttgggatcctgaaaaaaaaaatgttgggaaggagttatttatttgaaacagttatttcatacttactttatatatagacacacgcatacatatttatttacttactagtattagtgaaattgagtgatgttccagaatgaatactgtttaaaccattgttttgcagtcataaaccgggacctattagcagaagtagagaagtggtaaatattaatgaataatttccagtcatatctgccagtgatttccgggacgcatgagacccaggcccagctaactgttattttgtgtgtaaagcttgcttctataggcattttccattgcagtacactcaactatcaatgttttccaaaaaactatagatatgtgtatgtgtgtgtatatatattttggtctagggtcttatatttgaaatatatattccttctcttctgcagtcaaatatgtgaatttctgtttattcttcaagactcaggtcaaatatctttgccttcacaacttctttaccttctcaggaaaataaaaacaaaatagttggtatatgctgcttttatatcagttaccacattattttgtaggtgcttattttgatttctgtgtccttcctaaactgtaagctactagaaactattccttctccagtgcctagcacaatgtcaaacatgagtttagaactgtaaaatattgttgaatgaataaatgtgaataagtgattactaaaaatataagaggaagtgaaggatcaaaagagctgtctaagagaaagttgtaagtatgacaatgtaagaagaatattaggccaggcatagtagcttaagctggtaatcccagcactttgggaggccaagatgggaggattgcttgagcctgggaattcaagaccagcatgggcaatatagtgagacctcgcctctaaaaaaaaattttttttaattagctgagtgtgatggcatgtgcctgta

SEQ ID NO: 126238 - DNA, 1141 bp, Homo sapiens
aggacagtgttagaatggaggtcaggttcagtgatcttatgattgagacagcattataatactgacaccctgctacttcagggctagtataggtcataccatgaaacaggttcagtgtaggtatttgcttaggtagcttcaagatggtttaccttagttttattgggaaacagcagagcgttccagctaatatgattcattctgattctataaaaggcgataaatattgctattcacataatgtgttctgaggctactttgtctcttaaatgattaaaagtggtactatcgcttacacattttaaaaattagtaagttacttttatactgactcaattttccttttcttaacatctcaattgattttaaagacaaaacagttgtttagaagaaattcatcacatgaatgtttaaacttacatagttttggatacctggcaggtttttttttttttctgtattatcatcttgttggcctcttactacaggttttcaacacatactccaatgaagactatgacaggagaaatgacgaagttgaccctgtggctgcttcagctgagtatgaacttgaaaaacgtgtagaaaagctggaacttttcccagtggagctagagaaaggttcgtgagtgctacagtgttaatatcattatgttgctatgttaataatacagaattatttttccaaaatgtagccttttttctaaggattggataaaattttaattctaacagaggatcttatttattaagtttcaaaaatagttgatatggattctgagtagatggtggattgaaagttttactcccaactgaaacccatctatcttagctggctgcgatggtggttaggatcagggaggtataagtgaggcctaatgctttgttggtattcctggaaagggctgctacagctgagagcccagaaagagctggtatatgagagcttggggcagatggtcgctttcttttgttttggtggataattggaaaattatggagatttttaataaaggcggtagaatccaaggaaatttaaatagtagggctacatcctctccccctctgaggggagaaggttgaaagagagcagggagaagagggagcagaaaggcttccttctgatttctctcccaggaat

SEQ ID NO: 126239 - DNA, 1136 bp, Homo sapiens
ttctcacttataagtgagagctaaacagtgggtacacatcaacatacagagcagagtaatagacactggggactccaaaagtttacgagggtgggagggggatggggcttgacaaataaccacttgcgcacaatgcgaactattcaggtaaaggttacactaaaagcccagactcaccactatgtaatatatccatatagcacacctgcacatgtactcccctgaatttatacagatttaaaaaaagacgttcttgagcaacttagcaacaagaacaaatttcttgattttgaaatgaaaaatttcaccggaagaattgaaaaggatagttattgttgagacttaagttggcgatctagaagatgacgtttgagagatattccaaaaagaattctcaaatgacagagcaaaaatccaagaaaaatcatgaaagagtcccaatatataagttgtaggcaacagaagagaaaaacgacaatggagaaggacagactaataataatcatagaagaaaaatttcttgtccttaaaaagaagatctgaggcttatattaggaagaacttatccatttatgagtgagagggctaaataaccccaaactgatcccacacttaggcatagcctgggaaaaaatcctaatattcaaagataaagtgaaagagcttaaaaaattccaggccaaaaaatacccaaccaaacaaacaagcaaatatacttgcaaaggcaaaataattagactagcatcagactgtaacactagaagcagggagatgtagaaataattttacatgccactgagggtaaaaaggatggtgatccaagaatcccatatccatcccagaaagcatttacctatcctggtgaaagaaagacatctgctgctatctaaggatttaaagaacacattgcctacatactttatctgagtaattcactgtccaatttagcagggagggagtgaaacaaagagcagcttgttcaaaacagcaagggcaaggaaaaaagaggtgaaaactatgaagtattaaacatacaattgcttaaatgaaaaagtatgaagaatactagtcatattacaccaaacatgactgatggattactcctgttaaaagacactttcatttggagttaaagt

SEQ ID NO: 126240 - DNA, 1032 bp, Homo sapiens
aaaattattctgtgtatctctaggcagtctagaactcatattctagaattctagatcagcagtgaacaaagtgaggatgtctactcttaccccttctttttaatatatgttggaagttttagccagggcattaaggcagtaaatacatagacaaataaatagacagataggaaaggaagaagtaaaatatgtatttcttcatagtagatgtgatattatatatcaaatgattctaggaaatctgcaaaggtactaggattaataaatgactttagcaaggtcgcagaatacaaggccagtattcaaagatcaattatatgtctatactttaaaaacaaataaccagaaacagaaatttaaaagccagtatcacttacaataccaaaaaaaaaaaaaaaatgaaatacttagaggtaaatttaacaaacattttttaagacctatatactgaaaaccatagtatattattgagagaaagtaaaaatctgaatgaatatagagatacaccatgttcagggatcagataagtcaattttgctaagatgtcagttctccacaaattaatttagaattcaaagcaattctaaattaaacccaatgggctttattttagaaattgacaagctgattttaaaatttatatggaattgcagaggaaaaacaattgatacagagttagaaaactcacaccacctaaatatttattatatagtaatcagagaagtgtgttattagcatatgatgttgaaacaattcattatccatttagaaatacaaaaggaaactccacccttaccacacatcatacatggaaatcaatttacaagatatcatagacctaatataaaagcaaaacataaacactttaaggagaaaaataggagaaaatcttagcaatcttaaatcaggcagaggctttttagataggaagcaaaagccatcagtttttttttttttttcttgagacagggtcttgctttgtcacccagtctggagggcattggtgcaatcatggctcactgcagccttgac

SEQ ID NO: 126241 - DNA, 2051 bp, Homo sapiens
actccgggcctcaggtgatccacccacctttgcctcccaaagtgttgggattataggcttgagccactgagcccagccctcaaaatgtttttgaagtaatttttgttatagttacacaaatgcttctttagttcaatggtacaggaaattatgagcttgcttctattttgtatggcatcaaaaatgtgtaaagtactgcagaatgggttacgtatattacatcttctcttaaaatgataatttttatggtcctttacttttttcccccttcttttcctttatgagctgtgtccctaaaaatcactttaattgcacatctaagctttcttctcacccaagaaaaccattttgaagtacgtaggtgatattactttcttgaggcttgatggaccctgctgagatcaaacctgtttacttttcttaaaactcctttttgttggagagtcttaaatattagtctttgttaacctttccacagatttgttattgggcgggaaaaaccaggacaagtgagcgaggttgcccagttgataagccagacactggaacaggagaggcgccagagagagctgctggaacagcactatgcccagtatgatgccgacgatgacgaggtcagtagtgcttgcaaagattctttttcccacattttctaattcatgaaactctctctactgtataacagtatgacaggttttatgcagtttcttgaggaaggtgtgtccacattgaactaaaattctaccttagaaaagaaatactactcgcatctgatatacgcttaagaatcaagtcatggtatcctgtttacagtatgaagactgtggacacaaataagtcttatcttttgcactattataaaggaagtcatagaaacagaaaaggataaaaacacaaaaatgtgaataatgtcatctttattggtggaattgggtgattttctctctctgctttatattttttcaatcttttccaaatgttctacaatagtatgtaatgcttttccaaaaaatcagtaaacacacccatacacaaacaaatatacatagaaaagtactaaagattgctgagtgtttccagtgtctttttcccccaggaagaaaaagttctttggatctgcttactatgatttgtgctaacataatgcagaacaaagctttccactagcacatgttccatagagcagatacatattggaataattttacatcctgctttctgtaaaagatcaagtaaatgaatagaagctaacccccaagtgaaaacagctctccagaacccttgtgtgctgtaatataatacagatgctggtctatttctaatgtctttgaaatgtacattgatataatgggacaacatgctttattataaacacgtttaaacattcatgtgtttcatattggtgtgtcaaaagatccatcaacaatttaattgtagtattttatactccataaactagtacatattcaggtaaaacaaatattcttcattccagctaatataaccacagtgaaacttcatgtattcaaccccttcttatctgaatatataatttttcagaattttgctttctagccaggatatagatattaataaacagacattcaaatattttcacatatttttaatctgagatgttttaatcccaatgtatattaagatctcatgaatatgtggtataatgaggatatattctccacttatagcagaaaattagaggtggtatatccgttaacttttgatcaaagaataatatattagaaatcctttaaatgaatgaattagactcttagaacttgatttaatttattttcttacttggtgagtccatttgaaatggcaagtatattttcattacactgagatattttgtatgaaaaatgttctcttgaattttcaaactaaaaaagggatttcctcaaatattttgaacttgtatcttacctggttttcaattctttacattagtattttgtattttatcagagacactgatttgcttttgctgcaagcttattctgagattgtagaatcattttctgcaggtttga

SEQ ID NO: 126242 - DNA, 1065 bp, Homo sapiens
ttgtcacctgagcagatattttcaggggcaaggaaattaagtaaatattcagtggcaagcactttgcaaggtgtctttcttacatgatctcatttaatctttaatgcagccagaagagattttctttttttccctagaaatgcagcaactgaggtttttttctagtggtacatccagtagctggcagagttgaaattggaataaagtcttgctggctccaaagcctggactctttgcaacacactgtgctgtttttgagtagcatgtaagaacactcctgcagacacagaataactgggtaacaaaagatgttaagagaattactgtttgcggtgatggagtttaggttctatgattctttgttctgtatttctaataatagggaaatcaagtctttggataattattttctctatgcaacagtccataagaatcatctttatagagtttaaagagaagaataattgagtactcaaattttttttaattagtttagctttaagttaaactgtttttctttctgcaagttgtagaagtaaaaacgaggtgcttgctatgttactccaagtaactcactttatggaaaaaagtcaaggagacttctcctttgtatctgtctctcatcctctgtgacttgggttttttccctttcttgtatgttacacactgcctcaacaaaacatgcccagataaaaccaactgttaattttcagtgcataggagagatgaaagctgtacaaatagtgaaaatccactccaatgttaaaacttcaaattgtcacttgattcaaattcttttttctaatgctgaaaaaattattaaatggattgatttgagtgctttttccctattttctatttactctctgtctttctttgtgaatgaagaataaaatgtccaagaggcataaaggaaatgagaagaacaaatattggatagctaatggataaatgctccttgaataattgagttaatttcatatataattgaacaatttattgattagtatatctttgttaatcagtcacttggtttttttacttttatgatttatagaatcatct

SEQ ID NO: 126243 - DNA, 1037 bp, Homo sapiens
gtaaacaagagaatgcaattattatggttggccttttaataatgtgaatataataatgtaaatagactttatactgtatctataatactgagaaaccaagagtgtgggcattttttaccaacatgccgcaatattgtcttagtacttaacagtgtgtattacagtaagcactgggactcagtgtttttcaatcctttatcaggctgctctctgcggtgggggttaagccttctttaatattttttgtcaaccattttagaacactgtggctgaattgcaaggaatgtctggcaactgcaataacaataacaactattttcttaaggtttgttttttggtttaaagtaatgcttacctgtactttcctgcttcatatgtaaaattaaatattctttgtgtcttattaactatctgtatgttctgaagaacttctctagagtgatgtgttttgtgcattgaataatagtttgaaaataatcattcaaaaaacaattctgaaacatagcatatattttaggtataggttctgcaatttagactcatttcttaatatttagccatggatatttttaacccctaacactttaaatatcttgtgattcaaattaaagggaaaaagcaaatgtccaacagcaggtctgtatgatgtttacacagtaataatgcacatagtgatttatactgtctgtaaatccagtacttttttagaaaataatcttttgatacaaaattcttgatttctcaaaacactaaatatatctttaaattatagtagtatttagttgcatgatttatatggtagacatatcaaaatatctaaaatatcaaaatatctaaaatgatactatactttaaataataaaataattctcgttatgtttagttgctgttaatatagatagcagtgcttaaaaatggaggttgagtgtatgtaaaaggcaggctgatttatggcaattagaggaaactgaagaataaaggaaatatatttaacagcctgttcacagactccaatttggtctaatctctaaaatcat

SEQ ID NO: 126244 - DNA, 1034 bp, Homo sapiens
cttcatcataaagctggaaccccatggactacacctttctgtaaggtgaaaataaatctatcaccccagggactgcatggaaaattgccagtgtcaaaccttgggtgctgagtggaaaagccaaaaaaattttttctaacaaattatgatcacaagtagccttaatttatgttacttttcagaagaaaaaaaaaagcatatctttccttgggcgttcatctttactcaaagaaaaaaagttaaagtttcgagaaatatgagttgacggtttcaaggtacaaagttcgcaggaaaataaagcaccatgagtaaaaaacagcagaaaatagaagaaagggagggaggaaaagaaaaaaaagagaagaaagaaaataaatataaggtcaaaatcattttattatcaattataccaaactagaacaaatatctccaattgcatataacttattccagaagacagaaaaacaaaagtagtacaactttgataccaggaatgcagtaaaactttgacagtgtgagatgtatgaagtaataaaacataactttggtaccaaaagctaacaatgatgagaaagaaaacttataggtccatcccattcataaaaacaatgcaaaaaggtcctaaacaaaatattagcaaaccatatgaagcaacatataaaagagataatatatcatagctaggttgggtttagccaggaatgcaagtatggtttaacattggaaaatctgtcactttttatatttgacattgtactggaaggcaagtaaaagaaattaaagaaataaattgtaaagaaatgaaactgttattcacatatgatgagattgtctatttaaaaaatctcaaaaagtacctatagataagttattagaaataatataaagttatagcaactttgctgaatacataattaatgtaaaataaaacatctatttcaatatgtctgcaaaccaggagaaaacataatttataagttaccatttacaagacttcaagacataaatgatagggaagagcttcatagagaaaa

SEQ ID NO: 126245 - DNA, 1027 bp, Homo sapiens
agccttcagatgattatagagatccctccaaaatgaggctactcttagttactaaagggagctttcctgagggataactaatttattatttgtatgagccctacaggcaattgtccttatgattaaagtcatttaatcagataagatcttatgaaaatggttcctgattttaggtaatgtggttattggtaccacctcagtcctggaaggcagtcatgtcagcctcaaccttttggccagggtttttctggacagtagaattgctctaacccctagacttcctccttgtatgccaaggtttgagtctatgtaattattgatcctgctgtacctggttcaataccttaggccaagtggaaaggtcaatacagaagcttaaggagaaagtcctgggtttctaaggtatatcctgatggtttatgggatttctttaaccagttgggtctgggagcctagagaatatagttgttatcaatgccgaaagttagactaattctgctgcttggaatcctattgatagtagtattaatcatatgctctgagatagactgaatggctttggtcctagccactcttggttacattgatcagtgtggccaagggaatgccatactcggagaaaattcacctcaagccaagactgtgtagaaatgagggtggacgttgtttggagacaattcctccatgggttctcccttctctgcttgttttttgagcagcagcagcaccagcagcctatgtttcagattatctttccaatgatgttggtatcattgggagacagtatgtccctttaggcagtgacaggtttgtttatcactcattattcaaaaatttgaatttcctaagggcagaattcttaagattttattggttgtactatctttctttctctttctttttttttttttttttggagacagagttttgctctgttgcctagactacagcacattgatgcaatcttggctgactgcaatctctgccttacgggttcaagcgtttctcatgcctcagcctcccaagt

SEQ ID NO: 126246 - DNA, 1135 bp, Homo sapiens
gcccttaacattttttccttcatttcaactttggtgaatttgacaattatgtgtcttggagttgctcttctcaaggagtatctttgtggcgttctctgtatttcctgaatttgaatgttggcctgccttgctagattggggaagttttcctggataatatcctacagagtgttttccaacttggttccattctccctgtcactttcagataaaatcaggaaatattctgataacaaaagattgaaaagaaaattttgaatgagttgataagtgggagaaaaaaataaatatatatgctgggccaggcatcattttggatattttgcatatttcatttcttcgaatcctctcaatatcctatgagattggtatcttttacaccattttatagaagagaccacaaaagatacaaactaaatgacttacttactgttatgcaactgggacattaggatttttctctcttctggccctcatctctccaaccccaaatgctttttttgttgcattagtttatggtgttgtcctggagaaataagggatggtgaaaacaatcataatcataacgtcatgcagtcagttagcatattctaggcactgtggttaactctttcatatcactacaatgaattctcatagcaacctctttaaatgaagaaggtgctgttatttccattttatagatgaggaaacaacattcaaagagactaagtgtactaacattataaaattaggacacacaggagtcactgacaaaaaaatggaaagagagatgcttcggcagagagagggatgtttttgccgaaaggcctctggatggttggtgcagatttaggaattttaaacattaaaatgtgagtttgacgttttcctcctccagggaagaagcagctctcctttattctctcacagaagtgcgtctgaaaatacatagcaccaaattcaaatccggtaaacaaattccatcaaaaactgcataattaaggctatttttgtgattagcgccatttagtttccctgaatttaccagagcaaacattgctacagcaaaaattactgctaatggttgaacctaacaacaagagaaaatccccagaagggtcatttaggccccagctgcagctgtgtttcacta

SEQ ID NO: 126247 - DNA, 1029 bp, Homo sapiens
tcccttccaactctgtgattcattaaactccccttcccttttcattgctctcagtattgggtggcgtattcacaaagagaatttaaagaaatgacttatttccctcagcaacataattttatttggtaaaataatcaaatactcagaaaaaacaactcttgtttctgtattaaagatgccactgatactagtagatttttagaaacgcacttgtatatggcataggtttgtcactttggatctttaaactaacatttgtttataacattggctgcatgaggcatgcttggctgaaaaacctacttacacttttaccatttgggtacatgtcttacttgtcttttataaaatattttcaaataactcacctccacctggggtaaggacagctggatttctgaaatccccttcctttcagacaggagaatatgccacagatgaagaagaagatgaggtaggacctgtccttcctggcagcgacatggccattgaagtctttgagctgcctgagaatgaggacatgttttccccatcagaactggacacaagcaagctcagtcacaagttcaaagaggtatgccactaagctgcaaaatatttctttatgcctgtccatttcattaagtatatatttctgttcaaataatatattaagaataatcagtttgcaaatcaaagctttttaataacaggttgtcttgagtctcattgaatttcaagtagaatttaagtagatctcgttccacggtcattgatttaaacgcttatttgtcatagtgacatacctgtagcccataatttcaagcagtaacttaaatgtgcagttttatgatgtttaagttatattttttcagttttacagaagttttggtaactagtgataagcttttctctcaaggcagagacttcctaaaaagtctctttttgtctttctgttcatgaaataggtttctaataagcatcagatggcatacccaaagggtttacttgaagagagtttaatacacagactttgaacagagttaatag

SEQ ID NO: 126248 - DNA, 1052 bp, Homo sapiens
ttacttatttaaaaaagagctgtaattacaggccatcaactacatccagcagcagcatcattaataacaagtttatgagtacctacttagggagtgaccttgttagagaatctcacccaatgctacatatgctgccattagtgttaccattcagattagattgtgatattgttcagtcagccagttttagttcattttgcatacatgattccctaagtaaaacactttcgttaatactggatagataccatatgtaaacttttcagcagaaattacaaagaaatatggcaaagcttcatcttaacaccaaaatgtagttaaaaacagctttgatttcttttgtgaagctatattgttgtaggtaagacatacatcactcaaatactcacaaagataactaaaaatttagatcccaatctagaaagcactttataaagttctatgcaaatattagttattgatttgcttttgtaaagcaacagcagaaaatgttgcccttatctgattgtaatatttctagaactagagctctcttaaaacatttcctgcaaagatatttttcactttttaaagaaaaatgtttccatgctctcacaggataagtagagagagggcaaaagttcagtctcactatttaagtttctgtgtaaaggatgtttctatttctagcacagttatatttggattatatcgatccggtaatatgagtgcatgttctgtattcatctttttgaaaaaaaaattatacacagcaggtacaccttcagaatgttaaatgaaagctcctgttctcataggaatgtgtatgtttatttgtgctgaaatcctgaggtgcatatctatggctttcatattaaagatgactgaagagatgaaaatgatggtcttgtaagttaaaagacttttacctgcagtccttaaccttttctttttatttatgccctcctaatcccaactcttttctccaaacctagcttctctgaagcccaaaaactccaacaggcatctcaggctctatttctattaaccagccctgttaaccttctatccct

SEQ ID NO: 126249 - DNA, 1006 bp, Homo sapiens
ccatcttccctttatcatccttcccatgtgtccccatgaacttggtaaaaacccaagggaatacaggttgcaaacccaagagagggctgaggtttatgaggtgctgtggtctccacaggttcacattgctagtctgaaaactccacatttctgtccttctgtcagactcactcacttctgataagaaaacctcttagccttacttgattacagtaatagtaaaagtttatggtccctcatgtacagtcttaaatccaaaacgctcccagtcttttttgtaattttgtgtcaaactaatttagtggtacaacctgacctaacaggatgctatttacagtcttcatgtacctcgcttagtgggaatattcatgtttggtggcaaaaataattcatgtgtttttgactatagagtgcctccaaagaccctgctgtggataataagcaatttgtagaagatacatcgtaactacttttctgaagttggaagaatgctgacttccaaaaacatctggccccaaggatttcagacaagaaattgtgaacccataagttgtttttcttaaatttgggagtatttattgatcccctaaggaaacgaatgattcgttcagttccttcttcttcccttacaaagaaaacaaagcggggggagggacaagcaaaacaaatgtaaactgtgactcttattgctaataagctgtggcagaagctgttgggggtctgagtcttcaaaaggagcagatcttttggaggacagaaatctggatctgtacctttcctgcaattaaaagaaaaaaatatgtatcagagatttccccgtgcaactgcagtcctcctcctctctccctttgcagtggagctgctgatcagaatgtgcttgcaactcacaggaccatagcgccacctttcttgcagatttggaataaatcttcacacgtccaggtttggaattaaatcacactatcagctcacttgcctgtgtatgccgttcagttagctagactta

SEQ ID NO: 126250 - DNA, 1035 bp, Homo sapiens
tgtgcttctaactcctctctcctccctggccctctccactccctttttagttaattttttatatataattatatattttttaaaaactctcaaaacatgttgacattcgttggatatatcaaactctgaaacatcttttactgctcacagaatttcagatcacctggtgtgatggaaatatcgtgtgaggtggaatccaatccatgttttatcacttatcaaatgtgtgaccttggacaaatcatttcacttttcaaggcttccattttatcatctgtggaattataaaaataatacctgcttttctcatctcaagtggattcagtgattgtttatgataatagaacttgatctacaacatgctataaaaatgagagatttttgccacaaaagtggccaaattatctttgccttgacgtttgctttctccagctgcaggcagcagaaaatgagaaagtgaggtgggaactagaaaaaacccaactccaacaaaacatagaagagaataaggaaagaatgttgaagttggaaagctactggattgaggcccaaacattatgccacacagtgaatgagcatctcaaagagactcaaagccagtatcaggccttggaaaagaaatacaacaaggcaaagaagttgatcaaggattttcaacaaaagtaagccgcttctaataactaaagaatagttatgtttgtctaaagaaggtttatgtccaataattttgtaatatctagtggaacagaaaagatgaccttagagatatctttcctatccaggagcatagttacagcataaatacacattaagttttggaagtcacttctatcactttttcatgagattatgttttgtatattttatagtttttggctgccagggcctctttgctatttttgataattaatcgttgtttataactgttaaaacatctgaatttctttattctttttgaaacacctctatgatttagaaacaagaagcccagcggaaagtcatgtagaatgactgactattggatgtggagcacgc

SEQ ID NO: 126251 - DNA, 1062 bp, Homo sapiens
aggtctataagtgagtgcccctctcgatgtttctgacccacccagccccctcttcactgttattcatagaaatcttacaattatctttttcgaactcttatctagttacatcagtttactatactatgcttatgacattggaaaaatggaattatttctacctgacaagtaattatctccactaaattacccaatgtgggtcattagtgcagtctttcctatctaaatatgtatgggtgttctagaatcaggagctacgaaagaaaattatagtaagcagaatcgaatcatttttctttgccttgtgacccattaaagatgttttagtttctttcattactatactttttcctctaactgattgaatgttgtccatttaaataactgttcagttgcttatcctactatgcagtttattgtttcagataagaactttcatttattgagtgtatgatataatcagaactattattttcttcttaagagagcttgatttcatcaaaagacaggaagcagaaagaaagaaaatagaagatttggaaaaagctcatcttgtggaagtgcaaggcctccaagtgcgggtaagttgtgttccctaagacactaaataataagatggttttgctgtacttggaggggagcgctagtttagagttttataaatggatttgtttttcctagattagagatttggaagctgaggtattcaggctactgaagcaaaatgggactcaagttaacaataataacaacatctttgagagaagaacatctcttggtgaagtctctaaaggggataccatggagaacttggatggcaagcagacatcttgccaagatggcctaagtcaaggtttgtttaacccaaccacaaaaatcatttttgatgactgtgtaatttggccttttatttttctttttctgacccagagatttaaaagttggaaataccttcctactatgggaaagaagaaaaggcttatcaaaataggagtcaatcattttagctctcgtcttatcaaaaataaatactttaatatgtagcattaacaaatcacaact

SEQ ID NO: 126252 - DNA, 1022 bp, Homo sapiens
aatccaccagacccttcagtcatactgagttataaaatagtactgggagatatctaggccaggcacggtggctcatgcctgtcttcccagcactttgggaggccaaggcgggtggatcacctgaggtcaggagttcaagaccagcctggccaacatggggaaaccctgtctctactaaaaatacaaaaattagctgggcctggtggtgggcacctgtaatcccagctactcgggaggctgagatgggagaatcacctgaacccgggaggcggaggttgcagtgaaccaagatagtgcccctacactccagcctgggacagagcaagactctgactcaaaaaaaaaaaaaaaaaagttgcttcaagaggaaacacaatgttactttgtcagaatgagctttaacttagtaattttctgttcattttaggaaaagtgggctactttgttttggcttttgaattttacttgcttttaatagaacaagatacattatgatcttttataagtaaagatcattttaacccaaatgtgagtaatttcttttcaaggaaacttcagaagactactgtattccaaattatttcttatattgatatatggtctgattcaccatgatatatacatattatggtctggttcacctggttcaccatgaaattctaattatagattaaataataaccatatagctatgctaagataaaattgactaggctaggatatcagggtagagggatctaaaagtatgaaggagaagatgctacccagtgtggtttgtatatgaagtgttgccctgggctcctacattgttttcaaggtgggtcacagtgttcacgtaagatatctaatagccaagagggaaacatgaccagtcacagaggttgaagcatctgtaaagttaaaactgaacagatgaacagttatttagtaccagaaaattctgctctgtgtatggttctgaaaattgtgccaaccatattatttcagcaattagagtatcaggtccatcaggttatgactga

SEQ ID NO: 126253 - DNA, 1022 bp, Homo sapiens
cctgaattctttatattgttgtaattcaaaatattttgtctattcattcagtgaactaaccaagagcattatctgtattgtcatatttcatgatggtgcttttgatattcagctattggttttacttagtgggaaataatgaacgtacaagtaattgtttctgtaggtcttaggtatatgtattagtgacgatgttaatatggtgaattggtatgaaccatgcattctcatctgtaaatcaacaaaaactggttttcatggggattcactaataaaaggttggtcttatttcaaagtaagtattgcatagaactgatactcagtggcataaccttccttataatctcttataccaacagccatcaaacagtttctataaccacatgcatattaccaaattacttccacctaagggtttgagaacgtcttctccagaatcagattctggtgttccacccctcaccccggtggatagcaatgtgcccttctcgtctgaccacatagctgaatttcaagaagaaccactggacccagaaatggggcctctctcctctatgtggggagacacttcactgttttctacttcaaagtctgatcatgatgtggaagaatctccttgccatcaccaaaccaccaacaagaaaatattacgagaaaaaggtattgttaatttctttttctgacttcataacacctcagcttgtacagtataaaaatgactttttctcataatcataagtcatttgttttctcatagctaataattaatattaatttctttttatattatagaataagagaaacaacccctccatgtattttactttaatttagttttatcttttcctatctggttcagtatttttatctcttcagctctctataagtttactactcaagggagttcttcaggggagtggggcagcccagagtttcaacaaacactaacacagtcataaagaaaaaaacactacatagtcatatagaaaaatatagagcgattttgtagaatagcagcccag

SEQ ID NO: 126254 - DNA, 1441 bp, Homo sapiens
ttcctgttatataaacaacctaatactaaagttttggtcccgaggcttacatagcactgggcctttgttcagtcaagattaaataaagtaaattgaacactatcaattttctactcacaattactagagattattattctaattttttgtgtggttaataacacattatttgacccagaagatgtgttcaaaaatattcattgaattaatgtctagtaaatagaaactggcttttttaaagctttacaggatttattgcttattaaaagcattgggcctctgcaagtatagatagagtacaattatatcaacgctcagaagagagagagattgcgtccagctgaggttggtaaacaaaacctatccaaggaagtacaattagaatagccatcaaagcacttaagggaaaaaaagggtaggtaaggagggaatagcgggtaaagtgatgtcattaacagagacaggcacatatcatatgatttaaaggtacaaggctatcccagcctggctgtagcagtttgcttatgcagggtggagtagttacacacaaaagtgagccagtaggttaagtatatagctttagaagttaaacatcttagataacttgccatattactaggaaaccacaagaagtttgaccagaggaataaaaaggaaaagacaccaccaggtatggagaagctgagttaggagaccctatgaggtggtgccctctaaagaggagcagtagacagtgacaggaaagaatgattcaaggacccttgagacataccttgactaggtaacaggtaagaaagtgaggcaaaactatcatgggcttcacgcctcagaacatatggtcttgtcattaacagaaaataggaaatcagcaacatgatgggggaaataggattaactcatttttttaacagaggaggtcatgagcgcaagagagaggtcaggactgccaggtagatttgggagtccccattataaaggaagagatagtcaagtatcttattacagtgagattaaggagatgcagtccagtacaagaccttaggatttggccatcaggagatcatttattatttgaaaatgaaaaccaggttgccacagcttaaagttgaggcacccaatctgggggctcagatgtataattggtcacaaaggtagtattggagagattttaaaaagcctaacagaagtcttacgtagagctaaataaacaaaatgtatgtttcttttttcctgaaatcataccaatctaatgttggattttatgcagactagaagttctagtgtgcattaaagatggatttaatcgattttaaatgggaaagtacattattccttattcttaacatcttcagccctatggaagcattcatttcagtgttcctgggaacgcactttggcaaatgtgtgagataaagatgtaaggttgcctagcaccaagctc

SEQ ID NO: 126255 - DNA, 1471 bp, Homo sapiens
ccagagaagaaaactttgactctgactttccccctaaatctcccagactctcagaggtgatattctgcgctgggctttggagatacgggagaagtgggctatgttcctgttagaaggcactacaaccccaaggcaagaaaggaatggaggacagagcccaggcacttgaagccaagaatttggagccagagaaggaacaaaagtcatgttggtccctacttcgaatgcagaggatgatttgagagtatttattctcccttgttcattcccatgcagttgaagctaaaactctttgtgatgaatgttgagcctctgtcctatagaggacctcccctgcttaactgcgagttcctcaatgtaactgtgtctcctaggtcgtataagaaggcattgattatttattttacaattaggaatttaggcaaagcccttagattcagagatgcattgacttttgaattgtgactttaaaaataataataattgatctttttcacaaatgtgtatatcctagatgatgccaaagatcccaaatcactaagggcatccagttcattggcggtgcaaggaggaaaaattaagcggaagtttgtggatctggggtaagcacttcacgatgtaaaaagaaagccctctgtaaaaggaggattgaaagagaaaatttcagcttcccctttctgactgcttactatcattacagggcgcctttgcgaaggaattccagcaagggaaagaagtggaaagaaaaagaaaaagaagccagtaggttttctgcaggtagcaggtacggttgtgtgattaagaacacgtgtatttctatacctaaactttctggccccctcttctattgttaaccaaaatcagtggtcagtatctttgagctaaagtgatatgccaagaattgagatggaagaaaaattgcacaattagtttatattggtcttactccaattatagcctccatctagccttgggcatatccattggttcttaattgcagaattatggccacatgaaccatttcaataagtgtttatctaaattcagcacaaatatatctatgtgatacttcagaaatatcaaatatatttatgtgatacttcagattttttgcctggctacccacaatgctagtgcattgtattaagtctaaaaggataatcattttgcatttaagtaccttgttgacattcaagattgtcttgtccacatgtatgtaggagtgaccaccatcttttgctgcacttggctatttaattgattttgtgggcactgtcaactatgcttagtcttcagtaaagaccttcccataaagagcgagctttgaacagcatgttatcaaattttcccagttgttttctgagattatataattttaagctgagatttgtatagggagtcagtaaagcatcaagctctgaagcccagctgcctggatttgaatcatggctctcctacttataacttttaa

SEQ ID NO: 126256 - DNA, 1715 bp, Homo sapiens
ctgcaatcttcctctggttgcaactaattttcttcaattaacttcttttactcctgggcttaaattctgtatttcttttatacttcatctgttctggcagtttctgaactcttaatgatattttgatgacatccagttagatgctgaatacttcacacacctgtattcaaagttagaatgacaacaacaaagatcaccttggaatgtttagctggcaatttaattttgggatgccagccccaggatacactggattcaagatatatgtaaatgagttcattacttataagagatattacataaaccatttaaatgccaggaaacagctacctctgaaatggtatctttggattatgaggacgaatttgaagccattctttctcccagttcctaggagtgacttatgattctcttttttccaaaaatgatagcaagccagtaaattatagctaaaaaagaaggtgaagggaatatagactatctacctattttgatccactggaaaaattattttcagattcatcaagagttcatttctaccaatctcgattttggggagaaaggaaggtgaaaaggaaagaaaaggaaggaacgaggaggagaagaagaaagggagggaggaagcaaataagaaaggaaagaaggattttatgttattcctaatggatttctccacaaagtgaaatagactataagagtggtcaacatggaataactgctgccaaaccctttctgcttctattgtgggcccaagagttcaatttattcagaaggaaattgacatttattttagaaagcatgtctgctaagctgataggtctgtaattttaaagcaaaaatttcgttttttaaatgaatgttctctaggtccgagaaatgaaagcataccactcactgttcagttctttaaggatactagcaagtacccaggggttacatcagttcatggggttttaaaatcacagatactcacagaggaatgagagatacaggatacaacttcagcaggggcacagccaagcctcatgggaaactgaaaaatattcttcaaaatatccctgaatctggtgatttgccactgtagagacgtaggtgtcttctcggaagtggcctctcattgccttctgcctggctcttcctccttcctgtctattacttggtgtgcaaagctagggaaaggaagcctctgggtatcaccagaggcccagcttctgtgatctccttcaccgcacatgtaagaaccacatggcctcaagaccctcctcagtgctggatgcacaggtccatgtggaattattagtcttgaatatttttctgacagtgaaaatgttgtgagagagtttaattagatgtgaccttcagatttttttcttttcaaatgttgcttggacaggatttggactaccaaaagtccttttcaactaaagcaatggaatgaccacaagtagaaaacaattcttattttgtccctatttgcttttaaaggtaatagtgattgttctaaaagcattgttacaaaggctgttcactgggagtaggacaagattgtcatgctgtcattaatcatggcctatttataaactttaaaacaatatccatatatttaagcactactatattttattgaaaattgtggatgaactcatttaaaaattcccttgattcagaaatctataaccagaggagataatgatcatccggtccagtttttcctc

SEQ ID NO: 126257 - DNA, 1034 bp, Homo sapiens
gctaagtggaagagggggatgagaccatctccatggagacattcctagagttgtaaagctggagccactagtcatatctttccctagagacacatgtttacatcccaaagggtcagagcccaagatccttcccaagttgaatttacattaaggagataagatttctccctccaccctccccagaggctgcagaggggacagctttccctctcctatataatcaaccagattcatgtttttggagttcctcacctagagtgtagaccatgtgtaggatgacatctggttcccccagcatgctgatctcaatattttatcagaacctcactgacttcttcattctcttcagttatcagccttataatccctttacatttgtatcttgctttacagtttacaagatgcttttacatttatgtcccagtcgatcctcacaataatatttgcaaataaatgggaattgttaggtgttatactatttatataaactggaaatatatttcaaaatatatttgaaatgagatgtaagaagactgaaattcagtatacatgtggtgggacagaagttgtctggctgtggtgtccaggcacttttaattgaaagggaatctctgtgttatcgtggtatcagcagctatcaaataataggcattccatcaaacggcaagggtgacctcttccaagatgcacataaactgctgcctgttcctactttggtttctgatagttattttttctcttaaccaaaagataattacagatatgaaagaacctacattaagacaaaaaaatctgttttcaaactgcgttcttcaaatgcctttgaatcctttaaatgttaaacaataaacatagaccattgacaatttgtaagcactttcacatatctcatttaattcttaacaaacacatatgagatacataaaaatatccactttttacagatggagaactaaaagccgagagaaggcctgagaccatgtacttaggaggtggtaaaccctggccctccaagtgggagatgaggacttcag

SEQ ID NO: 126258 - DNA, 1138 bp, Homo sapiens
taaaagactgtgcccctccctgattataattcatctacgtacacttattaggcacattttataaaaattcaccatggcaatagcaatacgaaaatgttgatcattgtcacagaatccatttagaggcaaaaagataactattaagattagtgttgtagtcaaaagtgcaaactttttactctgttgaatagaacagtttctcaaattgttacttcaaactatattcagagtccttgggttcagtaggtcttttatccgccctttctttatctaacacacccattcttttcacaaaacaggatcttcagaggcagactggaaaactggacacccaagccatgttcaacagctcagacctccactcgttccccttgcatgcctttctcatggtttaatgacagccggaaaggatcctattccttcaggaacctgcctgcgcctacaagttcccttcagccttctcctgagactctaatttcagataaaaaggggtccaaggtagaaaacacatggattacaaaagcaaacaagagaaacccaaatccctcctcttcttcaatctttggaaggcattctcaacttatgtctgtagtctggatccaagaaaccaatgtaataacactgcaataaacaatgcatggtatttcttatgtggggaaaagaaagcctcatttaactaccaccttctttaatgctgtttcattgtagattgtacattactctttgatttgcctatcttttcacatattgctatttaatctcagtttgacagttaagccatgctgggaaagatgcatttgaatcatagaacagaatgatagatctgtttacccagtattctactttaaattacattactaaactatttcactgtgcttctcaagatttactgaaaagcaaataaatttgggactgaatacgagttcagtacatctaagtgaaactctttaaaacaaaccaatgatgacatagcatccttatttatttcttcttttaatgtcaaacttctgtgttgaacaactgctgtataattctatcaccaaagttcttcaacagaattaggaaatatatgcatgggtgttacttgtttttaaatgcatgatggttatttccagcatgacactgcaaaccttatcta

SEQ ID NO: 126259 - DNA, 2258 bp, Homo sapiens
aattctgccattatcttgcactgtagagactccagatttggttaaaaatgtttttacaagtgcagctacgtagtcattgttgtttgattttcatatccactgaatattttaatgaagttctggggaagttttatttacacgctcccacctcccccacccccaggtgattatttggaaacctgtgtctgtgctgtgtggcagcctctctgatgctctgcgggtgcagtgagagagttgtatttcagcatgtaactactagtgtattgtcaggctgtgacctcccccagaactcatcatcttgaagggtacatccaggagaggatctgccatttctcatagtatttatcacagccaacaataagcgatccttcccaggaggtgctctagctacctttctaatatgaattgccatctgttcctaataactcagcctctccacaccatcttgtatttttacttacactgttactcatcacgattagggtcaaagaagataggcttattaatattattcctctgagcagttgcagaggataatgaattctgtacccttgaagagcaattgaagaattgtctctctaaaacatctatcctttcatcacatggagaaagcacccagaattccctcaaccagacaaggtgcagcattctcaaccgctgccccattgaaggtcatcaccaaatcatacatgaatttctgctaagattgtttaaaagagcccttttagagcttgtagacacacctacctcttgctcactcactgcactcatttaacactgagcttcatttatttttacagaattttaccttcaatgatgacttcagtcccagcagtaccagttcagcagacctcagcggcttaggagcagaacctaaaacaccagggctctctcagtccttagcactgtcatcagatgaggtaattccatggcactatgacagagctgctttgtcaaatctgacgttttacccatgaaccatcaccaggaaaatgtttttagggtagatattgcatagaaatcatcaggactgtggtttatgtttaatttgaagtcttcatgatttctctccctccctttctcaacagaaaagcaaagtcttgttcttaagctttccaggggccccttttacacgtatatgtaaacacacatgatggggaggctgggcagtgcagagttaaacatgggggaacagctcagaaatcacatagaagtttcctaattactcctttctttttttccttgcctcccctgacaaccacactcactccaagattctgatactgcctctgattagggtgaggtctctgattgagaatcaatagttttgataaagagggaaaatagcatgagaaccatttatttaaaaacaagggtcaaaattagtattgctacaaattatcaggagataaatgtgtacaagagagtcaggaaatgaggttagtgatttagttccttgaaaaatggagggaggacagaaggcaccataaataaagatatttttgctctaaatatttgttcttactatttctttctaacatgattttttattcacaaaacttttttttttcttgtaagcttttctgcccgtattcttcaagcttggtgcaattttaattttattaaaattatgtactatatatgttgtgtctcctgtttctgtaacacttttcttcttgattcttttattgctccctcactcagagcctggatatgatagatgacgaggtgagctatcagtgggctgtgtgtggtggcttgtgtgctattgtttgaatgtgttttttcgctctttggagatgactgaaaaatcagacaatacaagaatatcttcctctgtagtgaagggtttccttgtgttaaatagctttactctctgcctttgtcatatcttagtttaaaagatgttcctaacttaagaggatctccgcattgcacctccagagttcctcgatttctcttccatcaccattacattgacatggtccattcttcttcctctcctttgccttcatctcagcttaccctatcccttcttctgtgttccctgtgtgggtcaccaaggtgactcctgtctttccttcaagacctatcatcaccttcatctcctctcagcttagtgggtctaggaaccaacctgtccctttgcactattaaaaggaatattctgcagtggacagagccagaaatttagaataaactcctaactattgagctctaccacttactaactgtgtgatcttgggcagatcacatag

SEQ ID NO: 126260 - DNA, 1009 bp, Homo sapiens
ttggttctcattgtaatgaaaacattggcagaaaggaagccatttcaattcttcttgcccttcttggagccctctgtgacagcaggtgctcactcctatgctttgaaaatattgatgagtttagcaatacctttacccgtaaatgcctacagcccaaaggttggagaagtagaattgtgccctttttccattcattcacccattaattactcatttggaaagcatttaattaatgagctttagggtatactttgcaagggacttcaaagaacaaaagaaaaaataaagggtagcccccagtgtgttggtttttagcaaatgtaactagttcttcctctgttcttacctcttcaatgtttgaattagtttacgaacttggatatatggtatgttaacaccatcagagggctcattggttttcaaattcagtttgtgtgtgtgtttctttcttaggctcttggaatgacagcatcccaggaccgagcagtggtcaaaaagaaactcaaggaaatgaagatgtctctagagaaggctcggaaggcccaagagaaaatggaaaaacaaagagaaaagctaaggagaaaggagcaagagcaaatgcagaggaagtccaaaaagacagaaaagatgacgtcaactacagccgagggtgctggtgagcagtaacacataccctcttacagatgatggagatgctccaagagaagtccccacctcttcctgccctgctctcctccagaggatgaaaaagaaactaaatgataagggtaatgcggctctaggccggctgaggaactgtgtgttgaataactgcattttctgcaatagaatgcactcttaattttaactactaaaataatcccaagccacctttggttcattaacaaaccagagatttcatttaagtagctgtgttttgctcttctctaacttaccaacatcttgtgttgtgttgggtgtgttttgtcacttggagaactagtgtgaccccacccaagagcatgacaca

SEQ ID NO: 126261 - DNA, 2813 bp, Homo sapiens
gaaattgaacaggaaattgatttttaaggaaaccaccattttcaggtttcctctcctggggaacattctggctggtcttcagcctgcctatgtcacaatcaggaactcatcacatattttctactcaagatttcccaggtgggctcagttagtattttaacaaatgtacttttaagaaaaatagaaataccagttagaggaaactgtcagttaacattttagagagattttgaatggtttttccgaaccattcctttccatacttcaaagattctcaattttacagaaaaagtttgtttaaggcagtgcataggtatactttagtagtggaggaacttatactaattttaagccagcattaaggatttccatgtttcaccaaactaagtcaagtgcaggagactggggcagaagaaggagaaaataaactcgttttgagaaatttcatgtgatgagggttttttgttttttatgctcatgtatctggttctctttgctgcgttgactctaaaaatgaggttatccactttccaaaggacaagtttcagaataagacttgaggccacatgaattcttggacagtattttacttcttttactttatgggaatctctgctctgttcccagcatctcgtatcttccactagaagtattccatatttagagcctcggcaaggcttttgagtgtaacagattaagggaactcccttgtagccccatcttgtattttaataacagtgtgatttttttttatctgaaaatctgaattcagaaattatctaaactggacatttttaattctgttttacccccaaggcctgttttcttttcattgccagagtattgtcggttatgcgtcagctcttttgtcattaggtacagacccttcattcaatcctcagaaacgttgacatgaagtaacattgtgttttacagttatcaaagtcaccattatgtttttctgtctgtcttcattaggggtatgataatgaaactgccgtattggatactctattaatgtcttgagatgtctggtgctttgttattttttcacatcatgagaaataagaagccactattaatgagtgatacaatttggcaaaacttttcaaatactaaaacactaaattagtaaaaatctggtaatattagtgcttgctattgtaaatttttgccatttttgcttatctttgggaaaaaagtgacctggatcacactggaagtttcactgtattcaagagtagaaatagaaggatgattatcttaagttatgtttacactttggtaatatttgaaaatggatgtatatactggaaatgtctgtaagtgtcttgtttttgcacctaatttatgatctattatattgcattttcttaaatatcttagaagtatttttctttataactttgtatattgaatgtttagataaatgtccaactgacaatgttataaatcaaattcttattcctaaaatcatttagtattataagtattttgattttttaagttaaattatagtaattttaggccgaagtgagttattttaacattaccacttaaaacggatgaaattgtaaaagtcatttggtttgattgccccacaaagcataagatgtaaactgattaagggtatgaaagcaaagtgaaagacctcagatcttgtgcacattttgttttcctattatttcttttattgactgtagtgcatgatacctaatcaaggctccaatgtcttgcacaattcctactttaatgctagtggttttcagtgtccttacaatttaacacagaattgttatttcatcaaccttaaaaactgcagtttttattatcagaaaatgaacaaaaagggaatatctggttgctatgaactgattccctaaaggagagctcagtatgattctaacaatagccaaaagtgttttggggtataggttatgctttgttgggagggaatgtgtggtgaggaggccaagctgcagacagaaagcattgtatgagctgtatctgggtcagggtttcccattaaaggatgttagttttataacagattactttgtttaagaccatctcccttcaagtaactcacagtttatgtaatactaatctcattctttttttacctgaatcaggaattttctgcagaatgttaagttagggaagaaacctcatttcatccattctaacactcctgatgaagtccccctttagtttcatgacaataaagctgttctgtggctatcatcctttagctgggattgacaattgatttcacaccctcaacatcacaagctttttttaacccacagcagttcatgattgcagtatgataggtactaaagccaaactcagctttcaactggcacaaaatgggactgtcaccttttgctccattgttgttggaaacaaagtggcaagagggaaaatgaggaaccagatttacctttgccactatctgtgaccctgtaatcatcactagcctgaaatcttaaaatatcccagtcccaagctacaaaaatggtcacaggtggtttgatctagcacctcggccgttagagtttgtgctgaagacaaatttgtctgggttcattgtgcaccagaattagcatgtgcttgaaaattgcattttataaaagggaaatgaaaatttgcatttatatagatactctgattcatgtttaagtgttaaaggttatgcagactaaacttcaagaggagatccagtgtttaacaatagtgttctagaggattctaaaggaagctgccccagcagccctgagagaaccatctatactttggatatgttgtagccc

SEQ ID NO: 126262 - DNA, 1639 bp, Homo sapiens
tacttgaaggttcacatatgtaagcgtgtggacccagcacagtctgtgacctgattccagatcctcaagagtggagaaggaaagaaatatgatgatttcctatgcttgaccctaacccaaccccaaaactgctagggattcaacagtgagtaagatgtatgcaataagagaacagataacttctcaacaatgtgcatgccgtttgtgtagatgttcagaactacatatgtgtgaatatcactcccaccttacacacgcacacacactgcaatcacatggcattaaaaaatatattgtgtatggaacttggcgaggtcagtcaggacctggagctgtaatcatagccttattgccacttcttgcgttgtgtatacattgaatggctcatagattttaagagatttttttattgtaagtatttctactaaatgcacttatccttctatatgtttatatattttggtaaaattgatttatcagatacttggtattttagtaagaaaatttcctcaaatatttggctaatgctttgatgtcaagattgcatattgctgagttggagctcagaagaaatgtatgcagctaaaaattgcactgtgtgttcttgtgaatttgctcacaattctaaaatgacataattggtggctgtgatgcttacagtcactgcctactggctctcttatgatgaatgttgccatcatatgatcatttatttactttttgtgcaagcaatggcattttggttgttgccaaaaacaacacaagtggttgggagtgtatgttgttggaaggtgtacacttctgtttctttcagctgtattatttatacacccaggttttctgttaaggatgtaatcattcattcaagaaagaacaattggcaagaaataattaaattaccttaaaaagaattaagaggcactccagccagataacacctcccaacaacatgaaatttagttagtgcttagtgaaattccttaaatatatatgtatatgttttcttcaacattatttaatataactactgcttttatattttttaatggtgttgcaaccacttgtacacctgctacaccttactgacaaaactgggcagctgaaaataaaagagaataaattctattccactgtaagaagttgatttcttttcagctttctttgtatatcagtaaagaacacgaattgtttgaaaataattttaagtctgataagtatggatagcatgttacctaagcttttaatttgtacattttgatgtctgatcatttgcatggaagagacaatagtgccacgtctgaattgttctcttgtgcttggttaatatgtacttctctagattgttcaaaaagtttcaaatgacattccttactctttggttttcagaggcattcaagcaaaatatcacagtggtcttttgttttctgaccaatctaacaatacctgtgattaaatttaatttgttagtgtaaataaatttcttgccaatgagtattattgttgttagacaacgaatgcaataaaaagaaatactgaggtctgttgaagcaattttttttccctcttccattttcaccttcaactaaaacaagccttgactgggtaaacctgtatcaattgtcaaagcatatatctgtca

SEQ ID NO: 126263 - DNA, 1044 bp, Homo sapiens
atttggaagcctgagtgcttaaatatacactgattagcaaagttaagtgtattaatcctgggatcaataacagtactaggcagtgatgtgtcaaatgaaattccaaagtagtatccattatttatgctttctagcaactttgcagatgtgaaggggctccagctgtgatgactgccatcccatcagttaccatgttgggttggctggataactgggtgtttcttcattattttgtcttgtttctctccccatactgtaatctcaaaggcaagattcttcccacagagggaggaccaccatccacttgagaactaaataagagcatcttaactccttctgtaagggatgcctgcactaaaaaaattgtgtaagtcatccctgaggaatttggctaatgtcagaaagccagttcactttggtgcatagatatctatgacattagtactttcatcagaagaagaacaatttattgaagatatacagattttagcttctgatttctgaaaaatagatttatcctagaatgtttgggaaggacatcatgaaacaggtgtttactcacataatatactaataaacgatcttttctcgacaggtacttcgcatccagaatgttttgtctgagaagcccagggtgagcaccgtgtatgccaacaatggctctgtgcttcagggcacctctgtggcttctgtgtaccatgggaaaattctcataggcaccgtatttcacaaaactctgtactgtgagctctagactctagatagtaaaaaaaaaaaaaaaaagtctacatattttgtaaaagtaaactgataattgtatgataagtggcactgtaagtaaatagcaaacaccaaccagtgagtgtggcttttcttatggatagaagtaaaggagcagacagagattccttgatagccatcaaattgcaagtcaggttaatgacagtccaacaagaagccaaactttacggatctttgttagcagccccaatgttctttctacaataaaacatgtggactatgtccagtgaggtctccgactca

SEQ ID NO: 126264 - DNA, 1058 bp, Homo sapiens
ctatcagtgaactgcactacaactgtcacagataaccatgatcaacatttacaagtcaacagattttggggtttgagatttatttgtgaatttatttcttttcactgatttctgtgaaagagaagagtaagaaaataacaaatggctaaagaaaacccatcagggcaatgcagaatcatgattttctgtggaattccttaatccatactagttcatgtatcctttttcaaattgatgaacgtattagtctatgtagagatgagtgattttgacaaggataaaggatatttaaatacctcatgggtctctttttccacctccctttcactttagtgtgaatgacattgtggttcttggaccagaacagttctatgccaccagagaccactattttaccaactccctcctgtcattttttgagatgatcttggatcttcgctggacttatgttcttttctacagcccaagggaggttaaagtggtggccaaaggattttgtagtgccaatgggatcacagtctcagcagaccagaagtaagctcttttgtgtatttttctatcctttgcccttgacattttcgtggactcctttccttacgaggaagttacttccttacttaggcttacgtagtgaatatatgtgtggagggatcagttgtggccagggttcacactaaatctgtcatcctaagcaatccatttgtttccttggactttaggttcttcccagttaaaggagggatgtggacttaaggatataaggacctcattccaaatttttacataactcttgaaacacactttcctaacacactacaaaggaagataaatgagcaatacccctgccccttatgaaagtacaaagtatttgaccacttatgctaagttcagttacacaaaagctcttaggagagagggaaggctaccttagattgggcatagggattgtataagtttcagacctactgacttacaacagcagaccattcaatgagaaaaccctattttaaacagcatgaaattttatgagaaaacacttttaaaaagtgtttaaaaat

SEQ ID NO: 126265 - DNA, 1085 bp, Homo sapiens
actgggagatacttagaagggagtcaccacactaataaaatagttgttagacttatgagaaaggtgagagaactcaggttggagtagaatgagaattagaacactcttcaggttcctgatggtttttatgtgaaagacagtgagcagctggttattaccactgaggcaataaagagatactgtgggctttagcagaaacaccagtatatgtatttagtttttaaaataaggttttaaaaggaatgttttatttaattgcctacacagaatgaataaagtgatatttatagtaggactctgggtttgtttaggagcacatgcttgcacatgtgtggcttaggaaaaaccactgggaccactagtctaaaatattcataagtaaagatgcaaacattctgaataaagtagaaggcagttgcattgatttttttatttgtttatttgtgttttttgttgttgttttgcaaggatgtgttcttggagatttttataatctagaattcacctatttcaagatttctctccagcccccatagtaataaatctgaagtaggagggatgaggtctccaaacacataaatctacagccattttagcttgggggcatgttatagttacaaagatcttatagccatatcaatagaactttttctgctttttttctgttaccctcctttgctcatttgactttttttaaaatttagaaacattcccagtttgctgctgtttttcatttacttggcattgtctctaataaaacctagagtgtactctcttctaaataaagaggtcctacattgtggaggttgttcattcttcttcctagcattttagctcatctaacccaacctattttacagttatgggttgagggtcacctcaaaactaatgtcacacttcatgaagaattggatgacatagaataaaatataaaaaatgtaaacaatgtgagtgtgcttaacaccactgaactgtacacttaaaaatggtgaaagtgatgaatgttgtatgtattttatcataattaaaaataaatttttaaaaagagaaaaaatacttaaataaataaggagtgcgaacataac

SEQ ID NO: 126266 - DNA, 1042 bp, Homo sapiens
tctaaatgtctggccttcaaaatttgagtggactgtctttctcaagataactaacaattttatgcacttggcagtcaagacctttacaataactgctgcttgggagattgaggggaaaaaagcattaaagtttgtggcccttataatcaagtactttacagtctactgatgggagaaaaggaaaacaaaacaaaacaaaaaaccactgtgagatatagatatgtcttttctttctctagcagataagtacctgaggctcaaggaggttaagcaacttttgcaaattcactttccaatatagtgtcttttcccagggtgactaatgtatatacttgatgagtgaaccagaaaagtaggaaataatatgttacatatgggatgctctattgggtatagtaaaggatgcgttgctgttataaaattatagtcacttagaaaagagatgtttatttttatttttctctcatcagtcttaaggtaagtgaatggcctagggtagttaggtgactgtgttccatatggtcattcaggggcaaatgctgatgaagcaacacagctgtcttcatctaagactagaactctgcttgttgccatttcccagcaggaaggggttgaaagaaaatttatgtagatttttttttctacccagtagttgcatatatattgtattctcacatcctattgacccaaacttagacatatggccacatctgtcagccagaaagggtgggcaatgttatctatagctgtgttgctacgtgcctattgctaaaaaggctaaaaaggaagaaggggaacatggatgctggtgaacacttggccacctctgacacagataattgctaaagtaataagaagagatggaaattaaatgtgctaagctaggagactttctaaagaaagggtttgtcatgctacgctgtgccattcatgtgtttttttgctcatgctgttccttgtgcctggaaattctccccctaattcccctgagcagtggatgcagtggataccctccccagatcccccccaacttccctgagtg

SEQ ID NO: 126267 - DNA, 1049 bp, Homo sapiens
aaaattctgagttacattatttgaacataaatacatttatataattttttagtaattacaataacattgggaatgactagtaaaacattactagagattctgttagacctagattgataaataaattaaagtgacaattagcagcttgtgagtaaatgatgcttgaaaacaacaaatgcaaatagtgcttgaaaataatgcttaaacatcgcccatattttgtaattattaattagcaaactactctttcatagattggattaaggcagcttctctgcggttaatgaaattatcataaatttaaaattagtctagcctgaattatattctgttctaaagtgaaaagcttgatttatcttttacattcttaacacttttaattttatcctcctgaaaccttcactcaagtctgacgattttgttacagttaacctttttccccatgagacacatcaatagtaaggttgaatgaaatcaagattcttttaaatgcattcagaactcatttaaatgactggtgcagaagttctgtgcaccagcttggaagacatttttatgttaccaatcttgacttacaaatatctcaatttctacaaactagggaaaggtaagacattttatgtttattgacaacaataagttatttttctcaatattaaattctaaatgaaatcctataaagaacatctaacaaaatctttagtctactttatggctggatgtctttaggaatactgctaccttctgaattttctgttataggggaaaattaaatgacacctcagaagaatcaggaaaagattaatactaaaggatgaaatagttgaaaataacacacttggcccttttctatttctttccaaatatgactttatacctagcatttcaacatacagaattatccttattatagccatattttattctaggcttacccagagtgcagcaaggcacaactggggctggtgtggatgctacttataagaaatataaatggcatcctctggagcctctggctcccaggctagatactgagatgtcaaagatcg

SEQ ID NO: 126268 - DNA, 1020 bp, Homo sapiens
ggattatgggagctacaattcaagatgagatttgggtggggacacagccaaaccatatcagccaacaataagttatttttctagaaccacaaaataatgatttttttctgtgaacttatatatacgtaaacagcttaccaaatgtaaaaattaagttacttaaaactcatttaacaaatcatgcttattgagaatataaaatcatatgcaaagaaatactaatttcaacaaaaatatatgcatccattaatacagcatttattaatgttagaggcagtggtttttgtggcaatagtatagcctactgctaccctcttcatatctggatacaaatcctgactccaccaacacagcttgtgtgaccctgagaaagttacttaatttccgaacccttattccttttcacgaaaatagatgaattactttttgtgaaagctcagtagtggatgggtggggtgtggggaaaaaaagaaaactcagtagtaagcacttgataaatgttaaatttcttactattggcgtcagggagtgggatagggtatgctagaggacagagatcacaagtcctcagaaacattgtaaaattgtgtgtgtgtgtgtgtgtgtgtgtatgtatgtgtttatagacctatacagaagatgtgaacttacacctacacacatgtgcaaaaacatattacttaatacattttaaatcaaatttaacttgatctcaagccaccgttgtgtcttggatgggagaaaatctaagctcagtcattgctgatactctcctagccccacctgtgggcagtgcaaaggttcctgaactttccagcggggcttgcataaatggattgtagtctatgctctgcacaaccttagggtcaccattcacatctcaagaggcttgaccacattcttggagcaggagagaggaaaactccagcatgaaacaactcaccaattaacatttcaataaattatgcagccacatacatttttttttgagggaagaagagagcccatacctttcattag

SEQ ID NO: 126269 - DNA, 1046 bp, Homo sapiens
cagcttttcatattaaaatttttcaagtctaggtcacttgaaaacctcctgtttgtcttcagatatgtatgacaatggttgattttacaagctcatattgcaaaattattacaggtttttagaagcaaatgtatccacaactgtaacagattttcatttttggatattggcttgtcagagcaagacgctggatctccagccaggcaccagatgtttttattgaggggaaaaaaagagcattaagagcttttaaatcttatattattactttgatcatataagaaataattgtgacatttcatgcctggaaatgtatcacgggggctttcgttcatattgacactatatattactgaatggatcagttaatatataaccagtttaaaggacctgaaaatgtagtgacagccaagaaggatattttgaagtttgaaatgatccctatataaatagaacggatcagcataactttgggataaaattagccgacagtttgtggactctccagcatgcgcctgtttgctcggtgctgttctctcgataaatcacaacaaagcttccagagggagaggaaggatggacggcaccactgcccctgtcactaaatctggagctgccaagttagttaagagaaatttccttgaggcgctaaagtccaatgacttcggaaaattgaaggctattttgatccaaaggcaaatagatgtggacactgtttttgaagtcgaagatgagaatatggttttggcatcttataaacaaggtaaaaacatataggtgttattgtagaactgttagaaaatgatttaaaaaaatgcacagtgtcagttatccactctaaacagtagtttttattgtttctttaagtattcatttaaaaaatatttctaaattgatattttctttctttttaaactaaaacacattgtgggctgatatatatgtataagtcgtgtctctccttttcttttcccacccttgggcctaggacttgaaatcccagacaatcatttttagcaatgcactctctctgtttttaacttttc

SEQ ID NO: 126270 - DNA, 1053 bp, Homo sapiens
agcatagtactgcttggagaagtttctgaatagtattaaatagcctcaaattaacagattttattccttagccacctggcatccttccacagggtacatctctctgcattcctgacagatttctttgtctctttatcattatagttttccatatatttgcattgttgctgaaaatatttacacatttgttgcagtaatcttataaggaagatttcaagggtttaaatgtgatatcactactctggaaatatcacagctccccctccagcctcttatcccccaactccaattccatgtccccactcattaaaggatgttgtgttgttgacattgtggtgtgaccgaatcctgcagtcttttataaattctaagaactgtgggatattcttacttcttggaagtgaatcctcttcaaaaagagaagacaataattctcctatatctgtcactttttaaaagaaagaaggaaagacgaaaggacgaagggaattagtcaattaaggagacaatcgcccctgaattatcgattaacagtaacccaactgagagtgaaatataattttataatatatgtgtgttcaatatttgatagttaatgctatttagatatatcatttagacacactttttctcaaaactaaattgatttcatttattataggttcagaaaatgcatgtgaaagaacttcttttgcatttttgcgacaagaattgcctgtgagactcgccaacattctgaaggaaattgatatcctcccgacccaattagtaaatacctcttcagtgcaattggttaaaagctggtaagtggtgaaccatattgaagtctctagttttgaaacagttacccgggtatgaattcttatactatgttaacatcataattggaaaacaggtgatctgaatggtaactacttttgaaagatgtaagaattttaaaattaatttagggtaagttatcattagagaagttataaaactataaacagacatttttaccctgaaaaagtagattactttataataaaattttgagttctaggaaaaatttga

SEQ ID NO: 126271 - DNA, 1047 bp, Homo sapiens
caggaagccaatggaggtagggccacatgtctgtgtgtccttaaaatccttgccttattctgttcagggataggcagtaatgggagactttgaaggaggcctaatttccctctgggttctgctcagtgggtggtgttactgtgacatgccctgaacaggactgcaatcaccgtgtggtgaaaaccactgtaaaattcgctctgggtttcccttctttctggtgacagcacaatccgttgtcgtcgtcagtggtgtggctgttgttggtgccgtgggtcgtttccctctgtagggctgaggaactgaagctggtaactcccacatgcctgcctgcttgcctgcctacgtgagggggccagcctcctctgctctgcctgccccgagtctccactctgctcctggtccaccacgtgattccttgggggttgggagagaggtctgattttcatagcagctttttttttttttcaaggaggggaaaaatgtgaagctgaccacaaagtgaacacactgattcttgggttccagtcatggctgggtttcttgaggctgggtggcatgctgtcgccaagctcctgctacacctcgtaacccacaaccatttgctgagctccctggggttgccttaatcccagaagccagggtcgcacagaggaaaataagaattctggcacagaaaggagtcatttaagtgcttattgcatttcaagctttagtttctacttagctaaaatatttaccattgctggaaaacaatgtttaaaatgttgtgcttatatgttatttaatggcgtggcctatgtaaacctcaggatgcttacattttgacagtcttctggaaatgtctaacagcacataacccagcgagtggggaatcaaaacgggaacaaatggcgcttgaaactgtttgtaacctcctccaactaggtattcagaatgcaagtcatgctggaatgcttcaggtagagggagatctcaaaaaagaaatttgatgagtcctgtcttatggccccatttatcaaccttccaaataaactgtccctaaaa

SEQ ID NO: 126272 - DNA, 1779 bp, Homo sapiens
tggtatggaaataatgtgttcttaactaactctttggtatcaggtaaatttttaaaatatctaattatatctgtgatttctccatttttttaaagctcgtgtatttcgatcctcaccccagtttggtgtaactttgctgacttacgaattgctacagcgatggttctacattgattttggaggagtgtaagtatcatgctaaatctgctgctaaattttggctgctgctaatgctctgttgtcgtagggaaaggtacctcagtctagtctctataataaaatagaagagatttagggaaatgttgaaattgtgttaacaaggtcatttccaaggggaacatacaactgatgagaatgtatcaactcctttacattaaatatttgaacaggttttgaatgttatttttatcaagttaaaacaaacaaaaaatacagcttcttactctgttttctcttcttttagaaaacccatgggatcagagccagttcctaaatccaggatcaacctgcctgccccgaatcctgatcacgttgggggctacaaactggcagttgctacatttgcagggattgaaaacaaatttggactttacctacctctcttcaagccatcagtatctacctcaaaggctattggtggaggcccataggaagatcagccctgggatagtgctgtctttttgtgggtactgcagtaaagaacatccctcctgggaatgaagcaatgcttcatcccttttacgtccatctcttgtttaaattcaagtccaggcttttttatcatgtgaaatcattcattttctgggtgttttcttaaccagatcattgtgaaattattcataattattatttggccctctgcccagaaacctttgtttgcatctgaaaattgatgggatttggtcaacactaacatgatttggggaaaggagcaagtcagaatagaaattagtactcccctccttgaactaggattgtagtcccaaagaggctactgtaaggcaatcatggtgctcagagcagtgtttcgtgtgtgttttaaactggtaggaaactaggtgcatatttataaaaataaaaaacactgggagaaatgaaaaaatatatatcaaatatattcagcctggcttcaaattgtaagcatgcacaaattctgtctctggattatattatgaagcttttatgtgaaacatgtttctttgtaatgaaaaccacattggagatgtttagtaatcatattgttactggtaccaagactactagggaaatgcctttgtactttagggaagtacttttggcattttactgtacagacagaaaaaactgagatgtagcccctctcctggaagtgctaattttgaaaaactgctcatatgatgtacatgtactgattactgcctattttaataaacactcttgaaaaatgcatgttgccctgttgctgcctgccctattctcctcatctccccatcattggtacccacttgcttttaaaatccactttatcttgaataatgtaagacaaatatgttctgacataagtatttaattcatgttgccttgcataatggtcagaggcgcatgaatttgtgaaggtggaaataaactatttgtaaagtgattgagttgtttggtcttgtgcatgttgcatggtgagtggatacagtaattgtcattattggcctacatgttttgttttgaggggaattttattcatattggcatggatatatcctcagtatctttcaaggtaatgtgttccctcattttcatggttca

SEQ ID NO: 126273 - DNA, 1029 bp, Homo sapiens
actctttctaaaccaggaagtaaaacaaaatcggtggtgtgaacacagtgggtttctaagcatttttcttgtttccttccattatgttggaggataaattcctggcccaaagttaaaataattcctacaaatgaacaggaatttcagtatgacttatccagtgaagcactggatataaagtgagctttttgcatgcagaattgtgatgtattttataaaacctcttgagattaatgtttgaggagctaggtaaagatggaagagatactccttcagtaatataaatggaagcgtgtagtatgcagatttacaccccccttccaactcactgtaactttaaagctgtctgttagaaggatgaaatgtagttgtgagccagaccatgttggtttggacagaaattcttacagaattattaagccttaaaaaaagcaaaggagatttatgcatctgcatttgaccaatttggtttggaataagttcataatggaaaagtaataaaaccataagagacagtgtcttctgagtacagtctcgcttttaaaaaatctaaacatgcactgccctattttggatacagtgactgtagaaaaatttcccattggtaactttgggagggttttctgttgttgttgttgttcctttttcattgattatcagccagtataaattttaagctttctgtcaaatatttttctggagatgtcagtcttagggaaaagaaatcctaaagtgttatctgtaggagtctccttctcccaatttcaccccctccccgaaacctccacctcccaccccccaacacacatagtgttttttagatatcagtaaagtctttttctggtgtaactggagaggttggggtttggagagtagggggtggttgaatgtgtgagagaaagcacctcctgtgactgccagcagccacagaagaccatgaagaggaaacgcataacaagcttcacctctgaaaaatcggacctaataacttcgcaagtttttgatttcaacaggaaagaaaaagaaaag

SEQ ID NO: 126274 - DNA, 1029 bp, Homo sapiens
cagtacccctagtaataacaaacactttaagatgagttttgaaagaaaatctagtcatatgaagtttcataaaacagtgacatagaaagattgaaagacagctgattgaaaaatatgtaccaggcaaatatcaacaataagcaagtagcaatattaatgccatactgaatggaattcaaggttttaaatagcgttcagaagcacacaggcatattttataaaagataaaattcactatgaagacgccatcaatttctatgtaatatcaatgtataatgtcatctctcagcttcaaagtatgaagaaaatgcgatattttctcatacctgatgaaaaactttatcacactgcttttagaagctgacgtattaagtagataatatagatagagatgcaaaggggatttggaaaacagccttgatccaaaataaatagatattaacctttgtattcaataaaaagaaaagcactttccttataaatataaatgggatatttataaaaattaacgatgacttgtgccctaaagctgtattttgccagtcatgttttctttttgttgtaaattatattctactctagctgggccccctttgaagacttgtaattttttaattggttgagacatgccccaagttactcctgtcacagaggtggtggatggcccctgggtctctgtgtttgtcttgtcattgaagaatcaggcagcctgccagtccctttcctgctgagggacctagaggaagcatctctgtttcccagtctcctcttgctcccctgtctttaggaatagagaaaattcagaccacttgatcagcattggcttagccttttggaatccagaagagagcaggcagatctaccagacgtccctgccaaccctggcccccaaaatcaacagctctctggtggccaagttcttgccagtatctgctgctttcccagccttgctttagggcagcctggtgcagttctccaggttaacttagcaaatcctcacactggaaatctcctgtccaccaagatgtc

SEQ ID NO: 126275 - DNA, 1008 bp, Homo sapiens
aaatttgttaattatgtggacataaagcttaagttataatagtttaaaaccagtccttaaacccttaaaaaaagtaatgaagaaattgaatcaagacaatagactgagcatattcatccatctctcctgtcttcccaaataccttaaaatgtcaggaaatgcatttttaaaaaattctttattggcactagaaaatgctaatctggccctcagcagaaaggaaatagccatattgactctgaaactggactgagagatgccccagtccaaaacacagcaggagaaactacctctaatgcaagggctgaactggagaatgttaacctttgagtgaagaatagaatgcctggggtggaggtggaggttttagggtaaatcattaacatgagttaggcaactatactttcttcaggattgccaggcttggagctctctcctggttttcatatggagcttcaggagacagttgtatccaagttaaaagctcagagctcaattttaaagaaagagaccacttccctagagaggataagtgtaaggaatggacagaaagtagggcaggacttaaggtaattcaagacttctaccacagatgcaggaaaaaataaagtgatggcagcttttcccaagaagaattaaggatttaaaataaattcttctacccccaaagtgaagttccctacatttcagcagttcggagggtccacaccctgccagcatatcctaaccccttgcacccagttacacaaagcccatagaccctcccattcaggagagagacctgtgggtgaagcatacctagaatatggtagaagtcacccacaacatttgtatataatactaatcagcctatcctttgaacttgaataatatcaatagacaaccagagatccccagccatgaaggagcaacaaagtaagtgaacagaagaattagagagaaaacaggcaattcaggggacagaagacaacttttaagaactataattaattaatataattaattaga

SEQ ID NO: 126276 - DNA, 3070 bp, Homo sapiens
gactctggctggattcattattttcttttgggaatctctgtatttggtggaaatttttagttattagaaatctgttaaagaaatggtattaaatcattacatgttgaaaagtgatgatttccttcctattcaccctacccaaaacacaatatatgtgttgtggttttcatcataatatatcatatttctgggcactcatcaattcgcggggcctctgcatggcattatgttggcaacagaaactatttgttgaagactttgctgtaggaactgattgttctacacacagctttaaaatgtatccgaattattgtgaatatttcaggctttagagcaggcatttatcaatgtttcataaaccctgggtggcaggtaagtaagtatataataaaattagaaggatccatgaaccccctgaaaagatataattttttatgtatgtgtaatttctttctgggaaacagtccaaacgtacaaaaagcaaaccccttttccccccacctgtataatttgtctacttcctagtgtgtaaacaaagaggcatcttgactgccgttacccgtctttggtgagaccagagaacagatcttccttgaaatgccagtggcttgccaccagtagggatttaaaaggatgtcacaggcagagttccaaaaaggttttaattgaagtcttagcattagaataaatgagaactgccctcctcccatcacagcacacaacaaaactagtttttgttttaaaaacaaagtttagatttattacttgcagaatttgggttatttttttctgttcccctttcaatgtgtgagtacaaatttggtcttctccaggaatattttgttctgaggtgagttccagagaagcttgatctcctcaatgggatatgtgtttcatgtggtttttcttcctttgcaaatgtgcagggtgccaaagcatgctttctgcgggacattcctttctcggccatctactttccgtgctatgctcatgtgaaggcttcctttgcaaatgaagatgggcaggttagcccaggaagcctgctcttagctggtgccatagctggtgagtgtcccccatggagttctcttacttccctgacccttgctgccccccttccctagctgcatgctactacattgaaatttttttgctgatagttcttgacagggtatgtgtgagtttgctagagattgaagagctactgaaaaaaaagggaaaaaattaatcttcattctggcagatgagattattagacaagcttaatttcttaactctagaaaaggctcattaaatattggcttattttgtggtattgtggaactccaattcaagttccatatcatttcatagtctcacttcacagcataagaataactgtttagctggaagtttttaaagatttgaataggtttgtcttaaagatgtctaaaaaaaatagtgcataaaagcctgtccagaacttaaacaatagttagagaaaagaaatgtagtagaaccagaaaagacctgggccaattagagacacctgtttcctccctgtgttacggggggatggtggtaattaaatcacagatggaaataactatcttctttttttcagtgctccattgaaaacatcgatagaaaataattaaccatgccagggatcagttcattttttgatgctgcttcttttcaagggtccctaagagcaggaacagtctggattagctctccaagtggtgacatttaataagttaacaaaccctaaggcggtcacaggatgcctggatccaaacatttttgatacctgtgctattctcatcagatatgtaactagagtctccatgcttttctcaaagatagcataagaacaactcccagctttgagaagttgtttgctgttttgtgcacaccccacctaccctggctgcagcctggggaacccctggatgcaggaacctgtgtagctcctccttaattcttagttaatccttttccttcaaaggcagtgatattggtatataaggcagggctactgtttcctggctgcttagaaacctcagttgtattagcagcagtgataccactgtatctagagcaagagatcatgatttcaggagttgagtataaaattcccaattttaattccagcttgactcatggtggcctatatgtaatttctcatatatctgtaaatgagaaaatgttttgaaccaaagggttataatttatttcaaattatttacttgaaataaggtaggacctaatgagaataactgagtaccacttattaatgtgtgaccttgggcaagttacttcacttcttgtaagctttggtttcctcagctataaatggagatcacaactgcacctgctacagagtgtgtgtgaggctcaaatgagaggatccatgtgaaagacttggcatagttcttagcatacagtaaatgctcaataaacattagccaagtattacattgaatccaaaagaatctgtctgtaaatcactccaaaaaataagttgtgaaattagaagttaagtagtagagctcagatcaaggtctaggactctttcctaagcctcactttcctcacaccataaaaataccatctttaactcttttcttggagaagacaggtacccagaaacgattctgtctctgtggaggtaatccattctaccagagctatagaaatgactggtgagattttttttcatttaaggtttatttttctccttttttaaatgattttgaaactaatattactcattataaaatatttgaaaagtactagaacaggcaaataacaaaaatattattcattatttcactactctaagataattgctatttaacatttttactcatttttcctattcaggtttttcacagagctgtaatcacactttgtatagatagttttcacttaaggttgtgtcttaagcattgttacccatcatggcaaagtagttaatgacatgtgcctgtggggtcagactaccaatgttcaaattccagtgtttccaccctgtgtgaaccacacacattattcattccctctctgccatttctccatctgtatt

SEQ ID NO: 126277 - DNA, 3828 bp, Homo sapiens
tgcccattgtttgtagctctgggatcaaaatatataattatacatgccaaataaattctaaacctgtaaggtaggaaaagagggctgggtggctctgacgacaggtgccagaagcattgaataaccttctcagacaaggtgcaccactgttgtcttgaatgctgcagggtccccagtctggcattttccccgtgctagacaatgtgcattcactgctggagtctctgttaagcctccgtctcccagacctgctggctcctggtgcccggcccgacacagaggtgcctttgtgagtgtaattacctttccctgtattagaaatagtctgtttagagctgtgtttgcaggtacagctagaataagcaggaattagcatgcaaaaagacctgccctggccctgacttctttatcagcaccatccttcaggactggttttttccccactttggattgattgggcaggtgatttaccatccaagatgaagagttttaaaagaagaaaaagagacatcggaaattgctgtgcatgtgcaacagcatgcgtgcgagagaaagagagatacaaatcctgttgtgttatatctattgacagtttcataccaggcagagctggcaaaataaacttgagtggacgatcctagcaacttgagaattgattaaagcttccttgggctttcagcacagtgtccacatcaaaaaggcatgagaagcaaaataaatgattcttttgccatgatatgctgccgccagaatctctaagcctatctaattggcctgtgtcaattgtggactattaatttgaagttaagtgaggcctacccttaaagaagcttttctagatcttaaataggatgatgatggagagactttggcatgatatagaattggaatggaggcagagttgataattaaactagatctgagggttttttcccagtttataacgtaggtctaccctgagatgatttttgttgtccctgtctggatattagtgtgccttttatttaaaaagaaaaacccaatagtttatcatctttagagagattagatgattgtattttgcatttattaattttccccaactgattatagtatatactgaggaaattcaggaccaatcagagaatgtttaagggcagagctgcctagaaaaccagtttaaaaaaaaaaaaaaaaaaaaccaaagcaggaaaatgtggggattttcttatatggcaggaatgtttaaatatttttttttaagtggcacacctttgtaacttattaattctcaaatggccaaagtaatatttttgtgttgctgatgcaggctctagggcagcatggaatgtttccctttgttataaagttgccttttcagaatggctgatctcttggtaaaaattatacatggaacaagtagaattcaagtcaaacaggtttatgttttgctgtagtactggagaatgggtgttcaccacaaagtgaaggatttatcaaggaatctgggagagaaacattttcccccttagaactttaagtctttttaacatcctgcttcccttttcattgtgcaagagcaacaggtcaggtattgcctaaggcagtcttacaaattggcacctgcctttatgcctaagacctaaaggaagtggtggggaaaaagaggccagggaaatttaataagtctctgtctttccttgggaattgggctttgatgcctggggtgcaagagaggtgaagggccgcctcctgacgcaactgggagaggtattttctgcagggagacaccagagaaggtgctaggagaggcagggagacacagccctcaggtgaacacatttgtgtcctttaatgtttgtaatgcagtggataccttacaaggactttcacacatattacttcattcattcctaaagtttcagttgtcccagtcacctgaagaagatggcctttggtatttttgacaggtgaggaagcttaagagcttgatttctacaggtgctcatcacatggctaggggtgacaggatgatcacaccaggtggaagttcttttgcttccttgacttttccatttcttcctttttctcaggtaatcagacaccaaagacttcttgcatatcctaacatttgttctagtctgcataaacactttgaccacattgcttgattcctggaaaacgaaatacaacccatttctaggcatttttcctttagtgttgcaattctaccctttcctcagggttatatatatatatatatataaaattgtttgtatgtttggtttttaatcaagccatttctcatctcagccatgtagagttgttttccagcatctcttgaagtacatctcacatctcttgtagatgccattgtaacagggatacatgatttactgtcatgatttcaggaaaggaagaagaaggaggttctcagaaggtggaacactcagtgggtccttcttcagaagacccaactgattcttcatgtgcctttactcttcctgtgcctcagggatgtttataatttcgagtcatgtcttcccatggccttctgatcatactgaagccacatagcataagacaggttaatctgcttctctttctcccctcgccccctttttttaaactttaatgtttcaatacaaaattagtgactgtttcctcctacgttttgttacattcccaacaaataatatgtctttgtttgaaaagctaaaagtggccaggcgcagtggctcaatgcctgtaatcccagcactttgggaggccaaggtgggtggatcacctgagatcaggagttggagaccagcctgcccaacgtggtgaaaccccgtctctactaaaaatacaaaaaactagctgggcgtggtggcaggcacctgtagtcccagctactcaggaggccaggaggctgaagtaacagaatcgtgaacccgggaggtggaggttgcagtgagctgagatcatgccactgcattccagcctgggcaacctgggcaacaaagtgaaactccatatcaaaaaaaaaaaacaacaaatgaaagaaaagctaaaagcttggttttagtttctgatatgtttttccaagaaataatgttttttaatttttattttttatttatttatgttttttattaagatggagtcttactctgttgccctggctggaatgcagtggcatgatctcagctcactacaacctccacctccgggttcaagcgattcttctgcctcagtctcccgagtagctgggattaaagtgatcttcatttgagttgattatttgatgtctaatttgagtatcttctggactgaatctacatgtggatgaatagctagcagcacttacaagaaggcttggggcaaaaagggaaaaggaaggaaaaacagaaactaaacgctgatattgttagccttatacaataacagcccgaattataactttttaaaaaactagttgtaagaaaaggattggatgttacacacagttattaacattatactgtatgttttccctttgaaagagctgggagaagtggaaaaaactcttagagtattgagttttggacttgtctctggaactacctccagggtgccctctgaacaagccaagggcatagccctcggtaaatgcacaattgatagattacccatccaggacgatagattacctgtccaggacgttagtttgtacgtgcctaaaatgactagcttgggtgtggtggatattgtgattcttaattagacatctaacactttgggggtggacaagatacagaagcctgagccggttggcagtacatgaggtagatgagtgcttctctgaatacctgtatacacagagtg

SEQ ID NO: 126278 - DNA, 1055 bp, Homo sapiens
aacacaaatagaatcttttcaaacacaatatatcttaaagctctttcctcattttatttaataactatggaaatttttttgtttaactgtttgctgttgatgaatatgtttctagtttgaagatatatcaagcaatgccatggtgatcatccctatgtatattttgacatacttttgtgattgcttagaaaagataaattcctagcattgaagttgttaggtcaaaggacatgtgcactttttagtgttaatagattttatccagtttttttcagtttatcccttttttcttggtaacatataagtactcataagattaattcttcagtttatcatcttttaaaaacttgtatttttacgtgctcacagccggacctgaaggaagcagttgtttagtctactttgagaacacattgccattctagttttctgatacccagggacatgctgtggttttacaaccagcctagtggtagttctcacccatccatttctacttttatccttcatctgagcatctgtgaaagcctcttcagggctttctttattttgtctcttgactctcctaaatccactgttgccacagcagccaaagtgatccatttaaaatgtaaatcatattaattcactcactcaacacactcattgagagcttactgtgtgccaggcactgttccagcctttaggagatggctgtttaaagccaagtccctgctcacagtatattgggtaggacagggcagctatcaagagaacaaagatatggccgagcatggtgccttacgtctgtaatctcagtatttcaggaggccagggcaatctcttaatgccaggaattcaagactagcctaggcagcatagcaagacaccatccctccaaaaataaataaatataagttagcggggcatggtggtacacatctgtagtcccagctacttgggaggctgaggcaggagaatcacttgaacccaggagttcgaggctgcggtgagctatatgattgcaccaccacactctagccctagcaacagagtgagatgctgtgtctaaaaaa

SEQ ID NO: 126279 - DNA, 4301 bp, Homo sapiens
taactgtattttgattcatacttgtaatccctaaccgttttgattgatgggacaagggctgaaactacattctcttgaggatagaatatttttatccttgagaataatcattcatctcttcctgacccaccttaccatttctttgctttgatcctaaatcttttttgttctttttaggctggaggctcccaggtgattttcacaaatcctttagaaatcgtcaagatccgtttgcaagtggcaggagaaatcaccactggtcctcgagtcagtgctctgtctgtcgtgcgggacctggggttttttgggatctacaaggtaacttttttttttttttagtcatttatttgattactttctcatctcctaatgcagaaactattcttcaacatgaaatccatttttttttgcatttctacacctggagaagatgttctacccaagctgcagaggcaccttcatgccaattagaaggaggtgccccttcctgccatctgccaaaaaactatcctcatcaatacacaaatctaggatgactatgataggaatcgtgccctctagagttgttcagtgcagctctttgcagcaacactggctagaattttatttggatttgttattgatacgctgagttcagttcaaggagaaacctgtatcataatttattttctgatcctatgcatatggtccgatccatgttttctctatatatgtatgccttgtcttaattattataaatcttaatcatttttcatttagaaaatgttttttcagaatgattacaaaaccaaacttctagatgattcttgaaattttttattcatactgctctaccaaaaagttataatggaatttactagaactgtctgcctatatgccaacctataaggctttatcaaacataatgtatacacaagttttcaatgaagaattttttaaaaaaacattttacgctagcttgactaagtaaacctttagggatatgggagaaaaataaaatgtctacttaagatagtttcatttatttacacagaaatgtatacagtcacattatataaaattaatactgctttgtttctataaacacatatcaagaaatattaaaattattcatgaattttgaatcagcatcttgagctccatttaacccactttttaggtcatctgttagcatggttttgcagaatacattgtcttcatttttatcccaagctttgtaatttgaagcatttttgacttttatgtatgatattgttcctgcaaattttatcccatagacacataatattaagacagtcaattgcttttttcctattcccagttaatcctgaatggatataactggtccccataatgtaacaacttaccatattgctagagtaaacttgaaatgacttgttttgacatttgacacagtatttgtgagatcctcctcccagaaatacttttttactctttttctttctaacctgagttttgcaagtgacctcagtaaacatccagaattagtaataattgtggctgtctcaggagaatctcccttccccgaatggtactctgcttctccaggtcaagtgattggaaagagtactccatgatctgagactttgtgaagattgaatataaagtgatgccctcttttctgggattaattttagcaggggaaaattttgccttatatttaggcatatgtggtacttaggaataaacctgctgtttttttaagtagaacttaaaatgctcaatctgtgattctacaatataacacaatgttctatagctattttgcttaccaatttattacccagctgtaaaaaataaacactgttgtcatgaggcatagcattgatcaatttgaagaaaaatcatcttttctaaatttttaggctcttgcagtctgtaatatgatgtagcagcatgtcattttgacaagatgccaggagtctttcaatgggttgtctggtaaaaagcacttaggtactgtggcagtgactgttattgaaatgtctagatgagtaaaatggtaggaacttgtttgctgatacagaaacagagactgttaaactacctgcaaatgatacaatactgggacttagtgcttttcatcttcacattatttaataatcttaatcccctttaacacttcttggaagtagttggtatcctggttttgtagttcaggtgaatagaggctgccaaccatggtatctgagctgaaattgaggctcagaagtttcttgtttccacttttgtgctaaaattgctttcctgaaatgagcaggattgctcaagtttgagcaagagaactctcccatatgaagttagtttaattactagtctagtagtttaatctagttcagaagcattccacagggcttggtgctcccttctaaaatgctgtttttggtgtactggtaattaccaagaaaatcagtaatgctttgagcttctggaaccttgattttgttgcaagaaagtgacctagtaatctctatcttcctgttggtcatcagtatcagctacattcagagacccgggagtcaggatttcattcagcagatgttgacctctgtggtttggtctcctttcagtctgattagctcttgtattacaagtctggttggtcctcatttatatattcccagcattctgtcttgggctttgtttcatgtgaacctctcttctccagccccaccccacttcacctttacgtggtcagacatcacagcaggttaagatccatctttctagggagcatcacagcattagcattgctttgtagtttaatgtgtttttgtttcaggatagcactttttagtaataaagcttttctgtttctagtcctggttggctagaaaaatgcaaatgactaggggtgacctcacacagtacttttaaacctggtatgtgtccctccaggtgggtctttaaaaagaagaaccactgtcctagatttagttgagacaggtaatctttctccttccctctgttcttttgtttctgttgttaacattacaatgccagacccaagaagggtgagtggttggctctgtctgtgtgtttaggcctgctgagctttaaccttacctaaattggaaaatcaggctttctgtttttcttctgtattgacttgcaaaataagcaaactattctgacttcccagtaagtggcaattagaatacttgttttagaaatacatttgcaactgaaaaaaagtggaaaatggtaaacattttgcattcctaaagtaagaaatagtttagcacaaatatagtaaacaatgtaaataaagcccccctctaaaatgctaacatttagagagatttagttatagcacagaggatgtaggtgactgaagtgaaggcagcataattaattgcctttgaaagagctatttgaatgtaatgtagctaagaaaacaaatctgcaatgtctacttctttttaaaaagaattatgagaatgtatttccctttccctgcataacttctgttttattgcataaacccctggagcataaaaataaaagtcaaataaacttaacatagcaaaaaaagttgtatccatctacttttgaacattaccttttccgtaggagctgtcagagcgttaatgaggggacaaattatactttaggaatggaatgaaacttatcatttaacagtaaatggcagcacagctaattaggccaaaaagacgcttcgttaggaagcagtggaactgtccatgtctctttttgagtacaaaacatggtcagtgaagcaatgacagctgggatccatcaagcactgttgaaaagttttcaaattctataatcacaaattaaaccttgattctaccttggagggtcacttaggaatatggactctgtctgctgtgttctaatcaaaggcgttgtttttttccactgcatttgacagtattcaaagatatttttatccatatacataaatgttgtatacatgtgttcatctataatgtgtgtataaatgattcattggagctattgttcataaactcagaaagcaagttatgatatatcagtacattcttatttattctgccagttatctcaaagagagattgatttttttagtttaaaaagtaaaatataatttatatttcaaaaaaatcaagtaatttagaaaggtgtatgaagaaaagtaaaattatctctctaccctttactgctccattctcttcaaaggatagccactgctgaagattttatattaatatatccttaaaaaaagaaaaactttctgctcagattagtatttctctttcaaaaattttacgaat

SEQ ID NO: 126280 - DNA, 1505 bp, Homo sapiens
tcatcattctgccaaccgtaaatagctgagtccatatcacatgggaaatgtaggtgcaaattcacaaaacactcacgggctgtaaacaaccagggagttgttcttctcatggacctgcaggttgcagcagcagcatctgagcaaaacagagctgttctgagcagtagggcggggagcagcacgtctttgtgtggaccagaatgcaccagcctgtgggtgtatcatctcacactctacttcctagactaaggccctttcttgggcctttcagtgaatccaacccaggttggtattttgtgttgtcccccaacccaaacaaaaaattcatttgcacttaaggaagaacaagagtgacttgattaaggtatcaagttggtaaaaatggaaaaacaatttgatttagagagttaatgaacgaacatctttctttgattcttttcattaacattacacatattaggtaaactgtgtataggtgtttatttttctttatggaagtcacacatgatctatatagaaaaaatttcaaatacatcaaaaaaaaaaaaggaaaagaaagatacttgtaatcccaccacttcagaagcaccactttggtgtatttcttccacatggtggtaggggatggcagggggaaatgtgtaccagtattttaaacatatgagcatttttacttaaaagtatatattgaacatttttcactgttgactgcatagtatctccatgcatgaacatactcaagttcatttaacccatcccttaccattagatatttatgttgtttctaatttttctttccagcttttataaataatacttcaaaggccatccttgtagctagttctaattagtacagtatagtttggatgatataaaaatttcatatatgtgtgacaaggaataacaagttgaagtacagtaagaaagaatgtaattgcttgtgataaatataggcttagcttcaaaatagctagcttaaaatttcccttatagtgtactttaaagatttcactgatgatcttggaggtgaggcatctagccattgctggaatgaaataacacacgatgttcaaagtttggttggtaattgacttagtgcatatttttgctactttcatataccacttatctcatatgaaaagagcaattctgtacacaagtaatacataaacaaaaattttaagaatatgtaactccataaaatgagatttgatgattgacttgagtttctaagagaaaaaaataataactttcatctaagtttacgtgttcgctggcagtttttgaatcgttgccagaatcatgaaattcatcattcaagagcctttgtcctcctagtccccgttctgttctgtgtctcctcatttggatacgttctgtgtctcctcatttggatacgttctgtgtctcctcatttggatacgaatgcttttcattttattactgcctttgtgcccttggctttgagtcctgtggtggcagttgtttgtgcttcaaggagcatt

SEQ ID NO: 126281 - DNA, 1090 bp, Homo sapiens
tttaatgaatattcatgacttctacccttactacttcaagcttcttgagaatgagaataaagcatcttgtgtccttgcagttctaggacaaactttgaattgcttataaatatttggtgaatgaaaaatcaaatagcagaagtgagtctataataattgtatgcatttctctttctctcttagatggatccagatactagatgataactaagatttcaataacaaagagtataccaggaaacatgtagaaaagtcagtgttaccgctgtaaatataatatgccacactgagccagttcagtatggaatattttcccatgtcctacttgccacagactccagtaagtcatagggaaatgatttgtgacaaaattgcacacacacaaaaaaaacagtatcttcacacagccagagctttcaagtgatgagggacgcaaagacattgtgcacaataggtgttcctgtccattgtctgccgattcagctatctttgatctctgcaaaagaggaaccatgggtatggtactgtgaatgcataatagaccaggaattggaagagcggcacgcagtgtgctgctcagtgatcaagtcgtggagagacccagacaccatgcatctgatgataagcatcttctcttggtgccttggagtctctcatttccttccagttcgactccaaagggcctgtttcatcttcagcacctttacaatgtgccactttgagtctgtaggttctttctttcagaggccaccacagataatgggtacatcattatgttttcttgatatcactacattctttcttccccgtgcatctgcctcctgcagctctctgaagtggatttgactcctcatcatccctagtgataactaactctgctttaaaagaattgttatctgttggttggcttggagtcagggagttgagtgtaagttcttgttttattgtatataatgctagcaacttttaccagtgttagtaaagataagagataataagacaattccgtacctaagaattgtaccctttcataacagcaccacttggatatgtagaaagagtttgttgtgagatcagatgtaaaacaaat

SEQ ID NO: 126282 - DNA, 1034 bp, Homo sapiens
agtgatgccctcatctgtgtctctcatccctcttaactcacccttccactgccttctgaatgtgtcattattcgtctttccaacactttgttcctattacacagcaaaaacttggatcctttctttgagcttacccactctttttgccctatattcagcagccaaatcctgttggtctctgttgcatccattacccagccacctctattcagtatagatatgactgttctaattctggccttttatcactcacctagtcggctaacaacctaattgtgatccctgcctcaggctctgcctcccggatgagccctctcccctctgctccctaggcatcttcccaaggcatagataatgctcagacctctacagctcctaagctgtgtttaccagctctcctgctgctacatagtcgcacagaccatctccagaatgcagcctgttctaggcagcatcctggaccttccatgagttggctccagcaatcttattttcagccaccttctttcataccccttctccatgccatctagagcaaaaggctgccatgataagaactgtaagtgtgccgctggcatccagccacttgagcttggaatccaaggttcaccttcctagctgcatgactccaagcatgttaaatagcctcctttactttttgtagcctcagtttcttcactgaaaccaggattttatttatttatttatttttattgagacggagtcttgctttgtcactcaggctggagtgcagtggcacaatcttggctcactgcaacctccgctgcccgggatcaagtgattctcctgcctcagcctcctgagtagctgggattacaggcacctgccaccatgtccggctaatttttttgtatttttagtagagatggggtttagccatgttggccagcctggtctcaaactcctgacctcaggtgatccacctgccttgacctcccaaagtgctgggattacaggcatgagtcactgcacccgacctattatttatcttattacttaccttataatattat

SEQ ID NO: 126283 - DNA, 1971 bp, Homo sapiens
aatctgtttttaaaaaataaatagctatatcacttccctgtgccaaaccagaagtgtcaacaatgaagtcattatgtaacatggcaagagggattcgggtggcaaaaccgtaaggaggagaagaagaaatcaagcttatagaagcatgtagacactgagtgaaagacgcagtgataggaaccacagtttggtttttttgcagactagcccatttcagagaaggcggtattagaagaaaaaacctataattttactgtgagccgtgaggaccatttcacatgaaaaaaaaacagagcatttggaaataatgatgcttcgtatcagtagaatgctgtgcgtttgagaagcttggcgcttggacttcatgctgacatggttgtagtcacagtcctattgccctttctggttgctctcagcactcctggatgcaaaggtgaatttatgaagatcatggacttccgatacaaattacagcagccaaaactgtcatatggagatgtgaacttaagattgtattggtagataggtgaagcacccattgctcctatcttgaaatgactatgctatatttagacaaaacctacatcagtataattattttgcaagcccatttgaagaaaattaaaactgtcactagttatatatttttgagcctaaaatatttctcacggctgggcatggtgtatcatgcctgtaatcccagcactttggtaggccgaggcaggtggatcacttgaggtcaggaatttgaaaccagcctggccaacatggtgaaacactgtctctactaaaaatacaaaaatttgggaggctgaggcgggcaggtcatgaggttaggagattgagaccatcgtggctaacacagtgaaaccccgtctctactaaaaacacaaaaaattagccaggcgcggtgacgggtgcctgtattcccagctacttgggaggctgaggcaggagaatgctgtgaacctgggaggcagagcttgcagtgagctaagatcatgccactgcactccagcctgggcgacagacggagattctgtctcaaaaaattggctgggcatggtggcgagcgcctgtagtcccaagtacttgggaggctgaggcacgagaatctcttgaacctgggaggcgaaggttacagtgagctgagtttgcactactgcactccagcctgggcgacagaacaagactctgtctccaaaataaataaataaataaaatatttctcaaggattcagatttggggattttactgccaagtagcctggctttctcattattgattaacctacaaagaaaaatttgatatatctgatgaaaatcagttatattgtacctacaaaaacatctcttccatattacttgatgtattttaatgtcactgaatccattggtttatctttatctcttagaagctcttaaagtcacaggaattctagtccatatgatcagattaaccaaaaattcaggcagctactccgttcaaacaggaaagaaaaaactgaaaatgaattgttgtattgaatctgctttttcacaagagacaactaggcgtaatggttctgagcgtgggttagaaattgggcaagtcgcgttcacattcttttactaccttgaagagaagtctctgcctccatctcatctctagaaagatgggaataatatagcttgtgtcagcatgattgggggattgaaggagatgatgtctgtgaagagtttagcacagtgcctcctacatcagaagtgcttgacacgtgtctggctcttgcttctccaggaaggagaggaggggagaagagagagtttgcagggccgtagttattcaagtagttacagctatctcttctttctggtcacactgctgggtaatttgttcttgaaaagtgtctcaagatgactgctcccacttagtagctggaaaatcacatccttccagaaagggatctagagggcagacatgggtgaagt

SEQ ID NO: 126284 - DNA, 3563 bp, Homo sapiens
ccagcaaagaggaattaactccaaaaattagtgggagagtaggggtgcaggaattgagggaatagctgtaaccatggctaggtgtctgcatatccaggatatttcacaagaaagtattccatgatcacccagtaatagaaccaacctttataaggctcctatttattttatttgacttcatttctaagaatgacaaataaataatccccaaatatattcagaatcttaagaacaggatgaagataaacaacttggagcatttggtatagcttatttattatggcttgtattttaagtagaaaagactttattgaatgactaacatgaaattatgtcagagtcatgaaggaatcatagaaaagaggagctttaaaaaaggaggagccaattaatagccaaaaaaaaaaaaaaaaatgctaacctcatggcactatctaaattggcagatttctgaaaagccaagaggcagctccatcggttttctcaaaaagtcctccaggcaatgggactaaggcattggtcttgaatagagttccactgcttgcctactccaatgagaggctctttctccagatgatttcaacttggactgagggcaaaattaaaagaaatatctgatggtactaagggctcatgggtgctatagattgaatgtttattttccccacaattgctatgtttaaacctaactcccagtgtggtggtattagaagagtgggacctttgggggtgattaggtcatgagggtggagcctacagtttgagattagtgcccttataaaagggatcccagggaggtccccactccttcctccatgtgaggacacagtgagaagacagcatctgtgagccaggaagcagtgctcaccagattccaactgtgccggcactgtgatctcagatttcgagcctccagaactctgagaaatgaatttatgttgtttataagccacgtagtctatgatactttgttacagaagcccgaacagactaagacagttaaggatagcctccctggctaagggctgccttcagtggctcagaaatgtcatcttattagaggaaagtccaactttcatgctagacactgggccagccagatacttcctttctgtttttctccctttaccttctctgggaaagtctcagagttgtttgactcaacacagttcaaatattgggccatctttctggatttctagtaaatagggaggagtttgttacgataggaaaatctgaagaaagactgggccatagctttcatacagttaaggtactttagacattgaaggtctgtaaatcattaaactattctggtagtagtagtcaaaatacacatgtataacaggcagaccccaaatgttaacatatttgacaggcctgtaagttaattgctttttaatgtcagtcaaatggattccactttggtttcttggccaggcttctatgggcccattaaaaccccatgaagctgaaaacatgaaacttaatatttgtaaaacatgtaaacagaatagcctttttctgccttaccgtgtggttaagaaattaggactaggatatttcagtttggtatctttctcagaatccaattagagtaagaatttattttattatcttttcaatattgttaataatctagtaacacatttttcacttaagagttttattttcataccaaatcaaaagaaaaaaaaattctatattgctttatgtttagagatgtgcatttggtcagacagtctaacttagtgtattcgtttggtcaggctgccataacaaaatgcctcataccacagagcgggaggcttaaacaacagagactggaagtccgaggttaaggtgttggcagttttggtttcttctgaggcctctcttcttttcttgcagatggccgccttctcactgtgtcctcacgtggtcacccctcagtccatgtgtcgtctgtgtcttaatctctaattataagggcaccagtcatattggattagggcccatccatttgacttcatttcttcttaattacctcttaaaaggccgtaagtccaaatccggtcacattctgaggtcctgagagttaggacttcagtatacaaattttggagagacgcaattcagccctaatgctagggtttaagaaaaggtctttctttcagtttgtgaggactcaggtttctgattgcaggagggtgatgatgtatcttgtgaaggcagtgagcccaacacacttcccttcagagctcgacagggtgagtggccttccgacctcatgccacctcatctttgccagcttctttgtgaggttgctgaatgccgtcttcagcacttgtgaacagttttgaacagcacttgactgcaatttggcaatgtgttttaatttattccatccactgctatttgctgaatatctcttttttacctgtgagctctgcatacaataatagttggttacatacaaattattttcatgtctctatttaacattgagttagtaagaaagtaaatggaaaatatgttgaaccttagattcctttacaagtctttattttctaatttattcaaatgtcaaacactgtcatcacttgtgtattcgtcttaatgaaacataaatcactagacatttattactatatatcttgtttgtagttacaattgtgtttgtgtccagataatcaaaataatgtatttgggtttaagtaaaagtctattctataactttatattaatctatttttgacacgtgtaagcacgcattttagaatgtcagtgtgcaattagatattcttagcacatgtcatttgtgaaaagcactttaaatctaagtacattcaattgagcataattaaaatatcaagatacatattcttcatatacattttgcctcttaattttttaagtagctataagtatctaccatgtgaattcaaattaaaggagggtgattaaattacagttatatttattgcttttagtttaaaatatagttgaaattgcgctatattaaaaaatatactgccatgttttctgtggacagcagactgatgatgggtttaatttgttttaatgcaagactattaatagtctctgaatattctcaagactgttgactagaatgattgggggttgggaggcgtaagaaggcttgtatttttatctaatgagttcttttgacttgactcctgaagtctcaagaaaatgttcaggaatactacctcatttaataaagaagcattggagaaagccttgttttgttgatacaaatgaaaggaaatggatcatggggaaatatgaactggagctcctgaacccttatcctttagataatgtatttaggctactgatatttcctatcattgtgaaaatgagcagacagccttggtgagtcagttttaaggcacatgtaactgttaaacctacttgtccacaactgttggacctaaagtatattatgattttagtgaaggccattgttcttggagtacttagagaaaatggggctgtacgttagaactctggattgtgttgcctttctaaaatatttgatttcttaaaattctgtttgt

SEQ ID NO: 126285 - DNA, 1096 bp, Homo sapiens
gttcttgccagccacctagcctttctctacagtaggagacagcctcttttcatcccttgccccagccccagctaattagcttaagttgttcagttttgttttgttttccatttaattattgagagaggaaatctgattggcaaacctcatctttgtgcgccaggccatacatatggcagccttgagtcatggcgccacccagatattaatgactttgcttaacatttccatttgtttcaactacctgtaagtgtcttcaaacctttcttgtactgttttgtttttagctctgaattctgtaagtttgccctgaatagtattgtgtatactttggtcataaaatatactcaaagtcaccattccttatgattgaacttgaaatcccttaagatttcatactcactcatatcaaaccaggaagaaaatttcctcatataatgaatacatatactctgacaatcagagctgatgagacagattgcctgaagtggatttaagtcttacttcgcgatctttttcttcccaggatttcctgtggatacgtagcctcatagtgtggttttcttaaggtagaatttttatttcactatgcaagtctctgcacatatcttacttataaatataagatgatgtgaggcttaatcattaggttgagtttttatgaagtcactcttgtgtgacatgtgaattaatcaagatacattatgcattatagtgatgctatagcaataatgttaatttttttaatgcttgtatctttacagtcttttgtagttcagtgaaaatctagtgattatattgttttcaaatgttattattgttattgtttggaatattccctgggagaactttttgcctactccgccaaaatgtaagaccatattaaagattttcttgatttgtacttgcactttatctctgccttccatctcctcttgacttggagggttggagactgtgtctggtattatatgacctgctgtctttgtcaaccatggtcactgctttgccacttgaggagatcttccttcataactttgtgctgacaactaattgcatctcacagaccttgagtaaatggctgaactgagacatc

SEQ ID NO: 126286 - DNA, 1095 bp, Homo sapiens
tgttgaggacctcagctacctcaggtgctcctgaaatctctggtcttctttgtgaacctgcttatttgccatttctctactgattgatttcctctgctgggtaacatagcatctttattctaaaaatgactttaatttcatcctgtgtccacagtgcatgccaatcccagttccaaggctttcctcctaacaggaatgatctcagtgtttctccatcattgaggaggagaagtgttctgattatctattgctgcataacaaataatctgaaaatttagtggcttcaaatagatacttattattattctctcttgtggttctatggattgacggggctcagcctgggagggttgtacttgggatccttatatggttatgggctagtggcagctggggccagactcatctgaagggtcaaccgggatagatatccaaggtggctcactcttgtaactgaacagctggggctgtgctccagagcacctgcttgacttctctgtgtagcttggtcttttcaaacattgacaatttgattctgagagggagcctcccaagagcaggcatcttaagagtcctgggcagaaacaagacttcttatgacctgaccttgaaggtcactgccagtgcattctgatggtcagacaagccagttaggctggcccagactcaacaggagagaaattagaccctacatcgtaataggaataatagcaaaggatgttttaactgccactggaggattcagtaagctgtgttgtgggctgggaacatcttcattgcccttcaccttgtgaaggtttcatagcccatctcatgccttctctgagggtctgttgctgatcctagaacccattcattctctagattgcttctggtagcagggggcagaaactcaccaaagttggagttaatcaaatgaaggtttactttaagggtacccattaaatgaaactgaaggctcttgagaattgaggcagcattaggaactggctactctctccattttctctacttggcctttgtctctctcacagtgactttgcatccctctgcacatcttttgactattctaatccataacttcttctcttcctg

SEQ ID NO: 126287 - DNA, 1058 bp, Homo sapiens
ctcatctcatacattacattcagttgcagttaatttatattttgaaaaattttgaaaaacacaacaatacagacacaggtgtgcctaccacttagattggtgacaaacttgacagtgcagttggaggcccttaatgtacctgtccaaattgcttttcattcccttacctctgtctcccaagagaaaactctgtcctgacagtggtgtttttcattctaagcatgtctctctactttttattacctgtgaatatcctaagcagtataaatgtttgtttttgaatgcctcatcctaacccagtgctctaggaacacctcatatgattcccagattgatgcctttgcattttttcccattagtgcaactcatgtgctttgcttatcagaaaataatagtaaatgggagtattacattcaaagtgttggaatgcggcagatactgcgtatgtctgttacagatgtgtgggtttctagatggacttatggttggaacagtgtattcatttaaccaagtttttggttacttggggtttctccctagacaacagtcatttcttcagtcttatgatttaaacttatacatgatacttagtttaaaaatgttaaccctccccactgccagcatacgctccctatctacctatcagcctgccttcccatcatccctcccttcttcttctgctgccatggttcttaccaccttcaaacattctgtataacttacttatttttcatgatttttgtttattttctgtctccttcatggtagagtacaagttctgcaaaagcagggatcttcttattcattgatgtatcctgaggactgcaggcattgcatggtaacctgtagactctttgtaaatattggttaaatgaaagaattttaaagctaaaatcactcaaaagtgatcttgtcaatcttcacagccaatcaacgacaaatctgataatggactcatttatatcttttctttaatgttagtcaaaccccttcccatcattaacaataaaacttatcacctgtctctccaagccatacttaatgataattcccaaatc

SEQ ID NO: 126288 - DNA, 1882 bp, Homo sapiens
ccttataaaacagttttaagttgtaagatgtatgtttttattttgtcactattgtcagtgtgtctcccttcttaagctattctaattgcagaacatatttttggctttcatttatcttttaacttttctcctgaaacatcagtgatgcatatatatttttcattttttaaaactattatactattaagagtacttctcaaactattttaagatctgttaaattgtgcaatttatgattactccaatagactgatagaaaaaaatagcatatattgacagatgcatatttataagtgtttaatgactttctttatatttttcatcagcttctataaatatttttcttcaaggtgaacgattttgtgagggataaatttatgcacaaagatggttcggtcccacttgcagcagaaattcttgctggaggctgcgtaagtaccttttgaagctctcttcattgaaaagacttgtttcacatatatatcactaccatggtcaacaggtgtggactaaggcttctgtttaaccacagatcctgcacaagggcagagtctactagggcacctcggcttttcctagacaggcgaaccattccagaggtggaagggtaaatgtttctgaccttactgcctgttaagtcatgcctgttaaattcgtcattgcttatggtttgttctgcaatggaagtcatttgtggcagaagtgtttggcctttgaaaaatctttgctaaccttttctaaagttaatttttagtacattctttcctcatggcaccctctgctgggtcaggcactaaaacttgtagtctgaagtcagcaaccgtagctctctgcttggctttgccttgcaagtggcagaactgttcaagcttccactgcttttgggagaacaatgctgggaaataactggctgagtgtgcgctgcattgtcaaaaatgcttggaatgattgtttccttatatggatgaacaacttgcatcttgttctgaagctcagcaaaacattgtgtctcgttttatctcgtactggtttgttcatgcgaatgtaaatactttaagtaaattaaactcttatacaaagactagtgttatttaaagataagattggttaaataacaggctttgatcactcaggcgatacaatattggttttttttatccgaacctatttcttataaaaaagatgaagtcacttttttaaattggcttactctgggcaggaagtagtattcctaaagtaatttttttcttgaagatccttgaatgtagacgttgggcaatgtttgtgtggaaagggcttattgtcctatctaatggtgaatgatggtttcttaaatgtagcaggacctaagaagtcctagctcctggtattctttagagatggatggaatttggctactgcctgactctctgtttgatcactgacctgttggagatgggcaggcaggatccccttgttctgtaactttaggagcgttcaggatggaaaaaaaggagcctttaatgtcctaaatataaagggcacacaataataatcaaagagaattttagaagttgctcttccccataactactctccatttaaaacaactctgtagtttccatttgagtaagtaggttttctaatttttgagtaggtatatccataggctgtgcctagcctagtccttcaggttgttgcagggcccaggatatagcagggttttttggtaggtcaggtggggttgttgtttttttaagttacattttaaactttctgaaaagatatgattatagatttctgtaagaattaaaatgtaaaattaattatgtgatactactcaagatgttggcaatcatcatggcatggtgcccagaggtttattttctttttaatgaaagca

SEQ ID NO: 126289 - DNA, 1256 bp, Homo sapiens
tttgttactcaataaaacacacttataggttggatacatatggcattcaagctagtgacctctcaggctgctcctttaggaagagagtgtgggcagggctggtccctcagaagaggctgtgagtggactttcttacatagataaattagaaaattgtacttccaatgaagaatattaccatgaacctctctcagtatgacacagggtgcaacatgctcctaccttcagggttagcttggtgtgtgtttccaagaaaaaacaactgtgatttaatttttttttctttaagaagaacaaatgaaaatgatgacattttttagttcagatacgtagctccactaaatgttctaactgccttccccaaaattggtccttgttttagaaaatcaagtggtccactgatttagaaggcagaagggaaggagcagactttgggggaataatgagatttcctatatcactaatactgttgatttacccaatgtgcaaacgatccagaatgtgagatggaatgtacttgggactgatgcggctgttagaagttagtacttaaacattccatttcaaatattctcattaagggtaatagcagaaaattgcagcagagattaagcagtttttaagtggtaatcccctctgtagaactgttgatttgtttagttaatgctaatttatttaatatacttctactttttgttgatttttaggtctgttgccacagttattgggagttgccccagagaaggccataaaacttacagtaagtcttttgagttggtgcttcttattaagggattttgtacatactcaagaatctagcaggtattcttataggaaacagcaggtttgttttctcagaggtgctagctaatttgaaagcaggggaactcaccacacacattttttcattattctccatttagcagtggacatccaaaaatgtgataataaacttgaggacttttggtggttgctgccatcattgttgtcatcacagcagtagcagctaaattcccttcagtatctaccatattaggcacatgacgtatattacgttttactggtttaatctcaagcaaagcatgatccacagtttacggataaggaaactgaggcctatcgggcttaagtagcatacctgtgttcacacaaatcatgagtgggagaactagaatttaaaatcacacttgtctgactccagagcatgtctttctattacacctgctgtttttataggattcatggttagggtgtgt

SEQ ID NO: 126290 - DNA, 2468 bp, Homo sapiens
ctctgtggtcctgctagcgttgcccagcgtggtcctttggcaccctggccactctgggttacagtagccgctcagcgtggcttcaacccactcctgaccctgcgccttcttcccagtatattcctgctctcactggttcaccaggttataacctacagcttggctctgacattcagtgccttcgaggttttaaggagtctaatattcaccatctgtagagacgggggaagcatgatgtggatgcctgctacatgggcaccatccctttgttgtgtacaagggtcaggcagggcagggtgctgacccagcctgagctgaggcctagagaaaagtttcagaacagtctagttgggaagaaatgcctttccagggcagaggaggaacttggagcagtaagtctgttagagaaaactggtaccgcagagaattaaggagcacagagccctgatttgagagtactggcaggcctgaattcaactttgagtgctactacatagtcgctcagaagttagtgacttgaaacaagctgcttagcctgtctggattccagtttccatgaaggaggaggaggaagaataagtgatagtgatgatgaagatcaacaacaacaacaaaaatccatttctgtagtctttactgtctgtacttggtactggtctgaggattttgtgagtgttaactcatttcatcttcacgactaccccgtgaaaatggcatcatgattattcccattctacagatgtggaaactaagatacaaagagattaggtaacttgtccacaattacacagctaacaaatagcaaagtcagaattgaagctcagcagcctggctccagacctcgtgttcctaatcacttggctcttttgtcacctggtagaaattacattgtgaaaagttgcttgtcagcagaggttaaggatcatttaagtttttaactataatattttatttcagcttaataacatagttgaaatgtgttgttttgtctgtgccactactttaccttgcccaaagtatacagggcccctggacacttccagaccacatgtgctctcactgcttggggacagctgttctaagataggcataatgtcatgggcacagcatgatactccttagctaatggtggactgtgaacatgattcaggctgaattgcctcttgcaaacaaaagaaatcaaggctatgtattgaaaagataggtagaaagaagcattatgtcttttggaatacataacatatgaggtaaatagtgtctggttctttgtacacttattcatataattatcaaaataaaccaatagatagtaagtagcacccttgttttgccaagagggaacctagaattcaaagaattactacccaagatcactcagtgtgaaagatgcacagacctagcattctagcccaggtctgtccacctccaaagcccatgccctagattgttcattttgctgccagcccgttggaaatagcctaaaattagtttaaattaggccagcaatattgagtttctttcataatcccttccaaccctgaaattccagttatatttctaacaggttcttaagaatagcatgctagccctctagttgaacacagtgggcccaggaacctcttttggggatgtcctgtgaagcttgagttggagacccctgatctgggcttggtccccacaccttcagctccttggtttgcgcaagggactgaattcagaggggatagtgtgatttatatctccaacccatgaaatgtgaagacaaaatactacattaatactgtaccctgtaaatcttttctcgcattagcagccttctggtagagtcgagttgccaaggaagcattgccatatgtgctgatggagctgaactaaaaggagaagattggaaaactaaccacactaataaatttcttttgaggcagttggaaaatggactgctgttttgacaagttagaaacaacacacacatccattctctgtttcaaatggttaaagtgaatttccaggacccaacagaaacatcttatattagaaacctgatttttctgctgaattacccagatgtcagatatatatgcactttagacttaattgtggttgtgatgaagtgcctcacctagactctctgctttaggcattactgggctgtgctacctctcctccctctgaggtcaaggtacaaggagggagtttggaattcccacctctttgacttttcattgtttcacagatcatgaccttcttacaaagaccatttacccaagactcatgttttcaaggcccacatctgtagtgggcctcagattataatccagtcaccttcattttcctgtttaaccagacaaggtagtcactacaagaatggttcttatcaacaacttccgtgagtggcagcatctggcctaggtcttaggaatggatttgtgctttggttttattctaagttgaagttaatcatttaatat

SEQ ID NO: 126291 - DNA, 1035 bp, Homo sapiens
ttaaaatacagtatcacaaggcagttcaaactcagctgctttataatttggcagcggcaaagctggcagagttttccctcctctcccctactaatgctctctctagatgaagaaaacagtatttagtactctgctgaggtggacggtgaaactggcagacatggaaacctgtgcctctgggcctcttctgccatctgctgactctagtcttcaaattaattaccccagttaaaaaaaacaaaaaggataaacctttcttgaaacctctcaccttagaagccagaaagtctcaaactccagagaagttccattttgcaggtcctattgtgtaggtaggtagcccccatcaaaggccttttgatctttgctctgccctcttttccttatcccctgcctcttcttacaatttggaaggtctttgacctcaggtgattgatgatgaccctttcagggtcactgccttccatttgaaatgcttttcttccctgatggcaacaactttgcaaatgaaatggcttccaagtagtacaaggttaatgtcacagttcctattctgcagtgagtcaggcaaaattggccgccttacctgtccatatgggtggtttttggaagggaaatctcgagtctcaagtctgggcagacatctgagcattgcttcataaactactttttgggcttttcttggtattagattaaatgtcaaggatgcctttagaattgtaagaatgcttcccaacactgctcagtgtctttaatttgcttaagttgattttttattttgagtccttttttctcgatctttgaccatacctggcaggtctgatttttggttacgtctatatttcccttttgcaacctgtactgttggcaactagaagtgtgcctgagtactgagtgctgagctaatgtgggctatgcaaagaggcttccactcttgccgtttcagttcttttatctgtaagatgagagtgactgcttttaacttctcagaggagtagtaagtcaatatattaggtacagacagaggctcactgt

SEQ ID NO: 126292 - DNA, 1163 bp, Homo sapiens
gttgctggaggttagtcatggatgagagaaaaattttcacttttgttattcctattctcttttctctgattttccatcttgaaatgttaaaggacaaagtcttctctagtctttcccaatgccagttatcagtttctacctgtgaggtagggcaagagtaaagggaactcttttcccatacctgcatgtgatcagggacttacaagtggcattttcctctatctacagatcaggccttccaaagacaggttactaatgaggttgggctgtagcaatgtgccttaatttaaaatatctatgacatccttttattaggggatacttgaatgaaaaccctcaattgtttattaaagatataagaaaggtagtactgttttaaaatctgtatttaaaattcaaaacacatttcttttctcagtcttgtccttgactttaactaccttcttctttcttctgacctatcttactttcttctgagataatgatattgtttaattttagctgttggagccactgctgtgtatcctatcgatcttgtaaaaactcgaatgcagaaccaacgatcaactggctcttttgtgggagaactcatgtataaaaacagctttgactgttttaagaaagtgctacgctatgaaggcttctttggactgtatagaggttagtgccacatgctcaatacctgttaggtgaaataacactcaaaggtttggtttctcatcttagtgcctgacatgaattagcaagactgcgttaaaatggaaatacagcagattttcaattatccatgctaatgggagtaggctggaggcatctagggcttggctaatcaaaacagcccataatctgaaaattatttatagtgctctgttgtatgttttatttcttaaaataataaattatttttataagcatcttccgtgaatttttgaaaggctcacattgtttgcatccttgaagtactctattctccagctaacagggaaaggtattctgccaccaggacaaagcctactcaggattcatgattttcctggaatacaccacaaaaaagataacgaagggttcagtagagctctcttttgctgcttcatcctgaattaaagttgccccttttcttcatctgactctcaacccaatggagttgattcacacacccctct

SEQ ID NO: 126293 - DNA, 1069 bp, Homo sapiens
cagttagcagatttatatgagccaagggggtaagttggcttttttttttttttttttggaattagcttaataaaaggaggttaggaggagggcagcaatcaggagaaaaagaagccaaactgaaggctatactgaaatatgagaaatgaaaaaagggatgtttttaaattttataatgtaaattgtaataaattggtatatttgttgcttgtgtttgtttttcccctacagacgtatgaccttagcagacattgaacggattgctcctctggaagagggaactctgccctttaacttggctgaggcccagaggcaggtgagcaaagaggagcaaacttgcattctggggtttccttagcaggataccccaaccctgttccacttgcagttgcctttgcggcattggtatctgacttaaccatttttctgttttgcaccaaaactctcgataaattttaaaggctgtaaagagaaattgcttagaaatggtgtgataaacaggtatttggcatttgctcatttcttgctaaggtggagtgatttcctaactgcaccagaagcctaatgctccgaaaacatgaaggaggtcttttctcctttcttgaagtctcatgttgagagatgtagcgaaagaatcccgtgttggtgtcactgtgcctgtcggcagctgcacgttgctaaatgaaagccgtctttgctctgtggagcagcccttcatcagcgcatcgtctaactgccatgccttccgtttttctgaatatcaaaatgagataattttgtttagtctggagttacagtttaaaggctttcagacctattttctctgtgaaaggattcataagttatatggaaacaattttaggaatgctaaattttattttatggttaacagaaaccaatctcttgaagttgtgggagtcagaaacttaagacatggaactttctcctttaactcttacccagctttctgtagatcaggattagagaagaaaagccttcatagcatgtgttagtaaaataaatggtgtttgtaaaataaatccactcacaggcgagtgtcgtttttaga

SEQ ID NO: 126294 - DNA, 1048 bp, Homo sapiens
tcagctattttaaatgattactaagtgaagatttatgtggttgttaccttgtaaagaagtgctttcctaataaaaatattttgccttgctagggaaggatagaatttgaaactccaaactgaagtctcattcataatggacattctgtctgtttcccttgtcccctgtgaagaaatatggtttcttaaaaattctgattatcagaatttttactagtcttaaccccccatgaaagtatatggcatctcataattttaccataatatgcttgtttgctagaaatcccaccaatgtaaagtctgtacctaaatgattatttattactggttataagtaacttgacaagtcttgatattaatgttacattgactacttttcatagtatgtttgcattgatacaatacagtttttcatgcataagcacacacatgtgtgcatatgtacttatagtttttgcatgtttaagcctttaagatttgctcattagatgaaataaaccaacttataaaacatttccaattgaaatttgaactctaaattactactagtcctgttataatcctacacatgtatttatttagttttctaggagttgtgtatggagagtacaagttctggtcatgattagttgcagttgcttctaaaaatcatttatagcttttttttaatgcaaaagaaaaatacttatagtcatttcttcttgtacatgcatttttgattactttcaaactagttttagatgtatgtacttctgaatcatctataaatcttttgtatatttttcttctctcttgttttcaatttatttgaggctgctggaggtaccacatcccatcaagttagtttctcctattttaatggatttaattcgctccttaacaacatggaactcattagaaagatctatagcactctggctggcaccaggaaagatgttgaagtgactaagggtgagtgagaatatatctgaattctagcctgcaagtattgtggtgtattattattagggtgaagaaggcaactagtactttattatttttctatccca

SEQ ID NO: 126295 - DNA, 1007 bp, Homo sapiens
catatggctctatgcagagacatttttgattgttatgaccttagagggaaggggctacttgtatctagtgggaagagaataggggtacacacgacagccctcccgtaataaagacttaccctgtccaaaatgccaataatggcaaggctgagaaaccctgtgttggagaaatagcagagaagaaccaccactcttttctatctattgttacatcatgtgtttgggtaccaggttgcagttaagaatttttctcttttctttggagagaagttaaagtccctggcagtgtttttcctcagatcatctgcatcacctaagctggggttggccagatctttgaacctacaacacttcattccggttttcattttctttgtgttcatggactctagagagcacggaagtaattgggtttcattgggtagcagagtaaggtagagtgcactttctcaagacatgttcattggtctgagcaaagttctgtctcttggaaggagacagtagcttggtggtgctattaggcagatgagggcttgttagatcaagatgtaaactctctttcttcagtctgattttaaaatgaactgtcatttgtagtaattattaaatgagaagcataaattaagtattttactttctttatttgtaggaaatacaactggagcacgcaaagcaagcctttgtgcaacgggacaatgctaggactgggagagtcacagccatcgacttccgagacatcatggtcaccatccgcccccatgtcttgactccttttgtagaagaatgtctagtagctgtaagttgtaacttgccctaatgaagtggtttaactcagtaaataaggaattataaaaacaattcttataagttatgtagtgttttttttctgttgcaaacactaacattttaatgtgatcacatacattactaaactcaaacaaagagtgtgttttggctagttttagtgggtaggttaatttgttgtctgggtaatacggaatatcttc

SEQ ID NO: 126296 - DNA, 1017 bp, Homo sapiens
gtgaataactgattatgatgtaagatcaaataagacaagttttataattgatattcagacagggggccaccggaagggacatcagttatttccagttataaggcctggttatatttgcctaagtggtaccatttgagctaagcttaaaggaagtggcaggatttcaggagctggagaaaggggcagcagtctacactaggtggaagtaacgatgtgggcaaaagcccaggtgtgtggcaggtctggcaggggtgggcatgggtgataggagatgaggctaagactagttcctctgggggcttgtatgccttgcttcagagacgggtctgtatgatgaagggtcattggagatttccatggagggggagggagtcaggtttttaattctgaaaagcaactttttatgtgtgcatggtagaccacagaggtccagactgcaagcccaagctccagactgacagtcagaaccactgactctcagtgataatttagatgaggtctgaggaaagtctgaaccagtagcatcaggaacaaaaaggaaaaggtgcatttgggcaaactttcaaaggcctaagggacagaatttggtaactggtttactctgggagaaaggaagcttgaacaattcagaatgacagctttctaggtgaggtggccaataaaactacatgcctaataattaagctgtgaacatagaagagagaccaggtttgagcactgggttgggggatctacaatatggggttagcgatgtgtcattttatggcctttacacgatacccacgtggatatattctctaaacagaaattctggtccagcagaaaggaatgagacttgaatatgggagttaagccttagcttttaagaaatccttgagggcttaagagagagagcactctgtctaggagagtagagtgagaagatgtgaggacagagggccaacagatgcttcccatttaaggagccagtggtggaggctccagaaagactgggatcccagaagagagtttcagctg

SEQ ID NO: 126297 - DNA, 1060 bp, Homo sapiens
aaatagcttttgaggtgcaaaccaggagctttgattttaagtcattctgccatgagtagtgagcctagtcatttatttcaaagaccacacatttctttcatatttacggagtaacctatgtgttagctcccactggcctcctgatttaattttttcctcctttgtctcttggggctatgggaaagagagcaaaaagggagtgaggccaggagaaggccttttagatttggtttctctcctccttggtctctgctactattggtaaaacaatcctgatgctctgggtgtacagaagccctttgccttaatggaaaactttagggaattttattatttttccacaaaaataggcaacagtaaaatctagagcattaaatgcaaattgagtttttatctttccacagctgttaagatttcttagtgtcaaatttattttttaatcaaattcctgacagtagctttgtctgaggttccccatgcagttgagtgaagtattaggagcatgggtagatagagggctggggagtagaaatgctgaggcttgaattccagctttactgcttcctgtcagtgagactttagtttgctcaactgctatagtgaggttaataatagtacctaccttataggcttgcagtaagcattccatgaattaattcctgtaaaatgctttacagcagtgcctgctgcataatacatgcttgctaagtgctattgcatggttgtcatactggttgaggtcatggtttcatttcttcacccggaaggagaaacagtcacgacataaacagatgatcttcagaaggcaacccacgtcttcagaatgctgcttttaaagttggagagccacctaactgcgtgttttcactctgtcctgctatttagagaactacatagatctagcattttgtcttctgtggaacttataatgcccccaatctttaagagctgttggaaatgtattctcaggttgttcatcatcagacttaaaataactttcttactccaacttgaggggtccctgctcatagatgtttaatcatggaagcgtgggcacagg

SEQ ID NO: 126298 - DNA, 1829 bp, Homo sapiens
attttagaaaaacttaaacctactttcatgtatatttataattttagaccatataaatataaaaatggataataagtgccttagctttacataccagctatttagtaaaaaccttctgttactttctatgggaaacagagattgaaggagagatcaagaaggggaaaaatcttatttttgacaattatcctatgattattacgttaaaactttatttcactggaatgcttggcagaaaggaatttttaagttaactgaggataaaccagaaaaccattttttcttgcatattatttctctaaaattttattctagtataaaattttatttacagtgtgaattttttttcttttggtcacatctttatcatttgagcattattttcattagataatttattcatctagattagaaggttatgggagcctttattaaaactttattgggcctgcttcctacagagatacagacacttacacctggaaaggagtcacagattatctcggttaatatgttttgcactgaagaaagtcatgttttaagatattaagggacttacagccattagaacaatacttggcacatggtgagtgcccaagaaattttagctgctgttagtagaatttgaatccaagtcatttgaatttcagtttggtgatttcttctcagaaatcttctacttaattccttttattgacccctggtcagactcactgagaatcttttttgtttgtttgtttttcctttaaatcctaattctggattcacttcattttccttatatcttatctcttttttccctaaaagtaaagaagacagaataaattcagtacttgtactttaaaacttttattgtcctcatcagggccagtctgaggatttctgccatgttttataaaatttatgcccagcataatcctgattttttactgccttctctgtgcaaatacacacctaaccttatgctaatggtggcactactgtttcttcatgacaaggctttaaaaatttctggaaactttaaaaacgtggaataaaaactgtgggtataatgggggtgggagcaggaaatttgaggggaaaccatagacacattatgccaaaggttttggcacttttcagaggactaaataactttcttcttctttttttgttttaaatagaagcaaaagagaaaaaaaggtatcaagcacagtttgctcatagaaatgagcaggtttggtagatatatttaaagatgtgaaagccaggaaaaattattaatatgctaataatttgtatttcctccattctccaaacacatacttttatcaagaggaggaggctaaaaataaaaatagaagctttagaaaagtaaggtttttcatgtttttttcttgtttgtttgttttttctctgtcagtcctcttacagtttttctgtagaggctaaaaagagatcctaagccaggaccagcacattcagtggcccatcttaaatgggattatttgaacaatttgagaactcttgggtcaagccaaaagagtgcagtagaaaatcaaagacttgggctgctgctggcttttctcctcattttctttgtcttcacgtgcagctcgataaagtgttggactttttcaaacacagaaacagccttaggggtgttaaatatgtgtgtcaaattttttcctaatggatttctaaatcttccaaaaacttttaaataacttgttaaaggctatatgtaacgcttgtatcgtgtgtgtgtgtgtgtgtgtgtgtgtgtgtgtatgtgttttcctgccactaagattgaattctgtcctctgtacctagaaaataatcattat

SEQ ID NO: 126299 - DNA, 1026 bp, Homo sapiens
tcttacctctgagagccttacaagacatagaggaatcttaaacaatcaaatgttaagtgagaaagctatttgtgcctcctaaaaggagaaaagaatattaacctgacgtggtattataatgtctcccagagtgagggagaaatgcaaggaacccatagtgattattgagtttatagatgtttctattcatgagcctgcaggaaaacgtagagaccaaacatttcagaaaatgaatgccctaggatgattcattagagcagaatgaaatattcagaaacttatgagtctataaaatatttttggagaaaatgtgtgagttttccagaggaacaagatttaatattttgttttaaaagactttattagttgtgagatgaatagaaatattggtaggtttcctttaatcttttgcatatcatttggcttctccaattagaatggcttggcaatcttatgatatttgagtacataatcctgctaggtaggtcaagagagtaaaaagtaaatttcgtagaaattatgccaagtggtaaacaacttcaggcctttttttccctgcagagtcccatggccaactgttctttccatagcaaacttttcttcaccataaacatagcatcatgccccgggggctttaaaataatgtttgctgctggcaggtgatgccaatgtctgtggctacctggagcaggatctatcatgtctcagtgatcccaggtggctttggtccaaagcactgtaactggacctttgattcacttcaaaagaaatgaacctttcttcatgccattgatcgccattgaaaagctccctcaaaggtccctcttagtaaatccttgacacctttcaggtcccagatcatggtttatctgctccagtaagcttttctctcttacttctctccttaaatctccatttccttaccatgaggccaccctgtggtttagtgctgatacagtgtactgtttgaatctgctgttgaattatttctcaagtattagacttggatgtagcctcatacctttt

SEQ ID NO: 126300 - DNA, 1098 bp, Homo sapiens
ttgcatttagagagtgaattaggactctgtaatgctttaagaattttaaaacattagttgtattctctagtggtaatgaaagttaacaataattaacacacagcagatgattaaagcaagcttacacatctggagagtggccacagtctgctatatgcctctaaacaccattttaattgacctacttttgatattatgaaaggctaataatgatttattctacccagttgaaaatactttttctagcagataattggaaacatctcagttggcccctctgttgatttagttagtgtgtgtgacagatggttaatatcttacgctaaatatctgccagccttgagccattttgttgttgttgttgactcacagtcactatgatgacttaaatagtgtatgaatcttgagaattgatagatctgtcagattatagaggaggagggagtcttatcaatgaggtagaccatgggttctcattgtaatagtgtagaatgttggttaactgtggactccctggctctgtctcaaatctactgattcataatttttgggtgtggggcttgggaatgtgttttaaacaagctctccaagggaatgtagttcctacttcaaatgaacaatggctgagtatagtttatggctttctttcatggatgaggaaacaggcccagaggggaaaaggtgactagtttcataagaatcacaactttgacttctggcactagaaggatagggttctttcctgaatgccacatgaccttaactcaggctagttccatccctaagtacagaactggaagagttttaaattagccctaatttttacatacaccaataccacatatgactttagtataatatttggctcagcttggctgtgtgtgtgcttattttttgaaagatacctatcaccactgtacctacatgttcagaataataataataaaaagtttacaggggattatagagaactcaattttaatgtgaagtacttatgctctacttactatgttttaatggcaaccattttccccctagaagtttcttgagcgactctgaattgtagccagaatacgtctttcctcttcagacccttag

SEQ ID NO: 126301 - DNA, 1055 bp, Homo sapiens
gatttgattttattttatgagaggtaaagagggggctgagtatattctcttatacatgcttacatcccaaatagagagtaagaatttcgaataagaacagtatgagttttgaaagtaaatagtctctatgttgataagaattgtggcatgcctgggtactgagtatcttttcagagatcctagagactgtccagaaactgttccagttcattgggtcaaaaatccactatttacgaaaagctaaatacggatttgcacgattgaccataatggcttcaattttgaaagatagtagtatcagagagcacttccagttggtgggataatttaagaatcgcccgtgctcaaatggctaaaatattgtactttttgctacttcatcactccattttaaaaatagagagggggagaaaagaaggcagacctgttgagaaggtggaagaatgtcagttggagagcaaatcaaaataaccatgtgaagccactccttagttaactactgcctgaaggttaactgttccttagaagcctgtcagggagtggagagactggactgggggctgctgtccctgtgtgtgcatgtgcacctgtgtgtttgtgtgtgcatgtgtgtgtgtgtatgtgcatgttcatgtgcatgcatgatgaagggtgaagagaacttgtgagtaggaaagaaggtgtagagaacagaaagctaacataaaatcctgaaacttagagtcctaggaaaatttgactattttaaactaactgtactgcttatttaaagataggaaaattataccattcttcttctggtataagagagagataaaaatacagtttttctaaattggaaaatttgctgtaatcttgctgctaatgactgatttcttccaacagttgcaaggcagtttttgctctgataggttgataaaggaaacaaaatcaagaacatattggaaattctcagagaaaattacagtttaggtatatgttgggggtggatacttagacattttaattgaaataaaacagttttatactaatatgggatcactgtgggtgtacat

SEQ ID NO: 126302 - DNA, 1738 bp, Homo sapiens
aggtcaattcacaggtggtcagtaaataccagtagtgaatcaatatctgtgaaccgttttttgcatggtgtataaggatactaatgcataacaaagttgctctattttgctgttaggcagtcacatcttagtctaaagtatctgcacttttattatagaacccaaaaacatgcctgaaggaagactgaaacatatatgatgctggataaaacagttatatttgaaattataatgtatttagtgtgtaacttcatggtcaatgctgtcatgtcttttagattctgtgcattattatttcagtccactatatgtaaaagtaaatgctaaatgtttataaatgttttcagtttgaattttatgttttggcagtgatatcttattttttccctcagtgtatgtttgtatatgcttctgttttccacaagctactgacttttgctttatgtttgttttatgttgcagattaatatcttttcaagaatttgttgcctttgaatctgtcctgtgtgcccctgatgctttgtttatggtagcctttcagctgtttgacaaagctggcaaaggagaagtaacttttggtaagaagcatgcttctgtgcacgtctgtgtaagtgtggacttgtgtgagcattttcttttttttttttctaggaacaaaataaagtgtatggaaattctttatagaagatagtatatcccttttagtaaagatacttcaatgttttggagctccagttcaaacatcttcctattcgaaaaaaacaagtttctggcttagtagttttgatactctgatttagttttaaggtgagggagatgtggcatgactgttttcatagagtcatagcatgtgagagccagacaggacttctgtttcttccctgcatcatcagtagtgctttccactgatagaacgaagaagtgaataatctgcctacacacagaagttacttatgcaccctatacttcttgtcttcacgttgttcccatggagtagtttgcggccagagctgctgcacaagatggtggttcagaatggtacatgaaggaccttgttctaaacaacccccgctcccccgacctgactgctgtgctggcagtgtctgctctcctgtggccttctttattttgcaaggcacaaacatcatcatgggaattagctacaaagctgcagaaaaccctgatgtttttcaaattcttagaagaaagggaaggcttggaagtggtgggacagtggtaagttattttttaaaaaactggctactaaggacagatttaacggaaagtaccatgtttcccttggactctgtggtgtccagcatatgttgtctctgcatgcaaatctgcagtagcattgctcatgaagaattttggagccctttaggcatgtggattgtgctttcatgagagatggctttaaagattagggagaatgtggcatgactgttttcatagcgtcatagaacgtgagacccagacaggacttctgcctgtcttgtgcttggcatgtgcccattttaagtgtctctattcatagtttctaattcattcagacctttgggacttgtcttatttgatgtattgtggaaaacatacagatatgggaaaaatacagatggtgtaacagtgttgcttccagaatcagataagcttagccccttccagctctgctgctgttgtctctgagccaaattagtgatcctctccagtcctcatttatcttatcaagaagtgaata

SEQ ID NO: 126303 - DNA, 1002 bp, Homo sapiens
gtgtatttgcaaggaatatgggcgggaaagagaagagctataaaagccaaaagctattaaaagatgttaaaaatcatggagaccaaagctttggataaatttggataaactggtgatcacaggagagtccagttccagatttttcttaacacccacatatacttgtgtggtctgatggttagaactgtgtttttggagttagattttactttcatctctgccattgaccctggacaattgcttggcttctgctgtaacacacagaagaggtataaggagaagttatttttgtgaagtactcttgtggttaggaaccttcagtaaaagtggtaattggattttgatggtacattgtctacaaccaaacttcctgaagtatgaacagaacaattcctatgtgctgttgcttaaactttcgtagccacagagttggcctggagataggagccaggcaggagatgaaagggatcacatggggtctaagcctctgctgagtgagaataagcgaggacagagaggaggagaagaactggaggttgtccgttagtgtgattctttcagatcctttgtttcttttttcaatttgtcttcctctccccaaatctcttatatagtcctcctgccactatctaagttgaggactttgctattttgtttcatatgaatttttatttttttcttactgtaagaacagtgcagtatgtatattattgaaaggattagaaaatatggacaagcagaaaaaaatcttaaatttctaacaatttaaccacctagagatgatatccactgccaacactttggtgtgccttcttcagactttgtgtgtatgcaaaatattattgtccatttttaagaaacaaataattttctacacatcattgtgtaaatgactttttacttactaccatggatttgtttataacactttttagtggttggatagtatcctgcatatcaatgttctgtattcagtccatcacatattgttgtatattgagg

SEQ ID NO: 126304 - DNA, 1301 bp, Homo sapiens
tttcctgctaactacttcccagcccccagactgaactcgtgattgaggttctatttacttttgcaaacagatgaatatttttggagcagtggaggtaggagcatggtacctaagtccaagttgcaccattttgtgtggctgtttctttcttattttgcattaggaaacaggtgcaagaaaaagaaaaaaaattccacttcatcatcgtagtagtatctggaatctcattccccataaccaagaagaactcatttattcttggccaccctctctcttttgttattctaagttgactgtggacagctttgatgctgcccctgaacttctatgagtccccctgcccttgctgccaggattttagaatctacccttctcctatactaggagtggtaagaaaataaattcgggtagtagtgccatttgatgattcattttctttttatatgtgtcctttaaaattaacattgacaatttggagcccctttgtaatgtggatgatagaggaaaagctgtgattgcttataggctgaatttaggttcatctgaaattatgatgtatctcagaaacatcataattccttggtttgggagtggtaataggattaggactgttgagactgtagaaaaagcacattgtttttcttagatgtggatgcttgtttggggtggtgtaggctgatggagagtatttgagacagcggctactctttcttttttttttttttttcccagctgctactctcaatgcagacattgctctagaacaccctgtataaactatatattgccacatctaaaccatatagtacttcattaaattttgaacatttaaaatattttaactatatgagacaactatgtggtgcatgtgttaattagcttgattgtgataatcatttttcaatgtatatgtatataaaaataacacattgtacactttaaatgtatacaatttttgtcaattatatgtcaataaagctgtaaaaaaattttagataatgcacaatggatcccatactttgtatttattcctatataccttgatttttaagcaccttattctttaagttcattttgttgccgaatttgagtgcattctccctagtccttattaaagagggtacaataatctttcatctgagatacaattgatggaattattttataggatcgagtacattttaaagcctaatctttctttgcttacattgaatattatgaccataatattatgaaatgttattctgaaacttggtctgagttctcttacgtcatcagaaatttctgcaaattcaatctga

SEQ ID NO: 126305 - DNA, 1843 bp, Homo sapiens
catttgtataatgtttgtctccagggaagacagacagacagacagacatgcgcacacacacatacagcacacacacacagttgcttttatctcttagtcgtgtgttttgaagataattctataaatatgtaaagaaatcttcctcattcctttttatggctgcatagtgtaagcatatacatttataattatttttccagtttattccaatatctgttaaagtttacagaccagtgcttttaaggtttacattatttggctcatcaggatcttttcccaaaccattttagggctgttgtcaaagagcaatggacaaaccctaatgatgagatgaactttactctcagaataccgtctcacttgctcctatgttctgcattccctgcaccaaacacttcctatgctgtctgcttccctgtccactcatacaggaaagggcttcgatgttatagagtcactcttattgctcctgctaactgctgtcctgataacaatgggtcttttgcatgggaaaagcattatagagtgaaaggatcactgatagcagtcaaaaaaacacattttactatgtcttttaaaatctgtgggatcttagacaagtgacctatcccatgtgagcctgttttctcatctgattaaatggggttgttacttgctcggtgaatgcttgtgttgtcacccagtgaaataaactccagggaagtttagttagctttcccttctcaatttacctgcagatactgtttcaacattcctctctcctctcattccttccctctcttattcctttcctcacctcctacttttcttccccaattcctggcatctttcctggtggcaaacagaccttccatgtgaagaaaaactcctcataattgcactttcctcttcagattctgccccatttctcttctttctgcaacactcatcaaaagcactgtctgttctggcccttacaattaattcctctgcccattgattcttttttgagatggagccttgctctgttagccaggctggagtgcagtggcatgatctcagctcactgcaacctccgcctcccgggttcaagcgattcttctgcctcagcctcctgggtagctggaataacaggagcatggcaccatgcccagataatttttgtatttttagtagagacagggtttcaccatgttgtccaggctggtctcaaactcctagcctcaagtgatccacccacctctgcctcccaaagtgctgggattacaggtgtgacccaccgtgcccagcctgcccattcattcttgaatccactctccccaagtttcctctgctgctctactatgctctaatctgcccttgttacgatcttcaaagcagaatccaatgataatattagttctcaggttaacacacttgcctcttacccctttttgcaatactcacttcacgttcattataccatgttcccttgcatccctcagacctcactggttctcacatctctagtttttcctaactactttttgggtgatcttgtcccatctcatggtgctaaatacttcataacttctacttttatgtcttcagccctctcctccctgctgcttctgtgagagtccatttgcgtacctaataggcccctcaaatgtcacatgtcctgacctaggctcctgagccttctctctccaagcattctttcctattgcttgctcagtagattctgtcttgcagttgctcaggccccaaactctagggacatccttgcttccttcttttctttcacacctcccttcaaatcttacatccagtctagttggcctcactatcagtatatgtatcgtcagtactccctctgcccaat

SEQ ID NO: 126306 - DNA, 1141 bp, Homo sapiens
tcccaaattaatctaccaaaacaaaaagcctcattaacagctctcattgaatcagtgttattttttcctttctctcaaggtgtctgattaaccccctttctttttgcattactcactttgtgttaatatttgatgtctgaaatcatggggcaggggaggggttgtgcaatgtggtggctagacactgtctacaagcagtaaattaaaaagaatttttaaaaaggtttgtattatgttgctgatgtattagaaaatctctaggaatgtcaggtgcctgggttttctttttctttttaatttcagaaagggttgattgctgattgggtgctgattttgcttctcattcatatgtacagatagcgctcctcctcctcttacccagctcctcttgcttaccaatccaagccttcttttggagagttttattgaaaaggaaaggtgagaaataaggccataactggagggaaaagggaggttgaaggagggtcttttctaggtgaatgccaatgggaaagactcacttgagagtagataagattgacaatgtaggagagaaaggaaagacattctggagcattgtctaggaggttggcctcttgtaagagcatggagagttcatccagaacacctgacctcaaagtgtagccagtggactcctggaagtccctgagaacttttcagaagtccaggaggtcaaaactatttgcacagtagtaaaagcatgatctacctttttcaccatgttgatatttgagctgaggtttctaaaagcaatagtgcgtaaaacttctggtgtcttaacagcaaataaggttttgtctgaacattgatgtccctccaaaattcatgttgaaacctaacctgcatggtgatagtgtgaagaggtagaactttggggaggtgattaggtcatgagggctctgctctcacagataggattagtacctttgtgaaggaggcttgagggaatctgtttgccccttctgccatgtgaggatggagcaagaaggcaccatctatgaaggagaaagcttttaccagacaccagacctgctgctgccttgatcttggacttcccaactcctagaactgtgagcagtaaattctgttacttataaattaccaagtactaggatatttt

SEQ ID NO: 126307 - DNA, 1641 bp, Homo sapiens
actgctatgaaagagagagatggtgtgagtaacaccaaataagggcttcatttggactgggaaattgggaagactttccatgagtgacatctgagttgcaggagttggaggtgggagtacagaggacagagagttgcaggcagagggaacagcagttgtaaaggtcctgtgttttgaaatgcagaggctggcttgcctggagcatggaagtgcagggcatggtggtgggagaggtgggctgtgcccagactgtgtagggacttgtacctcatattaaggattggggttctttatcttgagagtgctggagagccatcaaaggctaatttgaatgaggggattggcacgatttgcctgtgtaacagcatacttgctgttaatactctttgttgtgtttagacctccctgcattccactgttttaatctacttaatgatggatttaatcaatttatgaagttccgtaagggagatgagaggagactttgagtgtctagggctggaagccttttgtttttggtgggccttaatgaatgaagagggcttgtcccagcatttgaggaggaggtgggactctaaggacttctcagggcctagaccttactgtaccacgtaactgaactgtaccttttagatttggttgtgattattattttttcattcaaaatgagaataaagctttgtatatcttctaagtataatttttatacattgttcatacaacttacctgttaagagcaaggtgaaaattcttcctttgatctttgcacacgttctatttgttgttgttactgactgttatctcgttaaagggagtcaaggctaaagaactgtcttcacttgtgactgaccttctcacctgggaagaccacatgggactagaataagctggaggtgttgagtgcctgacttactgagggttacgggtaccaagcactgtctgtgaggtgggcaccgggtggctcagggatccagttggcttgctagggtcacaaaggaatttaccacacatatgtctttcatctccagtgtggaacctctttgcactccatgtgcaaacagaagttggcacttcttttggaaaagggaatgttagatatctcagtttgctagtgatgaagctgacagattcaccataccgccttgtcagccccctgccactttgttgtaccaaaatgacagcaatataatcaaacccttaatttttttttttttttttgagacagagtctcaggctggagcacagtgggatgatctcagctcactgcaacctcccttactgggctcaagcaattctcctgcttcagcctccccagtagctgcgattataggcatgcaccaccacacccggctaatttttgtatttttagtaaagacggggtctccccatgttggtcaggcttgtctggaattcctgacctcaagtgatccacctgcctcagccctcccaaagtgctggaattacagacgtgagccactatgcccggcctcagataattcctttctgttcagagtaaagagattgagtcctgggacagttcctgttttgatgcatgaagaataaaggcatcaaagaagaaaagatgaaaaagaaatctaaagtttagaaatatgtggcctatataaataaagcatgttctct

SEQ ID NO: 126308 - DNA, 1415 bp, Homo sapiens
cccacactttgggctggagaactgtctgttgcagggagtcatcctgtgtattgttggatgtctagcaacatccctggcctctacctgctggagccagtagcacccttcctcacatgttatgacaatcttaattgccatcagatattgccaagtgtccctgtgggaaaacattgctcccagttaagtttataaacataaaacttgacttgttttttctttgaactgttgggagataatggtcattatgaagcgtacatgatcatatctgatattttatcgtttggatattttcaactttttcacatatcactctcatgattatatactgttgaaaatcaaatatataaaatactgtttttcttttttttaaacagtatgcaagcattgagaaaaacggtgaatttttcatgtcccccaatgactttgtcactcgatacttgaacatttttggagaaagccagcctaatccaaagactgtggaacttttaagtggagtggtggatcagaccaaagatgggtatgtttatttttaattattttatttaattctttttgtttgaaacagctttcttttgctctaatgaccaggaagtcattaaatgtataccttcccatctcttaggaccattttctgtacttactactattattattacattatttgagtaataatgtagttccttcaatcattgtttcaagttggggattcaatatgtatatatttgactcttttaaagaatgctttatcgtatcagagaactattattgtcaacaaggtggtgatgtgcagatgtatgagagtatttatatgcctttggtatttttcaaggcagctgtaaaattgtgagtaaatgtacaacatagctctatgaacgttacttttctataatctttctttctgagcaaatcgcctttaaaaattcacaggtgattccaaagccccaagaaaggcactctgcaaaagctagaggaaagaaactgtaccatatagaatcaaataggacacgttgcagaatgcctttggattctttttttccctaccagtcttctctgcttccattttgttggaacttttttccctccttcttttgaggcaggttctcactctgttgctcgggctggagtacagtggcatgatcttggctcagtgcaacttctgtctcccaggtacaagctatcctctcacctcagcctcctgagtagctggtatcaaagccgtgcgccaccatgcccagctaatttttgtatttttttgtagagacgggattttgccgtattgcccaggctggtctcaaactcctgggctcaagccatccgcttgcctctacctcccaaagtgttgggattacaggtgtaagccactttatctggccttctgcttacattttaaaaatgggttttccttaagctgtata

SEQ ID NO: 126309 - DNA, 1046 bp, Homo sapiens
ttagatcacacacaaagataaagtactaatgtactaaaacttaaaggtaaaagataaacctactttaaaaaaactcagataaactctctgatatttagtcttgaaatgaagaaagactggtgatatggcttggctgtgtccccacccaaatttcaccttaaattgtaataatccccacatttaaagggtggagccaggtggagatcattgagtcatgggggtggtttccctcatactgttctcgtagtagtgaataagtctcatgagatctgatggttttataaatgggagttcccctgcacaagctctcttgcctaccgccatgttaagatgtgactttgctcctcattcgccttccaccatgattgtgaggcctcccagccatgtggaactgtgagtccattaaacctctttttatttataaattacccagtcgcaggtatgtctttattagcagtgtaagaacagactaatacagctagtgtctaagcttagaaaagtaatggaagaaatttcaaaggagaaaaaaattctatacactcaattatataaaaatatcaaactggaaaaatatttgcaacaaatataatagaccaaagtgagtaaagggcatgttcacacactgttggtgggagtgtaaattggtacaatcttttccggagagcagtgtgataataagtaccaagagcccagaagttcctctcctttgactcaacaatttctcttctgggagcctagcctttgaaaattgccaggaatttggacaaatgttatattcaaagcttactaccttagctttatttaaaaatacaaaaaactggaaatgtctactggtaggagaaaagttaaattgtatagtaaaataaattattcactatcaggggcaaacttaggtataattactaagtcataagattgctgtaattagcagtgatatttcctttatattttcatcttgttttggctcagttaggaaaatcaaaatataattctttacatgtccaaaaagccgaattaaatgctaactgaagaatagtaggatcact

SEQ ID NO: 126310 - DNA, 1098 bp, Homo sapiens
tcttagcaagagtcttgcccttaacttgttgtttacaacagtgccaacagcatgctgggggcattgtagactcctctacttttgccatggtaacacttgtaaagcattcctttttgaacagtactcattcccttaatgtctacaatatcacctttcttatagatttgcatatatgtggccaaaggaacaactctatgttttctaaaaggcctacagaacatatattgagtgcctctcctctttccctttgtgttcatcccattttggtgaattactggaagatggtggttccagctgaaaggaaccctactacaatatttttaatgctgcataatattcctacatatggctgtttctgttttgccctaacttattgaagcactatttaattattgaatatttagttgtttcctgtgctttactatcatgacagcactgtaatgatagtattgtacctacatttttgcatatagctagcattattttcttaggataaattcctagaagtggcaccattgggttagaatgggtttagaacatattaaggcttgtgattccccttggtagactgcctctcatgaaggttatttcaatatttattttgggtgggaacacggaagtgttcatttcctacattatatcaactcagattattatgagtttttgttgcagcagcaacaaaaaagactttatgccaatctgttggttgaaaaattgtatcttatttaaaattttcatttttaaataaatagagcaatatgtttattggccatttatgtttcttaaatatgtttttaactttattgtgacaattttcagacatacagaaaatagaatagtaaacacccacataaccaccatctgatttaaagtaatacttgtcatgttagtttatacatttttttctgatttatgttaataaatataacttagctatcactataattcaccctaaataatttagcatagagcttcaaataataaaaacaatctcctacacagtcataataccattgtgcacctaataaagttaatgataattccctaatataaaatacccaatccagatgcaaatccttaaattatattttgttccat

SEQ ID NO: 126311 - DNA, 1015 bp, Homo sapiens
caaaagagatgatgtgtactattgtattagtctgttctgttctcatgctgctaataaaggcatacctgagactgggtaatttatcaggcaaagaggtttaattgactcacagttccacatggctagagaggcctcacaatcatggtggaaggcgaatgagaaacaaattctcgtcttatattgtgacaggcaagagagcttgtgcaggggaactcccatttataaaaccattggatcttctgaaacttatggggagaccgcacccatgattcagttatctccacctggccccgccctggacacatggggattattacaattcaaggtgagatttgggcggggacacagccaaaccatgtcaactgtttagaagtatatagtctcaagtaactaaatctctgtagcgaaagatgggaaaattggggaaaagggctgaatgagaaacagaagacatattacagagtaacatagtgaattacacttggatttttataattgttttgtcagcaaaagcatgatatccacttttaaaatgtctgtaggcaaattttgaaaaacagttaattctgtttttggaaactttttatcacatcaattttatatgcattgaaaatttaaaaggcagatacataaacaaaagtaacttgtgatctttgtgtaggaagatagatatttatatatttatttatctctcagtctatgtgtctctctgtatgtatataattttttttccccttaggagaaaaaaatactgttttctatctagttttttcccttacctgctatgttacaaatactttttcctataattcagtgtgcttctatattttttttatttttgtaaattattttgtttcttccatgatgatttagaggaactacttttaaaccagtacaaatatgtcataaataatatctggccatcttctaaccagttgagtaatttcttgcgcagtaagttacctcacatcttttggtaagcaatacgttaaatttgattagtaaagacattata

SEQ ID NO: 126312 - DNA, 1116 bp, Homo sapiens
agcctggccaacatggtgaaaccccatctttactgaaagtaccaaaactagccaggtgtggtggcacgtgcctgtaatcctggctattcaggaggctgaggtgggagaatcgcttgaacctgggaggcggaggttgcagtgagctgagatcgtgccactgcactccagcctgggcgacagagcaagactgtctcaagaaaaaaaaaaaaaaagaaaatcccaacatgtcttaagaggggagagccttacaaatacgtctgctttttaaaatgtaggtgactgtgatgacaacatggcttatattttaatttcttttatctcatgtggtgtaaggtatgtgaataaaagcggttgctggagtattcagttttgcaacccatttacctttccaggattgacccgtatagctttttctcctaggaagtttaaagctcattgtaaacatctcagtaatccttcactcatccatgggactatactgtctctccctggtagaagcctattgttgtggtcatcatcattatcatcactttatgatgactgcggtatcctgagaggaggctccagtatggataatactagatactagagcacaacagacaccatggaagtttgtgtcttatactggcatcttatatttccacctattttgtgatagtgggcagtgaatgattaatagaataaaagtctgtctcaggttccagacaccgaaacacctttatgttattcagctgaaattaaagtactcagaaaagaaaaggccacttttgtaagataatatacacacatataatatatatgtatatatacacacacatatatgatatattattaataacatatattaatatacacatattttatatatatatgtttttctaaacattatgaaaaggcagctgagttgtatggaaagaggaccagggtgtcaaatgagaaatttgatgtgtactgaatatggtgtagaaaggtattaaatctatgaacctctctttcctcatcacaatgtgttactattaaaactaattgagacatcaaggactttgaacatggacaggatatttgatattaaggagttggtattaatcgatgtttaggctgataatattctcatta

SEQ ID NO: 126313 - DNA, 1098 bp, Homo sapiens
gtttgaaaaccagttacttgatttaaaattcttgatataaaatttttgttttaatgttggaatccattcttacaaatgcaaattcagaagaagaatcataaagaaaatcaggcagttataacaatagtagctgtaaatatttgcatgctattaatatatgagaaaaaaatgtaacagtgaaagtaagccttctggaaacaatctaaagtttgatgactcttctaaaccccaagaatgaacgaagtctaataattccaggcttctaaagcccaagaatgaactaagtctaataatcccaagcttatgtgatgcaaagtatgcatgctggacagctgttctgaattgactttaaaagggtggctacatttctgtggcttcctttttccagctcatagaacttcctgggtattggttttgccaccaggtagaattcattgaaatacacctttaaaaaactggtacatctcatggtaactttgcattgtcttcaattaagttgtgtaagtgttcttcattcatagcaaatgacacttaaaacaagaagataggaatgggaggtagcagtataaatggaaattccgaacagccacacagcatttgactggtgaataatagatggaattactatagagatgaggcccaggaggctggtagtaatttttctgaatccatcccctgttgaaccatacttatctatccttaaatagaatgtaccaggacctgagccaaattttagtgggcctcagagaaatcttgtggtgatcattaaccatttgctgtacctggaactctgggttgggggtagggtagctgagacaattatcagttaggatggccacaatgtttatttagtggtttggtgagtgtgtttgaagacccatgagtttctcttctcttttgctaatttatcccttctaaattatgagccagtttacccatcatttagatttcttaaggagtaaacatggtagaacataaacatctttggataaataatacaaatagtaatagataccatttattgagcactttaactgtgtggcccttttggtgctaagcactttgtgtaattatctcatattacttttctagctgtct

SEQ ID NO: 126314 - DNA, 1032 bp, Homo sapiens
gtcacataatggctgaaatcatagatttgcaatcaaattagggctctgccacttgctaactgtgtgacttggggaagttactcaacctctctgtgcctcagtttcctcatctgtaaaatggacataacggtgtctactcctcagggctgttgagagtgtcagtaagctaatgtttgcaaagcattagagtcatgtcaaaagctgtgggctgtggaatagggcccaggagggctcactcaagtgagatggtgtgtcgtctttgagatgagcctccagctgtgcagagagcccctttccttttcctttttgcttccttctggttcttgacgtgcttcagttagatgaggttgatagcaggaatttggacaggtaaggcatatttaatggaagcaacttctttattgtcctttcatttttggcttcctcttcctctgtatttattaaattagcttttctctctcagaagtgtttaactttttatggcattatctgggcttcagcaacttgtgatctcctaagtagagcttttcagcactttataaatacgtcatatactttttatattcctttgttccccatcaggaacatagccccagtcttcagaatagcacaatcagtttttattcatttaaggagcagtagtaatttgacacttgctaatatgtaacaaattatattgggcgtggtaattacaattgcagctggttcctaattatactgtaaccttgatgcttacaaaaattgagactgaattcagcataaaatactggagaataatattctgcactaggcatttctgccttctactgagccatgggcatttatgaatcataatgccaaattaaaaagaatttattttaaattggttacaattacaatgttgtccagtgtctccattcttaaaggtagctttaaagtccccctttttgcttgctaaactctgggaatatccttcaggtattataattagtgtctaaataacctgagctcaggggtcatttctggctgtgtgatctactggtattcatttaa

SEQ ID NO: 126315 - DNA, 1003 bp, Homo sapiens
tggtccaaattcccatgaatgcctttgcttttggcactgctctaggccagtgattccctacatactgaagtcttctggactggtataaaaaactgctgatgcctgggtctccctccagagatcatgattgaattggacttgggtgtggcctgagcctcaggatttttgaaagcttgacaaccactgttattttggtgcacattgcttcaagagacctgctggctccttcttggagtaagaatggaatgcagtgagattaagttaaagtccctggtgtgtcagttcaaaggaggggtatgtaggggtttctccaaatttctcttctttcttgacagctttgtcttagtcctgcctggtgtctccagggtgcttaggcatcaagtttatacagttttgtgataatcctggaatagaggttttaatcccaaacttgactgaaagctccatttgtctcctgcagagtctcagtggttttttgtgatcagagaaggtgctggaggagggaagcattacaaagagcaaacctggtctcagagccctctcctgggctaacctcatccagggccatgtggtgccagtgttccctggcttaggtcatatggcttcacagcaaatagagggttggaaaggtgtggggagagttgaaaggtgatatgtagcgtaaaaaagtcagggagcaggtcttttttggatattgagttcttttagaagattgtccgaggagctctgactcctctgtgctttggtctcttagacctttagtcccatgaccagtctctgcttttgatgaattcttagagggaaccattcctccctttgttctccactatgtgtgaggattatctattatggcattcctgctgagcgcttcctcctctctggttggcatttgctgcctcataaacacctacagatttcctcataagactctgtgggtttgccttagggtggaccttgcaacagaggaatgtgtgacgctgagacatgtgttggttctgcttgg

SEQ ID NO: 126316 - DNA, 2228 bp, Homo sapiens
tttatcggttgattctgttggcagcctgagttaaaggctgtgctccttgctttttccctggagcatagctattccatgttgccagctgaacacagagccataggggtagggttggcattccctcttaaaagttgaggagcctggataggagaggacttcacctcaatggactgttaggaaattgggctgagactctggggactcagcaactgtgagaattccaacactcactacactcactgtgacaaattgtttgaatatttaagcagatttggtattttctggatagatgtagccacaactagcaattagttttctgatctgtttctttctttggtctttatacttatttaaatacagctaattattcatgaccttcctttaaatagttttaatggggagatggagaatctagtctttggctgctttttattttgaattttgctatgaagattactagttaatggttcaagaagtgtttgttttctttcgtgaatgaacattaatctaaaactcttagtattctgagattatctcaaaaagtgtccattctcttgctgcctacgtttgtaggaataatccttgtgggttcccttgttagatctgcctgtactgtttgcgttgtttgaatatttcttttaaacatttcccaaaactgccataaaaaaacagttttaaaaggtggtaattgagaggtcacccttttcttcgtctctgcccttttcttggttaaaggagagctttcttcttcgtcattggttaaatttatgcgttacgaatgatgtaattaacctatatgaacctactaaaagttagaatatgctcccttgagttcagacctgtgagatgttctggggtaaaactgaacacagaccaatattagcctagaaccaaaagaaggaaatttgggggcacattaaagcattaataataaagacaatttggtctgtaggactagtacactttgtattgacttttcattcttggatgagttgttgctgtgatcattgattcatttatgtgtattgtgttctttccagtgttgcaaatgggacaaaattgagaatactaaaatgaattgttagctgggcatggtggcacgcatctgtggtcccggctacttgggaggctaaggcaggaggatcacttgagcccagaaggcagaggttgcagtgagctgagatagcaccactgtactccagcttgggttacagaacgagatcctgtctcaaaaaaaaataaaataaagtaaaataaaataataaaataaaataaaatagaataaaataaataaaatgaattggactccattttgatgttcaagaaaaccaaaaccattccagggggctaagttctctgatggaaatgctcccactacaaggtttgtgggagcagtaggagaagagcccatttctgaggagatgagggaagtcttctgaaaattgctagtatttcagaaggaatggatggggaagagtaaagatccaatccagtggttggaaacaaatgaagggctgggaggtgagagcacaggctacatttagttaacagcaggtaataaaaactaaaagcagctgacacttactgagcgcttactagataccaaattcagttccaaatgtgtttcattgttgattcatttaaaattcagttccaactgtgtttcgttgttgattcatttaatgcctcagccttttgagttagttactatcatcctttttttatagatgaaggctctgagataccaagaggtgatgttagtggcctaagatctgataagtatggctgggtacggtggctcacacctataatcccagcaccttgggaggccgaggcaggtgaatcacctcaggtcaggaatttgagaccagcctggccagtctggcccatctctactaaaaataggaaacaattagccgggcatagtggtgcattcttgtaatctcagctgctcgggaggctgaggtaggggaatttgcttcaacctgggaggcggaggttgcagtgagctgacgtcgtgccattgcactccagcctgggtgacagagcaagactctgtctcaaaaaaataaaataaaataaaaaagatcggataattaggaaattatcgagctggggttcaaatcctgccagtctggctccagcagctgtggcctcactctgtccaccatgtgtgcctggtagtttagtgtggtggagaataaagtatatgggagaggtgtgggaga

SEQ ID NO: 126317 - DNA, 1504 bp, Homo sapiens
gccaggaacgcacgctgcctggccgtatcgccgcccccaccgccgccgccgccgggactagaagtgagccgcccgggtcccaaacgccagccagccagtcagtgggtcccgcagtcgcccgcaaccggggcgaatcatggcggccgccaaggtaaccgcgggcccgaggccggggggagcgcgcctgccggatcagcctgggggtgcgagaggctcgggcgctcacgtgtctgggttggtgccacaggcggagcaaaatggggtgccgggcagccgttccaccttgcggctgctggagggagggggccactcctcccgggcagcacaggcggtcggtgcagagaccgaggcccgacctcgcagcggaaactttgtgggccggacactcccacttggccggggagggaagttggtgcctgacggggctgagccagggccgacgaggaggagcgggcgcgactggggcctggtgcaccctgggccggcaagcgctgggggtcctctctaccttcccagcgcgctcctgctcctgaccccgctggttgttgactccggcttcttccaggggccagagcccgggctgaagcctgatcctattacgtttcaagggctccgccctcccgcgggtggggaagttactttgacttccgttttggaaactgcctaggagacttggtctgcgcctttgtgaataaaaagtccagggactctccccctccccgctttcccatcattcccatcttccccctccctctctccatctgacaacacttagatacccgcctcggagcatttgagaggcttctttttgggaacgatgaaacagattgtcctgggagcctgtcactcctgtgaagttgtacttgaaaggggttctgtgtaatgtgaatcattcactaacccagaggaaaggcaactccaacacttgacctttcctctttcaccatttcttgaaacctggacaccatttcagtctctttggactgcatttcaacttctctggcagaataccatatttagtcccaatcacttgaatcatttggaatttattgcttttaatttaagttcacgaaggcagccctctaatcaagcctatacaacttcttagctcattttaagtgcagtgaacttaaatatacctaacatttcaaacatttgtccttaatcaaaactctgtgataaccctcaagaggaaaacatggccaacacatcatattcctatttattcaagcaaactaatcacatttgcaatggaaattgtaagcagacaaatatatttaaatgctgttctatgacttaagtctctccaggctccccaaatccgtaggcttcttcatgttgttagtttctgtggtctaagtggcatttctcttttctgtaattactctgagtttcatccttaggaaagtactctgggtgtgtgggctcatgtatgtttgcatatgaacacacaggtgtgcgtgtgtatatctatctataacttttcagcagtttctctgagcat

SEQ ID NO: 126318 - DNA, 1033 bp, Homo sapiens
ttattctttctgcatatacaacagtaatatagtaatacctgttatgatcattgtaaaatccctaaaggtttgatagtgatgtgtactttgcctgaggttaatgagtctcaaaacttatgtttaaatatttattaggaacagaacattcatatagcatttggaaagtatttgaaggatagcagtaagtccctcacatttcttccacaaatagacttataagaaaattaaggaagataaaatacaagttaaataatgggaaaaacaaaattttatagtattatattgactcatatccaattttcttatgtttttttttcagagacaaaagtaaaactattcagtggtattgtaaattgatgtctcaggcatagctcatttatttgtttatttattgtattgtttctaaaagaatgtttattataaagaatacctagtgatgttctttctgttttatcttagagctgaactagagaaacatggttataagatggagacttcatagcatccagaagaagtgttgaagtaacctaaacttgacctgcttaatacattctagggcagagaacccaggatgggacactaaaaaaatgtgtttatttcattatctgcttggatttatttgtgtttttgtaacacaaaaaataaatgttttgatataatcttggtttggttcagaagtcttaatcttttgcttctaatcaattttcttgtcatgattttccaaaaccttattatatatagatagtaaaatttcatattatgaaattttcttttttttttttaatgttaactgagtgaggctcaggttaaatgatctggagtagatttcacctgattcccaattcagtacttttcttaaaccacatcaattaattgttacttctattttataaggaatttcttttacatcacattgaaccttaatctcttctgtattttgatagcttaggcaacatttgctgacatttataaggtgacctttcaaaacctgtgttttaaaaatattaatcattttaaattgctgtaatttact

SEQ ID NO: 126319 - DNA, 1088 bp, Homo sapiens
tatgtttattcttcctttaaaaatataaattttgtatcagttgtattaggcagatactagtggtggcttacagtttggtctacttttaaatatttgtatataagttatccttacgttttgcagttttgaatttcacactggtatcttcctgccattcaacttgctttagggttgttggtgttgtgttttgaaagattgtgaagtcgaccttctaaaaatgagttcaaagaaaaatcagtaaagtaaatatcctcctgaaattgtaagtttcttggcaagtagaattttttgtattaacttctgttttaggttatctgcaaactcaagaattgagagaactagacagcataagctcagatttaaggaagataccatttttcatagatatggttttagctgtttttgaattgtgagtgttcagtagcaagcttttcaaagtttttgtaattgtggaaataatgtatgagaaatatttagacagcatctgtttctatttttagactgggctggcttagatgaagatgaagatgcacatgtctgggaggataattgggatgatgacaatgtagaggatgacttctctaatcagttacggtaagttttaagccagatttttattgtagttcagtattaattataagcatggaatatgtaatttacatagatgattaacctcttaaaagctacttaatctttgaaataggtttttgaactgtgtaaagtaagacatattgtcttcatctcctgtgattctaaacatgaacactttgtgtaattgcatacaacttttattctttctggtctttttacaaaggtagtaaaatagaagcatatttgctatttcttatccttaggaatttaattctgtcaatgttaattttctaccaatatcaaataactcagcagaaattagaatcatagagtgctgggacctaatagattggtgattctcaaactggaatggagattggggttgtgagaatgtactgtgtcatattcatgtataaatctacctgatttcatttatttattgaggtaaaattcatgtaacataaaattaagcatttgaaagtgtacagttcagtggc

SEQ ID NO: 126320 - DNA, 1030 bp, Homo sapiens
tttgttccattactggggatgttcacttcaatcactattaaggtggtgtttgttaggcctttccattgttaggttactaattttcccttcctaataggcagttttgggggagggactttgaaactatgtaaatacagtattccagtgatcatcaaacttgtaacttgttcatcttttaaaaaatgtatagcagtgtggactagtggattctgactcagtaggttataatttgtaactattatttggattctcagattgtcccatatttgaacatgcagaactccttcaggctgtcttctgtgtccttttgccatgtctccattattctttgtgcatttcctagcattctggcacaaggtgtattccaaactaattttatatgtgaaatcagccgttgctccaatgtgatttctttttagtggagaatggtatttagaatgcagggtcttcactttgcttatgtttattgcatttgggatattcctgctcccagaccctctaagtggaaggaactagggatgtacaggagtgtgtgtgtgtgtgtatgtataaaaccatgggttcacacagatgtctccaattgcagttcaacaccactggattcattctagttttttccctttctacatttgttattcccttctccaatagtgagaaacctggcttccattatcttcaatgtattgtctatttggtcatcccccttcctaaccaatctttgctgcccccaacaggtgcccttcttgcccaacttgggctccacattttatgccaggccaccctcccatcctctagtgtgggtgacttcgttctgtccaggctctgacacaccagccacaccatgctgcccctctccaggaatgccctccttgctctacttgggcttagacacctcatcttagacctggcatatcttaaattttgacagatactctcaaattgcctttgagaagggttatgccaatttatgttttcatctacagttcaccttttccctcataagcttgctacactagatagtaaacatgtt

SEQ ID NO: 126321 - DNA, 1057 bp, Homo sapiens
tcaaatagcattcttcattatcatatacagggtggaatgttaggcactttatttgcattacataatctaattatcactatcaccttgagaatatggaggcttagagacaaaaagaaaaacaaacaaacaaaacttgccattatgtccaagccaggatctgaaaggtctaactccctgatccaaactttatctgtaacatttagcaaagtgcctgatacatagtaggtggtcaataaatgcatgttgaatgaatgatgaatgaacccgcatttaaaatgagtagttagttgataattgactgcttaaaaacgatctagagataactatgtacctgatggtacacttgatttttttcagcaactttcatcagcttttgcgagtgtagtttgtgcttgttctaagtttatatgtgagcagcaatttttcaaagtgtcagtagttatatagtaaaacaaaacaaaaaggtaaaaggaaaagcaaaaaaaaattattctttctaaggacaaaagactcacaacagacttgtttattaacattaagtaattgaccatttatgggtctccttacagaatgtttgttgtcttcaggtataaatgtgtagaattaattcattcaggaaactttccattttagagtgagaaacatttttaatgcctttattttgttcaagtttctcttctctggtttatgatttggagaggtttttcttaatttgaatttgtgagaaaatcatcccacaaggtgaaaccactcaatatttactcatgaaagttgttctgatgagtaacaaaagcaaaagaaaaacacttcagaaaatatcaccaaagaattatttcttttctgagaatctacatttccgacatgttttggtctagtcaaggtttagagtctgttactattcaaaatgtgatccatgaaacagcagacttggcattgcctgggagcctgttaaaattgcagcatctcatcattcctcaaacctagacctacttaatcagtgtgggctttaccaggattcctaagagagatgtttgaaaaaacattaaagtttgaaaag

SEQ ID NO: 126322 - DNA, 1053 bp, Homo sapiens
actggcttaaggactggaggtaataacgtatgtgaagggctgatgaatgtttgcagtcacactgtagtctctctagagttccttcctcggttgcaaactaagggtttttttgtttgtttgttttacacattatgagtctcttatagtcaggaaaactacacggatctcaactttggcaatacagagagtccgaataacaaggtagagaccaaaaaaaaaaaaaaaaaaaaatcacctctacaactcggaaaaagcgctaaccccgcaggaagcgctgggccgacctccagtatcccagcattcctcgcgctgctcccgtattctttccccaagtctctatggtagcgtcagcgtcggaggcggtagtgacggtggcgtttccttgaggaagagtgagggttccaacttttctgcttatctgggaggtgttgggcgcggacagtcgagatgtcagagaaaaagcagccggtagacttaggtctgttagaggaagacgacgagtttgaagagttccctgccgaaggtaaccgctgggccccggtttctgtgtcgcgcgaacggtgactcaggcctccgtgtggaggtagcttgggtgctcgggcccagctgggggcaccggcgggaagtttggactcccagggccggcactcgaggcgctaacgctcacccctcagtggcgccccagattcgggtttggggtgttgcgctgggactcactggtgaggcccaatggcttcggcttcctcactgggaggagccaccgtgagtctggacccatagccccgcgtctgtgatggttggtccatttactgttcacctgggttactcaccacttaaacttagttcaagtctacataacctccttttctttttgttttagcagtctttctttgtctttaaacctttccagaattgaattgtcagtagttacgccaatgctgcttaacttttaggatgttacaaatgaagcctcattaagtaggataggagggtaagatacggggtgcttaatacacattattgcctcattcctgttcctcaccattttgatca

SEQ ID NO: 126323 - DNA, 1116 bp, Homo sapiens
tcttgttcagatattcccaatgtattcaataaagaaaatggtttagaacctctggtccaacaaataaatttaaaatgggaataaagaggggccaataatcctggtttcttataagacctctgcctggtatcactctgcaccctccatctagattcttccatggtcagcagggaaaacagaatcatccatctacaacacataatgcaactctccctgtgcttcaaaatgtaccaaatagcagggacagctccaggaggcagacagtagatcaaggaattgtctgtcaagatggaataaacactaggaattgttaatgctaatggtagcaatttttcctagagttacccagaattagaatccaaagatttatgagcagcttggtaataacaatatattgatcgatctttcttttttgccatcatatatacctatgtcttccccttctcgacaaaacagccctaccccaaatttagttaactcagttgtcccttctggcttttattccactgcatttttattggaatgcagcctcatttctaaactctaactggtgcacttacatcactttcatttctactttgcctacaacctccttattttctgcaaactagtttcctttcctcctcctttcccacaccttcaccttcacatatacgggcagtcttaagcccacagtactgaaacactcaaaggtcactaaagattcctctgtgatagaatctaatggcaagtatgtcatcctcttttacacttatctatctgtaatatttgatactattgaccacacactgtacttctggaaaagataactgccatttagtaagagttcactatagttaatattgcgtcatgcacaatattaagcactttacatgcattaatctttgtatttttcaaatgcccacctaaagtaaggaccattattatctccatttaaaaaataaagtagtggggtcgagagaggttaagtaattgctcaaggttcccaagtagtagaggaagattcaatcctaggtcctactgactctaagcccatgctctgcttaccacattgataccacttctcacaatgtgcttttacccctttacatttataaccccattttcctctggatc

SEQ ID NO: 126324 - DNA, 1101 bp, Homo sapiens
aggctaaaacaaaggcaccactcaaaagtaggcatgacagtgtaaaaaagccaattagggaagggtgtatatatgtaaaataggtgaagggtgaggatcaatcagaggaaagagcaccagacaggaagagaggttctcaatctggcctgtagatgtatctgagactcatagcttgacttttaggctttaaactgcctttggtttgaaattgaggtttcactgtggacctgcccctatctgcctaggcatttgtctgcctcctgctgctatcagtgtggggtaggaagtaggttgacaggaaggagacaagaattccaggtaagagtgctctgaaaacaaattttgtaattttgttattcttaattaagtctttcttctttcttatcctctgtatgctgttagttgccaaatcctgttgactgttttcttttacggtatcagaactctgacctattctctccattccaattgtcagtacctctggatgtttgtagttatttcatgaataatcttgcctttagtctcttttaactgtcaccttataaaatacaactttgatcattttattacccttgtcaaaacccatcagtgttttcccattgacctctctttaacgtgacattaaaaactgtgcaaaatctggcccgaatatatttttcctacctttatctcaatgttctttgtcatgaattctatgttctagtcacttaactgagcattgctctctgaaagtggcctcaagttgttttgactctgactgttcatttggcttaatgttttactgtctttgtctgcatggccaaaccctaaagtgtctttcaaaacaaccttcatatggtgctgtcaattcttaattgattaattcttcaaatggtaagaaatctctatgtcttaaatttccctcaagttgtatttttctcttttggtagtattttttttttttttttttttgagatggagtctcgctctgtcacccaggctagagggcagtggcgtgatcttggctcactgcaagctccgcctcccgggttcacaccattctcctgcctcagcctcctgagtagctgggactacatgttgcaggaagtcagggaccccgaa

SEQ ID NO: 126325 - DNA, 1031 bp, Homo sapiens
atgaaatgatcaatgaattgtatcttcacaactatatttatatctccttaaccaaatgcttctgcatttactgatgaggaaaaataggtgactcagaattagaattcaagtcctctaatgttaaatattatttaaactttacatctataaccttcattctttatctttttaggtgtatgcaacagcgttattgcaacaggctaacgaaaacagacaaaattcaactggaaaagcatgttttggcaccttcctcccagaagaaaaacttaatgactttcgtgatgaacaaattggacagttgcaggagctgatgcaagaagccacaaaacccaataggcaatttagtatttctgagtctatgaaaccaaaattttagtctatacaacaaagcttaataagacatgcaaaaatttagaacccctactttaactgtcattggtttttgaaatatatttaagctttgaaaacacctgttattaatgaaatactcttttattttggatattatgattgcagtatatggatcaagatcactagtgacaattgaaaaaaactattggaataatagcacttgtatgaaattcagttttggaactaaacagcaaatttctagaattttgctgaaaatgttttaaaatgctattctcatccagccatattagtcttctggcttttctttagcttcatcaaataagcatgttgtgataatgatagatgtacaattccaacaaggttattattttttaaatacattgtcattctgaacattttatcacttctagtttaataatacatacatgatttttcttctgaatgtctcttctccctgcatcactgttcattcacaatgaaaggttaggaagaagctttaaaattcactattttactatcaatcatttgtataataaactatacaaagtataatacgtttcctccagtgtttgtttgttaataacaacccctgaaataatgtgtagctacattgagactctcatttatcaactaatagttgaggacattacaaatcaact

SEQ ID NO: 126326 - DNA, 2420 bp, Homo sapiens
ctccagatggttccagctgctaatctttgagtattctacctggagcccatgcatgggaaggagagatgagccatccctgttgtgtgctctgtccaagttcttcattcacaaatctgtgagcataataaaaaagcttgtttgacaccattaagttttgtggtttcttacacaggcatagtaactgaaacagatgaacactgttacccccattttacacatattaaatacgttgctcagtcatttggctaattagtaagtggtggaacctcaaattagctaggtaggttgactgcagagcctttgagttgttcttttctaaatattgtcttgcaatgtcagcctgaaactatatcctgggtctctggtgtgagttgggagactaagggaaagggcttttattgggagcaagaacagggattgcagggaatctcccagggatggcagtgaggctaactgttttctgtaatggcatgagctaggtgatactgaaaaaacaattccaaaatttcagtgcattgtcacaaaaggtttttttttttttttctcaaactatgtgtccaccttagcccatggggggctctgcacattgttgagggggttataagcactctggaaccgaggctgatggagggacgaccttgacataattccaccatcagcaaggcaggggatggagaaagtggtgaattatttactgaaacttaaagcttccactctgaagtgacacatcacttttgttcacattacatgtaagtcacgtggccacacctaacttcaaaggagcatgtaccagaaaggaaaataaaatatctggagaatagcactagtgactccccaaatctgctcttcggtaacaaaatactgaattcactctcctatgcaagaaatatattcaccccctttggaaggttacaactgtggaattccattgtgcaaggattccaagcccagagtttaggatctctgggtgatgtacttatgtggaaatctatttcagggctggagacggcacttcatgaactaagaaaaaagtgatctgctccccatctgtccactgcataattcagcaggaatagaataactgcggcaacaacaaaacatattcaaaaagaataaaacagaagaaatatagcaagccctacttaggagcaattttgacatcctgtggtcagtcacttgagggcctccaactccagcagaaaattacccttcagggctcatcagccgccaagtcatcaatgtgttggcagaaggaggcagattgaaagaactgggagaatcagtatctgagcacaggtgagaaagggaacagtttgtagggaaagggttgatttcgagcaataaagccaatttggctcataccattataattgtggttatacagagtaagtgttaacattaattggttacccttcctgagtgccaaggactgctctaaaaggtataatcagtcttcacaacagtttgtgaagtttgttcctttgagctcatccatgttttgtggataaggaaagcaacatacagaggtgttacattgcgtgcctgaggtcacatagctaacacctaatagaagtgggatattggatcccaggtttcagggttttagagaccttatgcttaacccctactctgtgttacttttcaaagggatagactatagaatataattacatacatggaaaaattataattccatattttttctctacttctgtcttgttaatgggagtatatggcctattttatgggtagctcataagttatttaggatatctataaatttaagcataagatactattttaatttttaaaatttgccatgagcatgtatatgtatgcatcagtggagtaatttagatcttctgtgacttagatgtgattttgatctttgtgagtttttacctgatttcaggacctacctagtcaataaattgatactgataaattaattcatagtcctctttgcaacttggtgaatttttaataatactaagaaagccatacctagaaattgccagtatattttacaaattgcttgtggcagtataaaatatttatttactatctgagggctacaatataaaacaaaaccacagggtggcagcaacaacacatatttttctctggaggcaattttatgccttttctgaaaggtagtggtgtggggaaacttttatgctaaattgaagagatgacatctttatttcataaaatcacccacgcaccgaagctctataatttgctataagtaattagtgagcagttttaataattagctataagtaattagtgagcagttttaacttgtagacatcatatgactgttgtacaggccactatgaacttgtatatgtattgtttttgtgaaccttttatctccctcttctttgatccactagcctaaacatacctgcacgatg

SEQ ID NO: 126327 - DNA, 1200 bp, Homo sapiens
gacttggaaccaaccaaaatgtccaacaatgatagactggattaagaaaatgtggcacatatacaccacggaatactatgcagccataaaaaaggatgagttcatgtcctttttagggacatggatgaaggtggaaaccatcattctcagcaaactatcacaaggacaaaaacccaaatgctgcatgttcttagtcgtaggtgggaattgaacaatgagaacacatggacacaggaaggggaacatcacacaccagggcctgttgtgggctacagggaggggggagggatagcattaggagatatacctaatgtaaatgtcaagttaatgggtgcagcacaccaacatggcacatgtatacacatatgtaacaaacctgtacattgtgcacatgtaccctagaacttaaagtataattaaaaaaaaaagtgagtaccataaaaaaaagtctaaacctacttgaaagagaaagtacaataacgcattcaaagaacaggtagaagattttcatttgaatgctcattggttgtttagggacaacattttgaaatacattataaaggtgaatttagttcttagaaacttttgaaaagggaattgctggtgtacagataaatacaaggatgcttaatagaggagtgagtaggcagaaaattatctggtaagttggaagaagggtgtattttaggctacccataagcctgtatgatttaagaatatcgctaagaaagtgaggaaagtcattcatcttagatgacttttttttgtttgtttttgttttgttttagacagtcttgctctgtcacccaggctggagtgcagtggcttgatctcagctcactgtaacctccacctcctgggatcaagcaattcttgtgcctcagcctcccaagtagctgggattacaggcaggtaccactgtgccagccaatttttgtgtatttagtagagatggagtttcaccatgttggccaggccagtctcaaactcctggcctcaagtaatctacccaccttggcctcccaaattgctgggactacagatgttagccactgcacccgggcctagtagatgacttttaatgataatcttgtgtttgtaggtgcttaagttgcctaaacctagaatgatttgattctaggcatatttattcctggtaaagcctcagacagccaagctaaatgacatcgaaaatacttg

SEQ ID NO: 126328 - DNA, 2696 bp, Homo sapiens
tgttgaagaactgaagacttttactgtacaggataaacaactgacattaaatgtcttagttgcctctgctgaatcacacctagataaggatataattaaatatgggtttgaggaatgaactgaatctggtcattatcctctctgcttgtcctaactagagtcactaggcttcaggaaaccggtgatttggaatttgatgaaatatagtgggacactggtttatatcgcatattgtatgtgaatttttaatcagtggcaaaaaaatactgtatcgtcatcacaattgttagaagagatggtctcacctagtaaacactgagttaggtctaggcaaggtattttcttaatgattgggtcactcatgttttgtaactttttctgctttttgaaatatgcatttaactattcctagaagggaaagtaaaagtaatagtctcagttagttttactccctagatgacatgatatatgtattattttaaatgaagatttattttttgtatctattcattagtgtagggcagtcattaggaggcttgtatgtgactgtatgaccttaacatttcttaagatctggttgaattgatgggaaactgaatcagaacctaacctggcaggcactaaatacccattttaatttagattttcttcttttctcctttaagtcttgaactgagagtcccatttctagatcatcgattttcttcctattacttgtctctgccaccagaaatgagaattccaaaggtaggtaaatcaactcaaggtaaaactgtccattgccatcagattatatttgtaatttttacctgatgctcctttttttgtcacgtcagaatgggatagaaaaacatctcctgagagagacgtttgaggattccaatctgatacccaaagagattctctggcgaccaaaagaagccttcagtgatggaataacttcagttaagaattcctggtttaagattttacaggaatacgttgaacatcaggtataatgtctttaaaaacattttcaggaataagacagtttggatgcagagctgtcattgctgttcattttgtatttagtttgaatgatacatgtatttagtttgaatgatacatgtatttagtttgaatgatacatacatcagatatctctctgataggatgtccctatcagagagattcagagtctctgtaaacaattatctcttttgtaagaattacgtaagaattaagtagcatgaaggattataaagtagcatctagaatcgagagagagaggagacttactactaatcatcactgattttcatttatcagatttttgggcacctgctgggtgccagatcttgttaggcacaaatgactaaaacagagccaccaagtattaaaaatatgcatatgagtgttctttaaaaggcactgcagctatccatattatgaatactttagcattttctaagtgatgggtgattcaaagggtctcatacaagttacagtcacgtcttaacattttctgtttcgtgaaatgagactaaacacaagtatttcctgccattttaagccattttgctcttatatgcttattcttacaggttgatgatgcaatgatggcaaatgcagcccagaaatttcccttcaatactcctaaaaccaaagaaggatattactaccgtcaagtctttgaacgccattacccaggccgggctgactggctgagccattactggatgcccaagtggatcaatgccactgacccttctgcccgcacgctgacccactacaagtcagctgtcaaagcttaggtggtctttatgctgtaatgtgaaagcaaatatttcttcgtgttggatggggactgtgggtagataggggaacaatgagagtcaactcaggctaacttgggtgtgaaaaaaataaaagtcctaaatctaaaccattgctgtagtcatttatgttcatgcagtctcttcataagaggtaactagaactgttttgctgtatcacagtaaagtggagggtaagctaggaaaagggaaaatgatcagatgtctgcaagaactcacagccctctcctggcagagctgctttagatgacatttgcatcttgtgcccgtgtggcttccttccagtccttgcctcatcttagggacgtcatcaaaggactacactatttttgttctgcctacattcctaacagctgcctaggcagactcagacttgaatcttctataggagttcatcacagctctattttgcaagatagtagttcatttttttctcttttatgttgagccaaagccacttctggagacttgtcctagagcaggggtcaggctttttttgaatttttaatttgtttttaataaagagccagatagtaaatattttaggctttgtggacctcttttggaactgttcagctctgccattatagtgcaaaagcagttacataggcaatatgtaaacaaacgagcgtggccatgttctattaaaagttacttatgaaagcagatggtgggccagatacggcctgtgggccatagttagttgattgctgttctagaggaacaactaagctaactaagcatttctgatgaaagtctaaacctttgtcagatgagtagattgcaaaaattctctcccattctgtaggttgcctgttcactctgatggtagtttcttttgctgtgcagaagctcttgagt

SEQ ID NO: 126329 - DNA, 3310 bp, Homo sapiens
tgagtgttagctgttattattatttttgaaagtactgtatttagaatactgtgggcagagggcagcttgtctgtattcagtgagcgggagacctagttcccactatggaggactttcgtagcatggatgagaaaaagctagagagcagtctcagtgcaaggtaatcaatgccgagagaatccaaaatagccaaggaaagcagaatgaggggaagggccattctatataagaataacatcctggatataaaattaggcatttaagaaggaccaaaaaagaccaagcttagcgtgggaccatgttggactagagagagatgaggtgggttaggtaaaataggtagagagggaggtgccaactgggagaatggttgaagccttggcaccagaggagctgaggggagacttacttcctggtggtggagttgaagcaggcgagggaacagtgctggatggggcttgtatgtggtgggctgtaaagtcatttttctttttttcccttgtttagttttcaccattgttaattcataaagctttgtgaactcccatcatgtttgattttcaagggaagttattttctttaacaagtaaatgggtatttctttatataataaggtggcagatcatattggaagtgaacattatgaagtcctttttaactctgaggaaggcattcaggctctggatgaagtcatattttccttggaaacttatgacattacaacagttcgtgcttcagtaggtaaggtattatgatattcttaaataaaaagctttttttaatactgaaaaaaatgtaaggtttaaaaaaattatttcaagccatagttttaaaatgttatttaaggatgaatgcaaattaaatccctatgttactgattatttaagaccacttaagaattctctgaatctcttttggagtgaagggaatagtaaatacgtagttcaacctccacattgttggtgtcactgttggtgtttccccagggagcagatacatattttctgccctctacctcccatttctcttatagtttcttgggctacagtctatatacagtgaggaaataggtctttttggtaatgcatttttgataagaaatagtcattttagatatattccatcacacaacttaccagtcactagctatcattgctctgcaaacaatactaattttatcttgtagataatgtatctactgagattggaagtataccccaaatcagactgatccagtgttattgagcctttatatgctactgcctcccttgagagacttgccttggaaggcaaaaatatcttaggtattacaatggtttatggccctccaaaacatcacagtaaataagcagatagacaggatagctctggtattggaatttcatggggctggggtgaggttaggaaaataagtgtctaaaaaggctctctagctgaggtgataataaaaacaaggttgagaagaaacactggtttagagagatgtggtgcaggaccaaggaggcaagtttaataacttatatagtctccccagctttatgtgaaatctggtaaatggggagtggcagggggaaaatacccatcaaaattaacactaaaccaccaaaacggttattcttatttttgtgtcataataccactatgaaaggcatgatttttaggtatttgagtcattgttcagcttagcaaagttttgaggtggacattcttggtctaaaaacattagaattttaaaacctgtttagaaaatgacaaaatggttccgggttattttattttacagtagtacttttggattaagtacatataaatggcttataaatacaaggtcattattgtggaaactactttatattaatatgaagtccagtatagtagtaaagctttcaattatttccaaaaatcaaatcaaaggcatttttggtggaaggttatgttgacattaaagttaatttctctctctcatttaaggtatgtatttaatttccaagtatattcggaagaacacagatagcgtggtgatcttctctggagaaggatcagatgaacttacgcagggttacatatattttcacaaggtaaccactctgaagtggagggatattcatgctatattaagaaaagtatgaattgtttgactattttctatcatctttcagtatgacagtgatatttttgagtatcttgtgaggttacaaaagggaatctgatagtgtttgctttctatctcttggggaagaaagaaattttaatgtgtcagataatttttattctttaaaactagttacagctgggtatgagggctcatgctcatacccccagctgctgaggaggctgaggtgggaggatcacctgaacccaggagattgaggctgcagtgagctgtgattgcaccactgcactcctgcctggttgacagagtaagaccccgtctcttaaaaaaaaaaaaaaaaaagttaaaaataaataaataaaactacttaagcttgagaatcccctttctgccatttcttagcatcctgtggaattatgactgttgcccattgtgttcattttattctaatattagcagtttggtaggaaggaaggcatgttttgtgaagcattgcttacctctgttcagttatttactcccttccctaaatttgtttaactttttgtcttatccacctttaggattggagagggagaaagaaaaactgctttgtgtgccaaaagcaaaactcttggtgtttttgtttgtgaaataggctccttctcctgaaaaagccgaggaggagagtgagaggcttctgagggaactctatttgtttgatgttctccgcgcagatcgaactactgctgcccatgggtaatatttttagaggctattgtaaaacaaaaacaaaaaaacaccaaaaacaaaacaaaacaaaaagctcaataccctgagaaaataaaaatcaatagctgattggctatatgttacatatagttggctatatgttacaaagtgtgacttttatagagaaaatgaagctgtttcttaactttgtcccaaaaggattaggccacatttcaaagtggtgttgtggtatatggagagaagtcttcttccataggttgtttgaggtggagttttcacctttaaagggtaacaacattctgctcacatctgaacaaccaagatggaagaggcaaggctgctacagcagctaccgttaagtgttttaaagagaagtaaagatcgtaaacatcatgtgacaagtagtgagtgcccaccatgcccatgtggtgctgtagtgaccctgagggaatagagtagtgaaga

SEQ ID NO: 126330 - DNA, 3355 bp, Homo sapiens
cgggagacggagcttgcggtaagccgagatcgcgcaactgcactccagcctgagtgacagagcgagactcatctcaaaaaaaaaaaaaaaaaggatcaaatgaatcagttttgaactaatccacttaaatgtaagggctaaaactataaaatcccgagaagcaaacatagaagtaaattgtcatgaccctggatttggcaaagctttcttaaatatgagaccagcaacaataataaaaatcaatgaattggacttcatcaaaattaaacatttttgcacatcaaaggacaccatcaagaaagtgaaaagacggcccacaagttggaagaaaatacttgcaaatcatgcatagcactttttgatggtaaacttgaggaagacatttatcttttatcccttacctgtgcagcagtaacatcctaatatctctctccctgcctctttttgccattctttaaattctttctcacttaattttcagatttaatattggctgaagcagggataatgagatcaatcaaaggggtccttaggacactagtcacagtgtttgtactaatactggaactggcttattttcaggcatttctagtgtgatcagatggcaaagaacaagcatatatatatgtcagttgccaggactgctgggaaagcctggtaaagagaacactggggaaaagcagcctcctgctcccctgggccttctttgagcctgatgatcacttgatatggaacttaccctctgaaattccttaattgttcttttctatatccttgacactgtccttttccagaccaaattatctcatctggaatactgcaacaattttcttttctcagtgcttttagaataacctgtcaaaatctcatctgattatagtattgcctgcttaaaaccttttaattactccccattccctatccgggttgtgtagctcacttgagctctgctggctggtgagggaatctgggtcctttttctggtatttgaattcagtgctacacaggttactggctgggtagacaatctcaaattgtaaatcacgagtattccatgtagatagtccattacgatctacaataaaacattgatgtttgtatcaaagatcatggtgatgagaggttgggtactgtactgtctgtgagaatttattgaggaaatttaagttatatggttttattcacatatagtgtataacaactagttaagggatagatgtcttcttatctgactttaaagtaggtaaaagtggatcattgtacttgttaaaggtctgggaaccatggctgtgttctgaaaatacctcagtgatgacaaataaatgactcccagcctatcataacattaggactccagttcatccctttgcttcataagtgtgtcttttccttttgtgtatttgctttagtatagaaaataggttttcttgattagaaatctaagaagaagaaattgaacactggagatttttctatttctttgaattacgaaaagttagtgtaatttggcagtatatccctgtgccattattgtctctcaggtaagtagatggtagggcttaggaaaatagaaaattttttttcctattttgcttatttaatgggtatgtgtttgtattaaaaagggaaaataggaatgtagatgatgttaactaatcgtgaaagttattgggaagggttacctaatttgaataaaggtatcattgtgaatttctaggtcttgttacattgaagcactccgcgactccctttttaaaagtggagccttttcttcctggacactatgaagttttggatttaaagccaaatggcaaagttgcatccgtggaaatggttaaatatcatcactgtcgggatgtacccctgcacgccctctatgacaatgtggagaaactctttccaggtagcagacacccacccacctattccccatccttctccaagggaaaaaaattttaagttgtattctcccatcatttgaatgattttagtttcaagacctacttcctattttgtttggagggaacacattaagatttggcacactccaccattgagtaaataccatcatgatagatgttgatgattgtgtatttcatttcaataactaatccagcccaagattttctggagctgtttgatttactgctgtgtttataggttttgagatagaaactgtgaagaacaacctcaggatcctttttaataatgctgtaaagaaacgtttgatgacagacagaaggattggctgccttttatcaggtgaagtcaattaaaaaaacctaattatatttcatgtgtgtttaattgaaatgatttgtagccatccctttggtttttactataaaatatttactgtatgatttactctttccttcattataggatggaaatgattttttataagctgtatttaatagtcatagtcatactccaacttgagttacactatagctatgttattggtgttaagagtgagtcagtgaatgttctttagaattctgtgtagtgatttttaaccaattcaaatactactattatcacagtttatatatttttctcttgttgaagttgatttcagtttataaaacttggcggattttaaatagtaaaactatgatcttggtgtttatcaggaatatacatcttctgtccctgtcttatgcaaggcacataactaggacacttccacttcctcttttgcatgtagggggcttggactccagcttggttgctgccactctgttgaagcagctgaaagaagcccaagtacagtatcctctccagacatttgcaattggcatggaagacagccccgatttactggctgctagaaaggtaaggtgctgtctctgtcccttgtgtagtgtagttagagtagacttgttattagaatgaaaatggagtcaataatgggtgattctactgctgctgtattgactgggtcaattgttttaaattgattgtattaaaatagaatgaaatggctgttggatatgcactgtgttgtacactgtcctctgtgtacttttatctgttatgacccatgcaattctcacaaagaccctatgatgataagtatgctcttttgaaagtaaaggtgtctgggcatggtggcctacacctgtaatcccagcactttacgaggctgagggaggtagattacctgaggtcaggagtttgaaaccagcctgagcaacataatgaaactccatctctacaaaaaaatacaaaaactagccaggcttggtgacgcatgcctgtagtcttagccttatgggagcctgggtgacagagtgagaccttgtctcaaaaaaaaaagaaagtaaaggcataagtcaggtgcagtggcaca

SEQ ID NO: 126331 - DNA, 1386 bp, Homo sapiens
gcaggtattctggtgattctactatgctacttattactttcttactgtattaatggtatgtcatattttataagcatatgaaaatgattgctcatcagcagcataataaattcagagtcaggaatgatggtcaatgatgtcaaacagccacagattttccacatggtagctgagatagtgacccctttgctttctgatggttccatgtatgcaaactttgtttcatgcacaaaattatttgaaatattatataaaattacctttaggttttgtgtataagatatatgaaacataaatgaagttcatgtttagacttgggtctcatgcccaagatatctcacatatatgcaaatattccaaagtccaaaacacaaaacacttctggttccaaacatttcagataagggatactcaatctgtatatatataaatatatgtatgtattacatatatggtatgtatataatatacatttccatccctccacaggttactgttctggcacattcccattatgttctgtttatcagactgcaactaaaattttcatgggttcggctttatgttgaacagaatttgcagaatatgagttgaagcgaaccatagtttaataatgctgtgattctcctaaatcaccaaagtgcatgaaaggattatagagctcagaaatactgaagcatctttgcaataaaaaattattagtgaatgtacaaggagtctaacattttggttttgctttcgcttcctaagatgcaacagcattttgaatttgaataccagaccaaagtggatggtgagataatccttcatctttatgacaaaggaggaattgagcaaacaatttgtatgttggatggtgtgtttgcatttgttttactggatactgccaataagaaagtgttcctgggtagagatacatatggagtcagacctttgtttaaagcaatgacagaagatggatttttggctgtatgttcagaagctaaaggtaataataaatttttctatagattttcattattgtcttggttgtacgttttcttttaaattatatttgaaaatctcttagagagcaatccagaattttacaagtgactaagttatgagtctttacctttttttaaaaaaacagaggagttgtactctccttttcagcacttaaattctgtaatccttgaaggatgattctttagtgcagtcgtttattttttgctgtgctaatatgctctacatctagcttgatcttaagtgcagttttaagttttcctgtgtcatactataatcgtagggttgactctgcaattattgcattgtggtactttgcgcagttatagcacagcaagtgttaggatttctaaaacagctttattgataattcacatacca

SEQ ID NO: 126332 - DNA, 2063 bp, Homo sapiens
ttttatctgtgaacaatagcttttgtcattgtttgttgcctgctcataggaagactcttaataatagtcttctcatttaaaaagttttaaaatagttattcaggaaattccttttacacatttctttattcctttattaagggtctactatgcaccagacatcatttttctaggtgattggagatgaaatggtgaaaaggaaaggcaagaatggaatttcctgctagtgggaggtagaagaagagagtattaaaaattttttctaagtcaaataatgtcatatacatgagaacgctaggtggtattatggcattatcagcttggctttccccttaaatgaaataggaagtgccctgtttcacttgaacagtgttatttcttttattaaaaagttacaagaagttaaatattttgaaaataattaatttctattctaaattagccaaatgttatatttgtaaaagtagagaagtttgttccattgcttctaccaagcatctaagtttatgtagttggggcagctagcagtctgtctaatgagcagaatgtatactttaggcttatataaagtattcagaaatcccccccacacctcctttttggtaaaaataaagtttaccactacaataaaatacagccagaggtgtactgggagtagaaggagactgaatgaaagaaaggaggaatggggtaaaggctggggcaaagagcaggccctctccctgcaggggagtatcagggcctgcagccaagtcaaatgacagcatgacgtcaggaggcaagatttgagggcttttatttaaggtgcagcattggagtttggttttaggagagtaggaagtaatacatccgttacccaaaggacccttctcctttttaaataagttacctgcaaagtttaggccaaagaggtgggtaaggtagatttgggaagctgttgcttactaatatcaccgaatgctttatggtcactaacccttcaggcagttcagcccagaagagtcagcagaagactgtttacaggcccccacctgctagttacagatcatccctgatagagcagagaggggtgaccaggtagtgactttgtagtcactggaggcaaagcccatttttggacagttcagtgaggacttatagacaaaagattcacaaattatggagtgagttggatggagtgtgaagcatatttatgggtcatgcacatacataataggtttactttttgaaatttgaaagcatgttttaagcttatctaggatttccacctgatttaaacctcttctttctctaatgtcagccaaaaacccgagtacaaagaagaaagaggaatacatcaaggacttttcatcctcatagtttgccattaatggctcatagtttgccgttgatggtggagagtgtcagaattggggagtagcctaatcaaaccttcttactctgcatgcagtggcagacagtccctttgctgttcttttggggaatgcagactaataaagcgccaccgtcattttatctatcagtaaggagtagctttaatgctgctgcagtggtggaagcactgggcattgtcatccacccctggggaccagcagctttgttttggatcatgtatctgttattgtgatggagccatttatttttcagggaatgatgccaaatgatgtttgtccctttgctttacatttttatagctaggactttgaagctgaactggaggaacttcttagccaatactatcttctcaaatcaaaagtttatagttgcaaaagacacgttttttagtgtcatggcaaccaggcaacctattatcttaacttaaatttagaggttgagcatccctaatctgaaaatctgaaatttgaaatgctccaaaatctgaaactttttgagcactgacatgacattacatgtgcattttgatgtcacagtcaaaatgcaggtgtaaaacacgcagtttatttggcgttccctagggaaaaaagaccctctcagcccgcttcagctgcagtataacttttctacacatgcccggatttccccatgcaagcacgcccacaaag

SEQ ID NO: 126333 - DNA, 4261 bp, Homo sapiens
ccgccccggacaccccgcggccccgcccctgtgcgcgctggttggtcctcgcaggcatgatgaaacttcccgcacgcgttacaggagccaggtcggtataagcgccagcggcctcgccgcccgtcaagctgtccacatccctggcctcagcccgccacatcaccctgacctgcttacgcccaggtgagccgggtcctgcgccccgtgccctgcgccccgcgccagcatcctcctcgcgtgccctggggctgctccggaaggaaggggtggaggatgcggtcttcagcctggcacccggcagacgcggttcgcgggcgcctgctgatgctgcggctcctgcggtagggagggcggggcggacgcctagcgattgttacgcacctgacagctagcggaaggacctttctgtcctggttccctgaagcatcgagagggaaccgcggccggcaggccggaccgctccggagaggaggcagcggcagtttgagcccctgtaaatgttatatgtgtacttttttttactatgtggcgtcgaagcctgtggacattttcgcggtccgggtccctgcggcggacgggtcggatcgtgctcgtggccagggcgcagtcaggtgtcgcgtggtcctgatctaggaagagactgcggccttatcaccgtctcggtgtctgctttcaccttcaactgcccccctcctcacctggaccgctcaccctcctcctcccctctcaccccgccatccccaccagtccccacctgtctctgtagactgcaagactcatcaagtgacttgctgagcaaaccctgccgagaagaggtctgtttagggacacaggcgaccaagtacagaaaaaggcaaaagaactagcatgcctttttcaatggctgtcattttgcagggctggcttcagatgattgttatagctttaaataaaaaggacagttttcatctcggcccgtggcctacattatttctttactgtccattgccctgggcgcttgactaataatttaacagcagtttttttttttaaattttaaatcatgattcatagcattgctgtaagagtaattagaggtaaagtagggcttgaacctgtctgtagttggttacttactgagatcttaatataaaagtaaagggagagggtgaagttgtaagtagcactaagtggaatagaaattaaatgcactgaaactgccatgtccagttcggtaggcgctagccacctgtaactgttgagcacttgaagtgctggctagtcctaactgagatgtattgtgttaaatacactggattttgtcgttggagtaggaagaacagtgtaaaatatctgctcgataatattttatattgattacatatatgttaaaatgttactatttgggacatactgagttaagtttatttaaaattaatttcacctttttcttttaatggggctactagtatatttaaaattacatatgtggcttacatatatatttattggacagcactgttctagaagtttaggaagaaataagaaaaatattgagaacaggtagcggcagtaggaactttgccctcctataagactgattccaataaaaataataggttatagttttaattggctttttcctactagaaaaaataagtgtactttacatgcctctttgttctccctttttcccctccagtttagtggttagaatgtatttattatagcaggattaatacagggattcactaagcagcgttaagaagacttaggtaactgattccctgatgaccatacttgattttcaaagcactttcctaacccgttttaaattgatatagagtcaaaggcagatggcttattagtagtcatctcatttaaatcttatggaatttttccagtaaatctcaaataatttgttataggctatttgggctatttggtcaagtgcatggaagagacagcataggacatgtggtacttcatttccaaattgcttgagatgattttcattctaaccatatattatttggttctggttttccggaaaagccagctaaacctttggttcttttagatataaatgaaatatcatcaaagaatagctcaaagtgacttatgcaacttgaatgtatattttttccttagggtgtttatcccaaactatttgggcatttgctgcaattcgcagtttttttaaaaaaaacaccaaaatagttatttttcaagttagagatgttttaattaaaacatcttgtttttggtgtatccattgacattctcaaaacggaatgtatctggacctctgtgtacaatcttcgtagcactcagacactgaacagaaaggcagtcatcactgccaaacagggcccaaatgccacacatggtgcaatgtgtcattttgagctggcagcagccaaataaaacagccctttatttcacagttgagaatttgaaattggaaagtaattaacgtatgtaagggtgatttatttgcttccgggcttatagggatgagctaagttttttattagggatgttgttggtgtatatgtctcacctactttgcttccttactgaacaatgcaactttgagacagaaatatttgagaacatttttgtcagtgaggacattttgatagtgaatattttgtatcttctattaacttgaaatgttttatttgttataaagccaggatatctgatatcaaattaaattgttttttttttccctttagattttcttcaatcacatctgaataaatcacttgaaggtaacctagatgtaatatagtgaaatgcttgaaagagctgcgtatcttttacacttacagcagtatgattttctgttgtacccattatatggtacctgcagctagttcagataaagagggcatttaactgtcaagggaacctgagaggagactctagtaatctggaaagtctgttggatctttgagggattttgggatggtgagagtggggctaggatctctggctaggttggagccagcctgcatttgtatctgtatcttggaagcaaacttagaatgcagagacagatgtggcatggacgctgtcagctctagccaaccactaaatcctaaggtgggagagatgcaggctttggctaggtgctaagctgctgtagccggttgaatgtagaggtcactatcttttccgaatacctgtaagtaaattaaatcattctctactcccatgtgcctgccaacctaatgggaaatcgctatagaaaagatggtttaaattttagtctttgaagtggtttatgcacgtttccggaatcaagatttaatgcagagttggattggatattgaatatttttgatttgtctgcttttctctccatagaaagcttatagcttcattgcaccatgtgtggcatttgggcgctgtttggcagtgatgattgcctttctgttcagtgtctgagtgctatgaagattgcacacagaggtccagatgcattccgttttgagaatgtcaatggatacaccaactgctgctttggatttcaccggttggcggtagttgacccgctgtttggaatgcagccaattcgagtgaagaaatatccgtatttgtggctctgttacaatggtgaaatctacaaccataagaaggtgaggagaaagaaaccagatgtctggatgcgattaaacttcagagtttgttggttacgatgatgttacatattctgtatcatgctttttcctttgcaaagcactctatgttcgttatctcatttgctctaagtatgtaaatagggaactgatgaataaaaaggtgagtgaaatgacttggtcacaaaaaaagtgataaaaatggggattacagttcagtttcattgactcttagaattttttctccttctccccagcttttcattttgaaaaaattcctaacatacagtaaagaacagaacaacaagcacctagattaaatagtcattaatgttttgccatagttgcttgatttttctttctacacacacacacacacacacacacatgtttttgctgaatcatttgagagtacagtgcagatattatgacactcctaaatatataagcatttatctcctaagaataaggacattcttctacataacatcaatgccattattaaacctaagagtccataataccacctaatatccagttaatacttaaatgaaatttccctaagtgtcccaagaatatttttatttatttatttattttgagacagagtctcattctgtcacccaggctggagt

SEQ ID NO: 126334 - DNA, 1963 bp, Homo sapiens
gagagaggcattctcttgatcaattcaagtgaaaagcccaaagctgtttgatggctgagaggatgtgtaggtcaacttaaggagaagagcctaaaacagctctgacaagtaaaaaaaaaaaaaaggcagaagacaagacaggcctatttttgcatgttataaaacaccgagaaaaaaatatcaggatgattgtcatggtcttctttacattttcctgtatttttcaatttaaaataattgttggtgttacctgctgcccacgcactcctccgtctgcagggggcgcaccggccgccaccgctcactccttcaggatgatgggcggggcctcctgggccggtgtggactgacgagtggctggccgccctgtccatcacgacatcccgcccccgcgctacgtcacatgacgcagcccatcatggcggcgggagcgcggcttcccaggcccgccgctccgcagggctgctggcgttgctgctgttgagaggcggcggcggcggcgcaggcgggcgggaaggatggtgtttctgcgactggagcggcaggtgcggaccgggagccggaccgaggtttggcagaagcaacgtgtgctcgggagcaaccggcgcgggtgccactgaggcagcggagggaggcaggatcgactgacgggcgaacggacggacggacggaaggcgactcgagggccggccccggagccgcgccgtgggcgagatgccggggccgccggcgttgcggcggaggctgctgctgctgctgctggtcctcctgatcgccggcagtgctggggccgcgccacttccgcaaacaggtgcaggtgagcgggcccgcggcggggacggggctgcggggtcttcggcgtggaggggagggggcggcagggccgggccggcctcggcgccgaggaatcggagggcctgccgggggcgggaagcccagggaggcgagtgattagggagatttctgccgcaggggcgtgggatttgggggggcgggagcgaggcgacgtcgttggggctggggagggcggcgggcgaggtagcagccaccgacccctcccgggataggctgcggtgccggccctggacctgttgccttaagatcctcagcttatatcgcttcctggcagttcagcttccctttccagatgtcacctgcctcttgtgcttttttttcgcatctcataagaaccgtttcttagccctaatcatacttaaatgcaaatgacttggcgagctgtgcggagtttgttttcgctccttgcaacttattctgaagttgtaaattgattttagacgctgtgctttttattcggaatgtatctccggggatgagaaggaaacaactataaatatttctattttaggaagccagtgattagagtagcaggcgttgaataactattgacaaactggcttaagggtgatggaagtttctattttagctaacgtcagtgtatgattttcttttctccccccccgcccattttctcaacatcgtttttatttggggtttattttcctaaataaaacttcaacccaagaaaacatcccaagttgggtcatttttctaaaaaggaaaaaaaaatctaggctaacttggcgttattgactgccgccattacctttgaaatggggaaagattgaaatttcatacattcatagaatgttagagttagaagagaccttaaagaaaatttagaccaatttcttctttacgtagtaggagatactgggcatgttgggtcaaatgacctacccagggtgacacagcttcgttgtaggcagagccccaaagccaggtcttagatacccctagttgtatgattttttttaagtcttgtaactgttttggaatactctcgaggtcaagagttattttggaataatgttaattgggtacagaatgtggatgtactgtctccagtaaagacatatttttcaaacaaatctacgatgaaagc

SEQ ID NO: 126335 - DNA, 1042 bp, Homo sapiens
tttagttgagagtaaaattcatgaaccaatcctagctggaacagagtgttgtaggaagagcttgggctttgtagtgagatctgggtgtgaagccttggctgccgctggaatagcttaaggaccctgggtcagttactcgacctctgggcttagaactccatcattaaaaagggtggcaatgacaatatttacccaaagggttgtggggggcacagtggtgtaccctctcacactagattgcttcattgtttcagatttctttgtaaatttggttatcatcaaattgactaatggcaggtggtatggcatcaaagcaggagctcaaagtggtagctgcgtaacatggcatgtctagaatttactggatttaaaaaatctttgttgctcaaaataacttttttatggtggatggagatgctttagagagaaatctggtttatttaagtctaagctggtattgttactacttgaaattcgtagtgttggagaactatgctggaaatttttaggatcatctgggttagtctgcttttatgtaataaacctgtttttaaagtggaagatgactaaagctcttgcatgtgaacagatgctgattttaatttatttaaaggaatcatgagcacttgaaagtttttcttgatcttaaacacaattgtgtattgtcatgaggcatccctgattaacccaggttgtagtagaacaagcccagagctgatgctttctcttagaaaccagagagatgaatgtgactgacgtttttctttctccctctcatttttcttttttttaagagacaggatcttgctctgctgcccaggctagagtgcagtggtgcgatcatagctcactgcaacctccaactcctggcctcaagagatcctcccatttcagcctcccaaagtgctggggttataggcatgagtcactgcaccaggcaagacttggtttatctgtaaaacggagagaatagttacagtcttgtgaaggtccaaacctgtgttgtctagtacaatagccactagctccctgtggatgctta

SEQ ID NO: 126336 - DNA, 1328 bp, Homo sapiens
aggtaggcctgcagtgggttggtgacgcctggtgggagccacctggcccatgggatcaaagtcacctcaccaggcataggtcatgcgccctgctgtgcaagcaggacagttcaccccactggaattctctaactccttcccaggtagccacaaccttggtctaatcctgagaagacattgggtggcccagattgagagacattccacaaaataactgaccagcactcttcaaaagtgtcaagagttatgaaatgcgaggaaagacgagaagctgtcagagactggaggagctgaggggcatgtggtgattaaatgcaacgttggtagtttggattgagtctgaaaagaaaaaaggactaaagtggagaaaacagtaaaatccgaataaagcctgaagttcacttcatagccttgttaccagtgttactgtcctagttttgatcagcatactgtggtaatgtacgatgttagcattagtggaagctgggtgaaggctgtatatgaactctctgtattgtctctgtaactcctctgtaaatctaaattatttcaaagaaacagcagcttcttatcctggatggatcatcagctttttctcgagcattattttattaacccttacacccatttgtatgtagaggaaaatatattgattcactaattaaagttgattttggaatgtacatgtttttaatattatttatctctctttccaggggaggcgccacctgctgcagaagtttcctcatcttttgtgatcctgtgtgtgtgcagtttaataatattaatagtgttaattgcaaactgtgtatcctgctgtaaggacccagaaatagactttaaggtgagcacagagggtaggaacatttaaaatggtcttccaatatgtttttcaatagaataactggatagcacagtcctttgggaacaggatcagcagattttttttcttcccctaatggccaaatagtaaatattttctaccttagtgaatagtaaatattgtgggccatacagtctctaaaacagcagctcaactctgccaggatagacactgttaccaaatggtcatggctttgtgccaataaaactttatttacacaaataggaggtttggatttggtgcatcagctgtagtttgctccgcctctgtcattgacaataaccacttgcctgtggtgagttgaggttcttgctgagtgaggagtgaagcgtggtgattgaattcactgttgtccgtaagggctatgaggaagagcaagatgattgttcccctccaccccgaaacttctgtagactggtgaatttgtggtcactgagattactga

SEQ ID NO: 126337 - DNA, 1024 bp, Homo sapiens
aattcaaaaaattacctgggcgtggtgatgcgtgcctgtggtcccagctactcgggaggctgaggtaggcggctcacttggttcctggaggtccaggctgcagtgagccatgatcatgccactgtgctccagtcactgtgctccagccaggcaacagagcaaaaccttgtctcaaaaaaaaaaaaaaaaagaattgcttaaactgtagtcatttgagagtaaatttttaagcctagaaaactatttttgtgtaaattccattgcatttaacttcaaactaacagtttaaaaacttacatgaaatatgtataatttattttcctgtcttatgtattctgctgtttggagtcagagaacaaaattacatatgctttttacttaacattaagtacaaactggaaaaaaataattgtggcagcaagttccaaatcattgtgcaaatatgttcctattttaaatgttagccaatggtttttaatgcttgctctctttcattttaggaatttgaagataattttgatgatgagatagatttcacaccaccagcagaagacactccctctgttcagtccccagcagaggtcttcacactttcagtaccaaatatttcactcccagctccctcgcaattccagccttctgtaggtaagaccatacagcctaatgccacgttttcatgaattgtttctgagatctgagaatgggagcctagccatcataaatattggactgcccatctcctctttggtttatttctcttccttctgctcccagtgaagctgaattctagtggtcaggcccattgtattcctgcaatagctttgtcttctgctttctggaccctgggtctggtatgagaataaaacgaatctccttgattcattgacattgaacacctggccagaactcccaggctctgttctggaggtggtttctctgctagttctggccacggctgaccttgctgagtaggactctgctggcttccactgggatgccctgcatttgggtaggagaggaaagt

SEQ ID NO: 126338 - DNA, 1042 bp, Homo sapiens
tttaaataaatcgacacaaataagtataaatacattttaaaataaatagaaaagaaatatgcataaatatgtgaatattgtaactatctggtgaatggtttaaaatggtccttttactgaagaaaaatatttgagttttccaagcttttggtgaggtggtaagtaaaagaatagaaggtcacctgcttattgcttaacttgttcacctgtgttccatttcccggtaaatgcagcagactcctttatcattttgatggaaatgacacaaaaaactgttctttgattttaggttctcttgggagagatttacacgggcactagcgtagcaagagtcatcgtgaaggagttaaaagcaagtgccaacccaaaggaacaagatacttttttgaaaaatggagaaccttactagtaagtaaaccttgtcatgtgttctgtaagactagtctgtggtctgttgaaggtcaggtgtttaaaactactgtgggatttctgcctgtaacatacatgattaagtaagttccaaggtctcataagacctaaaatgtccaggcgtcatctgaaaatcacttagcattccaagaaccaggagaactcagcctaaaccagaaaagacaacagattccaacacagatgacagagatgttagaattacctgacaagaattttaaagcactcatcataaaaatgctttgtgagcaattgcatcacgtttaaaacaaaaaaaatagtctcagcagagaaatagaagacataaagaagacataaatggaaacctcaggactaagaaatacaggaactcatcatttcagttacagcctcaggggcatggggaaatataacaaaagatccagcattattcatgtcatagatgtctcagaaggaacggagatagaggatggggctgaaaaaggattcaaagcagtagttaggctaaaattttctacatttggaaaagaaaaagcctacaaatttaagaaattgagaaaatgctaaacaggatcaacccaaggaaatccatgccaagacacatggtcaaacttct

SEQ ID NO: 126339 - DNA, 1042 bp, Homo sapiens
ttatctcctaacttaaattactaaagataaaaattcttgaggccaggcatggtggcacgtgcctgtaatgccagctatttggccagctgaggtggcaggatcacttgagcccaggagttggaggctgcagtgagctatgattgcaccactgcactccagccagggtgacagaacgagaccctgtctcttgaaaaaaaatttttaaagtttcttatgttaagatttcttttttaatttgtgaaaatattcacttgattggctttgaattacttgctagataacttagtatacaccttttaagtataatcttcgtgatctttttagcctgtcatttatgtaaatattatataaattattatgaaaaaatttggattactatttgaataattttattagtatgcttttgtttgaataatgttattatcatgcttcctgatgaacaatattatggcttttatttttcccagcattcttcagcatccaaatattcttcagtgtgttggacagtgcgtagaagcgattccctacctcctggtgtttgagttctgtgacttggtaagttccttgaaggaattcaagttcgagtattccagaggttgtattcaagtgtttttgacagatggacatgctggatgaggggttgctttcatgtctgtcccccacttgaagaactttatgatgagttacttttattccctttggtgatggtgatagtgttgactgacacttacatagtggtttgttacactgcagtccctgtgctaagctatttagttgccttaccacacttaatgataacaaactccagagttaggtaccaatatttgtccatactttccatgtgatggccatggtgtggatcaagtgtgtagcacagccagagccagagcttgggtctagatgtgccctcctaagagcgtgaaccaggcttgaaacatcttgaaacactttaaccccctgagagagcccaagaatcgctttacctagagtactcctcatccgtcagcatctgaaaatagcaaacgtatgtgacatttatatg

SEQ ID NO: 126340 - DNA, 1080 bp, Homo sapiens
aagttttctctttctcctctggagtggcttctaatttcgttggaaacaaaggagaaggcaccacgtttggaaggaaatgtatgaaggacagcaatgccaggtgcacggcaccgagggaagaccactgctcccctggcagagcagtcacatgacgcttgggagaccccagcagattgataggattgaccttcagttattttatgttcattcttataaaatacattgatgttgtctgcatactgatttaattcacttgctaaatagacctttcttgactagttggtaagccgaaaagtagaagcacagccctaccatttattagctctgtggccttgggcaaatttcttaccctccctaagcctcagttccatatctggtaaacatctcatattgtatttgcagtaacaagtgcaaaaactcctaacataacgcttggctcagggctcaaagcacaaatggtggcaactattaatatcaacattatcactcatgtaaagatcttggaaactgggaatggaaacaaatttagattcttggagtggacctagaagttacctcagaatgtactcagtattaaatgtgggtaaatgtttgtaaaggaatactgtgttttaaggttttattctgggaggtatttgataaattggctatcttcagtaacagttacaagacatgtactctttagttggtcaaggaaaatgcccttcctcaggagtcttttttttttttcttttttttcccgctccccgcctccagccgtcttttcttgactcagatttaaagaacactgaaagctattggcttgctttctaaattttattaactgattcgaggaaactttaatttggaatgaaatcatatcaataaatatttaatcatatggtaaggagaatatggaagattttattccctcagaaggtgttccccataacagatacacggtaaactcccaaaaacatagtatcctaaatgaaaatcatgaaataaagacagcgtaacacagggaagtcttggaggaggcctggggagccctgcagtgtcatggccatgtgctgggcatctgactgtaagtttgtttat

SEQ ID NO: 126341 - DNA, 1650 bp, Homo sapiens
gcaggtagctgggactatacatatgcaccatcagtggtggaccctattccagccagaggcgttttccctagggtgtaataagaatttcacaccctgtggaagaactctgtgtacccaaatcctagcaggtgcctgagatacacacagcaggcactcagtaaatgtaccattgcccagctagcaaagactgacctaataagcagggcaaacactgtcaaaactctagtataaagttgcctctgtgtgctttatcggaatcctcttgttttaatcctctcctggtacgtctccatcccatcttagagtgttaagtgcagagtcccttcggaagcttaagtctttgtggctgccagagtcagaatgacgtgacgagcagagggaggctttggaattgaagttttcattcacctctcatcagctttaccagtataagcctggttatttcatccttcggagctctatctcttctataaaatggggatcgtctttaaagccctggagtgctgttgtcaagatggagataaagtatgccaagctgctagaagaatattcagtaactttccggtattttgcttcctgtctgtgaactcttcttatcaggaatccagattactcgggaaagcataagtagttcacataatagaggtgtggattattttgaaaatgcctcctgcgtgttgagtttgcattggagaaccccgaagacgcgcaaactagtcctagcgtgagtgagcagcaagcagtggtacttccttgtgaatcggggtgggaacccttcagaaccgcgagctcccactttctgtcgatcgctctgctcatgcggccctgagtctcatggttactgtggtctcagtcacagcaagtgctgccaagctcaggcgacgctgccagagccttctgagagccgggcggggctggtgccactggtagcctcatccctggacctgtttttcaacttgaagggagagcagactggctgtgtgtttgcatttcctgacaaaagcagccattgacgtcaagagttccctctgttgttaagaagtgacacctgtgtgtttttctttagctttgcacgttattgggcttcagataatatttatttttaccaactttggcccaaattgtatcattactttgaatctgtacagcacttttatgttttcaaaacatttcatgtatttttcagtgttacccttgcaacagccttgtgagttaaccatttcaagtgcaacctgttgtttcgtgaggaaactgaggctcctctgctatgcatgtgaccagcccagcatcacatggtcttgcagcagtggaactgagatgagctcctggcctcctgactgcccagggctccctcccactgcattgtggagcctgggcacttggggaggagtggggcaggacccagtcctgccactgtttgcttcctcaccacctctgggtttcaggtcatgagaagcattgccttttcccctgggaacaccagttgcttgctttcgagttttataatgagagccaaggaccttctgcaggcgtaattgttcatcttttaccaagcctttgcatttcaagtatccaaagacctacgtggaatgttagtatggagagagaagaggagggagggactgggacagtcatcctgccatccaggaa

SEQ ID NO: 126342 - DNA, 1050 bp, Homo sapiens
ttgactgagccattgtacatcttacatgtgttgattgatgtcttatgtcttcctaaaatgtataaaattgaactgtagcctgaccaccttggacacatgtcgtcaggacctcctgaggctgtgtcacaggcacgtccttaaccttggcaaaataaacttctaaattgaatgagaaaaaaaaagaaaagaaaagaaaatacaaggaaacaagccatacatccggttttaatgtagaacgtggtacagatatggtcagtatttaacctgagctagttacttgcctaaaagtgtgatcatctttattatttaagtgattgatgacatatgtaatacttctactatgaaaaagaattttgagaggttaattcttaagcagagagctcaatatacttactcggatcccgagagaaagcccatttctgtggcatttccatacagcatgatcctggttgttgattcttcttgccatgttcacttccctctgttttcagtgatttagccctgcggaattgttttctcacctccgacttaaatgtgaaagtgggagattacggaataggattcagcaggtacaaggtaagccagaggtttaaatgttttcagtctgatttaatttgaattgtgaagttgtaatgtcaccaaatgccccactgtttgtataagaatcttagtcgctaggctttctggagagggatttgcagcagtcattttaatgtggtctaggcttctggcgtgtggcttgtgtaagtctgcggctttgcatccgaggttttgcaacagctttccaaaagtttcgtttaaaaatatttataaacactgtaaatgatgtagtctgatggtgcataataaattttagagtgaacacatgagcaacagtagttattattacctgttatgataaaatatacatatcatataaatgtttctccattacgtggtcagtaaaatttcagctcatgttcagtaacctggggatctaggtttttttaactctgtcatgaatatattctaaaggaaataagtgaagaagtcaatgaagtttccatttgt

SEQ ID NO: 126343 - DNA, 1085 bp, Homo sapiens
ctttttttgctattgtgctgttgattattggtttcagattaaagaacaatcttggctggttgtggtggctcacgcctgtaatctcagcactttggaaggccaaggcaggtggatcacctgaggtcaggactttgagagcagcctggccaacgtggtgaaaccctatctctactaaaattataaaaattggcagggcatgatggcttgtgcctgtaatcccagttacttgggaggctgaggcaggagaatcacttgaacccgggaggcagaggttgcagtgagtggagatcacaccattgcactccagcctgggcgacagtgagactctgtcttaaaacaacaacaacaacaacaaagatcctattaataatcttttcaatacacaccttgtccttaaaattactggctatgtaacaagtatgagtgttaaaaatttgacatctaaagggagagagaaacagccattttctttttccaacaggtctctgggtgtgacactttgggagctttttgacaatgccgcacagccgtattcaaacctttccaacttagatgtcctcaaccaagtcattagagagagagacacaaaactcccgaagccccagctggagcagccctactctgatagatggttggtagcctcacattccgcctgttctgtttcgtcttcactgtgaggtgtccccaaaacacaaaaaaattcgtgggccaaatattatgtttcttcatttcctctttcaccatgatgtcaccatgagctgaactacttaatgtggttggcagtgatgaaggtgtagaaatgtttcgggtgttgagttggctttagggtccttgtaaattcttttcatattgtttatttatttatttttatttaaaaaaaaatgtagagacagggtctcagtatgttgcccaggctgttcttgaactcctggctcaagtgatcctcccacttcagcctcccattgccccaggattacaagtgtgagccagggtgcctggcctcttttgatatttttaactgattcggccaggcacaatggctcatccctgtaatcccagcactttgggaggctgaggtgggcaga

SEQ ID NO: 126344 - DNA, 1919 bp, Homo sapiens
gaaaagagacccgcggctgaagatgtgcacaggctgctgacttacctgcggctgcagagccagcgggactcagaggtcgactttgaacagcagtggaacgctctgaagccgaacacaaacagcagagactcctccaacaatgctgcattcccaattctcgaccactttgccagggaccggctgggtcgtgaaatggaggaagtcctcaccgtgaccgaaaccagccagggcctgagcttcgagtatgtctgggaggccgctaagcacgaccactttgacgagcgcagccggggccacctggacgaaggcttgtcctacacgagcatcttctatccggttgaagtttttgagagttcgctttcagatcctgggcccggaaagcaagatgacagcggccaggatgtccccctgagggtccctggagtggttcctgtttttgatgcccacaacctttctgttggaagcgactattatatccagttagaagaaaaaagtggtagtaacttggagcttgattacccaccagcgctgctcacaaccgacatggataatccagaaaggactggccctgaactgtcccagctcacggcgctcaggagcgttgaacttgaggagtccagtacagatgaggacttcttccaaagcagtacagaccccaaagactctagcttaccaggggacttacacgtgaccagtggccccgagagccctttcaacaatatatttaatgatgtggacaaatcggaagatttgcccagtcaccaaaaaatattcgacttaatggaattaaacggagttcaagccgactttaaacctgccactttaagttccagtttggataaccccaaagagtcagtcataacaggccactttgagaaagaaaagccccgtaagatttttgacagtgagcctctctgcctatcagataatcttatgcaccaagataattttgatccattgaatgttcaagaattgtcagaaaactttttatttcttcaagagaaaaacttactaaaaggctcattgtccagcaaagaacacataaatgatcttcagacagaacttaagaatgctggttttactgaagctatgttagaaacgtcatgtagaaactctttagatactgagcttcagtttgctgaaaataagccaggcttgtctttgttgcaggaaaacgtaagcacaaagggtgacgatacagatgtcatgctcacaggtgacactttgagcacctcattgcagtcttccccggaagtgcaggtacctcctacctccttcgaaacagaagaaacgccccgtcgggtacccccagactcactcccaacacagggagaaacccagcccacgtgtttagatgttattgtcccggaggactgtctccaccaggacatcagtccagacgctgtgactgtcccggttgaaattctctcaactgatgccagaacccacagcctggataacaggtcccaggactctcctggcgagagtgaggagaccctgcgactcaccgaaagtgactctgttcttgctgatgacatccttgccagcagggtgagtgtagggagtagtctcccggaactgggacaggaattgcacaataaaccattttcggaagaccatcacagtcatcgccggctagagaaaaacttagaggctgtggagactttaaatcagctcaattctaaagacgcagcaaaagaagcaggcttggtgtctgccctctcctcggactcaaccagtcaggacagcctcctggaggacagcttgtcagcacccttcccagcctctgagccgtccctggaaaccccggactctctggagtcagtggatgtccacgaagcgctactggactctttaggatctcacactccccagaaactagtgccccccgataagccggcagacagtggctacgaaac

SEQ ID NO: 126345 - DNA, 1162 bp, Homo sapiens
caaagtcctgctgcccaggatagctgcctggaagccagaaagagccagccagatgaaagttgtctgtctgctttgcacaactccagtgacctggaattaagagccacgccggagccagcacagactggtgttccccagcaggtgcatcccacggaagacgaggccagcagtccctggagtgtgctgaatgcagaacttagcagcggcgatgacttcgagacacaggacgatcgcccctgcaccctcgcttccacggggaccaacacgaacgaactccttgcctacaccaattctgcgctggacaagtccctgtccagccactccgagggcccgaagttgaaggagccggacatcgaagggaagtacctggggaaactcggggtgtcagggatgctcgacctctcagaggacgggatggatgcagacgaggaggacgaaaacagcgacgactcggacgaggacctgcgggccttcaacctgcatagcctcagctccgagtcggaggacgagaccgagcaccccgtgcccatcatcctcagcaacgaggacggaaggcacctgcggagtctgttgaagcccacagcggccaatgcccccgacccactgcccgaggactggaagaaggaaaagaaggcagtcacgtttttcgatgatgtcacagtctacctgtttgaccaggtatctgttccctctaaatcattttctatacacatccatataaggattccaaaatgtgctaggaaattgagtgtggtctgttttctagttgccattttgaggcagcagattgtgattactcacaaaaagtaatttggggttggttagagttctaagaatatgcagaaatgtcatttgctcagggagttcgtattaaattaagagaaagagacccgaatgctcttcctgggtcttctaatggagtcttcctgaattagtcaccctttacacaccaaatttttactgttttacttttttatttttcttttgagacagccttgctctgtggcccaggctggaatgcagtggtacagttgcagctcactgcagccttgaactcctgggctcaagtgatcctcccaccttccataatagctgggcccacaggttcatgccaccatggctggctaaggttttggtgttttttttgttttgttttgttttt

SEQ ID NO: 126346 - DNA, 1542 bp, Homo sapiens
cagagaaaagaagaaagctggaattcccccttctctttctgagcatcagaagacccccttcctgctccgaagccagaaccaagggcttctcctggagcactgtgtccagggcagtgcccactttggattccgggctgacctgagtccaggcgggggattgtggaggagaagccgacacacttgttgctggtgggtggcaccttgagcactgccgctcgtgcccgcctgcctgctgctctgcgcttctctgcagcctcagagggctgcttcatgcctctgccgaggtcagagctgcaggcagagggagagacagggcctagtgtctgtccgtcctcccaggcctggagccgcccttgtcttgagacgcttacttctcagtcgatgagtctgatgcgcctgccagtggggaagcggtcacacggggggttcccgtgagcaggcctttgctgacaggagtttctgtttgacttttcaggagaccccaaccaaagagctggggccctgtggaggagaggcgtgcggcccggacctgagcggcccagccccagcctcaggctctccctacctgagcaggtgcatcaactccgaaagctccaccgacgaagaaggtatttcacgtcattgtctagttttaaaggaaactgaaaaattgagtaatgtaaaggttttttgagggtaacttcccatgttgctttaatgacgccccctgacatgggcacagaactgccatctgccagccgggccgggctgtgtcttccgacctgcagggcgcacctgcccagaggctccccctctccctcatcacgcagtgataaaaagggtggggttttattttttatttctaggtggtggctttgagtgggatgatgacttctccccagatccttttatgtcaaagacaacaagtaacctgctcagctccaagccttctctccaaacatccaagtacttttctccgccgccaccggcccggagcacggagcagagctggccgcactcggcgccttactcccggttctccatctctcccgccaacattgccagcttttccctcacacacctgaccgactcggacatcgagcagggcggtgagaggcgctgcgtgctggggattgggagtgcagggtcgggggtggggcgctgcagctgggagatggtggttttgcaggcctgataatctcatgtcttcttcacatttgctgagtagattacaaacttgtttttataaaactcccatcatcagctgggtgcagtgactcctgcctgtaatcccagctactcaggaggctgaggtgggaggatcagttgagcctgggagtgtgagaccagcctgggcaacatagtgagaccccatctctaaaaaaaataaaaactaaaaaattagctggatgtggtggtgtgcacctgcacttcagctactcaggaggctgaggtgggaggaatgcttgagcccaggagttcaaggctacagtgacctatgattgtgccactgccctccagcatgggtgacagagcaagaccctgcctctaaaataaataaat

SEQ ID NO: 126347 - DNA, 1275 bp, Homo sapiens
gctcccgagggcggggtggggtgaatgggcaggggccatttgaagtcgaggtatctgaacatagggagccttctttccccgtcactagattgaaagataaaggttaataggctcattttttgattggaagtttacagatcaaataataaatatggaatacaaagaggctttatttccctcggcgctaggcttcatttgtgccgattagataacacctgctatctgccagtctgtcggggcagatgtgtggatcccagctgacttcttctgcaccctgacccttagcgcccagcgggcatttgagcctagcagatgtgggagagtcaggcaggggctgcttccgaaggaaaggacaggaagggcggctcaggcggtgctgggctcaaaacacccgcttccgttcctgtggtgcagcgcacatgccatccacgccatgcctgtctgatcattttaaaaacccagctttgtcgtctcgcttcctctctcctcaacaggaagcagcgaagacggagaaaaggactaggtggctgccaacgcgcacgctcgggtccgaggctgctcccctggagcggcgcccctgcgccctcagcccgagcagcgacatccactcgccatttgctgacatgagattgggaggaagaatccagaggtgaagagggagacggctcttagctgcgttcaaggcggggccctcgggagcccaggtgcagagcgaggccgtgtccaggagccggcgtccctcagtgccccgtgcacccgcggccgcggcctcccaggcagtgctcatgcgctggccgtcgggggaggcaggggcacagcctccatgtgcgcgcgcgtgtggagctgtgtgcaccgcatgtgtgctttccacaggggcgtctctgcgtccacgcctgcacatcccggcgcacgtgtgggcaccacagaggacacgtgaggggaatggtcaccagtgagccatatttattatttctagagaaatcacgaactgctttctgtaattgcactgtggataaatgttccgagagtctccattgttgtacaggatcttcagttattcgaggggaatgaggcaggtcaagccgatgctagccactagtttgattttttttctgttttatagtttgcgctgcatggtacttgtgaagcttaaatattttgagtgttctactgtgtctaggattgttgggattgtacatatggtactctttcataaatgataaatgattctgaatgttagtgttttatgttcatataggaaatattttcattgag

SEQ ID NO: 126348 - DNA, 2804 bp, Homo sapiens
cacggaccctccgttctgcattaagccccaggttctcttctggctttgaaagggcccgagtgctcccagtgtagcttcgtcacatcgtcacgagcccctgtggtcatgggcgacctcacacctccctccctgagttctgctctgacataaggaagtcctcggtggctggtgcagcgcggctgtgctgtgctggggaggcagccgttccttcgggggtccttgggcctgcagtcccctcatactcacccttcacccaacatattttccggtgctgatatgtttccagactccagcgcaacctggggtgctctccagacccgtgcaggggccgcctggggtacacggaaggaagttgagtcctagtgcaaaatgcaggcggacgttgccagagagtgcgcagcaaatgaccttcattgccagttccaccctactcctctcattttttatactaagcaataactttccaaagcaagaagttcaggatggagagagtcccctcctgtgtaggcatggggtggatgcggtgcccacctgggctatgtggggagcaccactgtctcgggatgcgcgaattttttttttttttttaattaacagggcattagaagatgattttgccaaaattgtcatgactctgaattcttgctgtggggacttcctgagttttctcagtttttacatctaagattagtcttggctgaagagaaatgagacgtgattatactactttttcaattgcaggtttaaggagttcagatttaatgaccaaagtcatacagatcatggaatctgtcgtcgtcttatacagtgtcagcctcgagtacatttattaaccttttggggctgtcagttttccactaggattaagattttggccgggcgcggtggctcacgcctgcaatcccaacacattggggggtcgaggcggacggatcactttgagcccaggagttcaagaccagcctgggcaacatggcgaaacctcgtctctactaaaaatacaaaatatatatatatatatatatactagctggggcacatagtggtgtgcacctgtagtcccagctgcttgggaggctgaggtgggaggatggctagagcccaggagatgggtgttgcagtgagctgagaccatgccactgtactctagcctgggtaacagccagaccctgtctcaaaaaaaaaaacaatttttttcataacataattcccatttttatttattttgagtcactcataattaattgccaaaaaagcattttatacattgagttggggggtagtggatcttagtgtggtgttgcatggaggggcgagattttatatttataatcaacacgtgggttaacatgtttttttgaaatccaagcaatacacaggaaatttaagtagaataaaaattgcagcccatttttgaaatgtcagcatgtgctgtgttcagttcaggtttttgttgtttgttttgttattttttaactaataagttggttatcagtggtgggttttcaaaatgtacttgttctaataagttgtacaatgaactaaatcagtggcattctctagataatgtgggggaaggttagaatattttctggccttctatggggtagcaacccagaatcaatctgaattagtcctgttttggtggagtttgtacattttaaatcctataacaaaaataatctagttttcatttccttactagctagatgcgaatttgtctttttgaatgaccctgtcaataagccagaaagggcaacccagaaaaagtgctccccacatccttctgagacttggcctgtgtgtgtggacgagaagccattcaccgtaagggtgcagaaagctcgaccaagccgaattgcaaacaacgttcgttctatttttaaatgtacaggttcgatcgtttctatagaaatgggtttatctaagaaaagtcttggtttgtcttgctgctgtaaaaggcctttccaaacccctccttttattcctgtttcccgaaataaggtatttgtagagttaaggacctactgcatgcctgtccccagggccccggtggaaggaaggcagcgcctgctcttccttaactcagcccatcatctgaaaattcagaagtgaaccaagggttagacgccagaggttgggcttctgttagagtggcttcaaaacatgagccttatgggaagtagccttaaaaaaagaatgggtatacgcagtgacttccgatggaaatctccaaaacaatattcctaagtagcaatggggttggctcaagtctttattaacaaagaacattctctttcatctataaagaaattcttaaagatgcattgacagtgttgaattaccaacagcctgtgaagatcagtttgaccggtgtggacacgtgctggttaagcactcaggcctacgtgggccgagcgggatcttgatcatggggctggtgtatggatccaccgtcggattccgtctgcagaggaggacgtagggggccgtcacacccaccaggcctccctgctgtgctttaacacaggcagaagaggttcatggcaatataatagtcaatgaactttcagtttaaattgtgtacatttttaaattgtaagatttttactgtatattgatgcatagtgtgattcaataaattgcttgtaatttaaaaactatttaatattcaaaataaatatagttatatatttataaactctgttggccgcgtttcttctgtgttttgtccaccgtgcaagggccacctgggtgggtggcctggccctgccctgctgtgagcgcccgcagcctgtgttcca

SEQ ID NO: 126349 - DNA, 1042 bp, Homo sapiens
aggggtttccacctgccctctcccatccttccaggttttggcggcagatgggaggccacctgcggatggtggaggccaacagccggggcgtggtgtggggcatcggctatgaccacacggcctgggtatacacaggcggctatggaggcggctgcttccaaggtgagggcggcccacagcccccccggagccttcctgggcgttctttcctctagtccccgtctgggttccctgcccaaggccagggccattgtcccagtgttcacactcggctaacagctggctgacaggtgaccttcaccactgccagcctccacccaggatggtccctgccagtacccacttcgagctgagggcctcgaaggttccagagaggcagcggccagggtccaccagcatgtccagcctctcattttcagggtgttaggtgggttcctccttcagggtaggcactcgctgaacttctgtggccccccgatttctaggagccagggtccctctgttcctactggaaaacgaaggcggaaacagacactgaaacggggcgttccaggccgcagcccacatgccccacgggggagcagctaaccccagagaactgtggtcccctgataccccaggaacgcatatctgagcaggctttccagcttccctgtgtgtgaggcaggaatgacctctgtcttcattttacaagtgaggaagccggggctcacggaggttacgttgatggtcccaggtgcctttgtaacacagagtgagctgggtgggcctcatgcctccctggtgctaagtaggagggcaaggtgggaagaggcgctggaggggtgtggatgggagatttaatgcacagcaggctgtgctcatcgaggttgcacaatcccagaataatcacggtcccggaggagaaaacccaagccaggccgacccccgtgcgataagctcaacaggactgtttgctcctctccgctgacctggctccagcccgccctccccgtctctctgggaatctgtgcttcagacggaaagccagagtcccaagcgg

SEQ ID NO: 126350 - DNA, 1009 bp, Homo sapiens
gggtggaaaagaccgggggcttttttagcggggtggaggttgaggggacaggatgagtagtccccgtggcggtccgatttctcctccctgcaccctaatgacctgctttcccgcccacagggatacccacccaccatcccagggtctacaacatccacagccggaccgtcacccgctatcctgccaactctatcgtggtcgtaggaggctgtcctgtctgcaggtgagtgggtctgcagcctggggactggccctggaagctctgaggacccccgccctaacccccaggacctcacagctctgcttgtgggagtgggtccggcttgacttggatcttgaccagagccctttatgggagggacagacaggctgcccgaatgcggtgtgggagagtgcgggtccgctcacccttggctctgaacacattttgtgggggcaaaagggtggattccttttcctagatcttggggcattgcaccccaagtgattgggatgtagaaatggtaacaacgggactcgtggtcctttcgtctttgttctgggacttgcaaggaatcaggtgtctgctttttccttcactttccgcaagtttactctgcagttgatcgtcgaaggtggtggaaggtttcattttcccggaaggggcatttggaagtaagtgcaccagcaggacagacctcagtgggagaagcgacggccgtaagagctgctttatccaaagttggcttgaaacgctcttccacgagctggaccaggatggaaaccccgtgtttctttgaggcaggagttatttttttcatatcctcgcattggacctgcacacgctttttggtttttatagggccccgaggtgcagctagaggcttgttttgtggaggttttgaggattcacatttaaataaggattaattaaatataaacccttggcagctgggggtgttcagattgcttagaaagtaggggcagagttggccgggacagggttttcagctgtgtctcggaggaggaa

SEQ ID NO: 126351 - DNA, 1008 bp, Homo sapiens
gcggatgtcgctcagaggtccagggtgcggctcagtggccagcgtggaggctgccacggcccttggggggcagaggtgggctgtggagggcacggggtggtgactgtggagcccgggaggggctggaggggaaggagcctgtgacagccttgggcttccagacgatggaggtggaggggctgctccctcctaccacctgtgacctggaagccagagctcccctggttgaggaagtggctgagttagctgggatggctctgcccatatgtatggcctgtgggctgtccccgtcctgacagtcttggcctgaggtgtgggggcagcggatgggccggagcttgggcctgggctgcttgctgggcagggctgcagacctcggtgcccaagtgctccctcagtggcctcctgagtctctgaccttgggctcagcccccagctgtgggccaagtggcactgctggggtgggtgtggtggcaggcagagtctccgggcaccttctcaggcctttcttccacaggggaggcgagggctggccctggccattgggtttgctgggaatggccctgggaggtcctggtgaactgtccctaagccaggcagctcccctgtggggagtggacaccctgggacagccagagcctggctggagctgctttggggccacctcgccctgcgctgagcatggcttcaggccctcagccctctgaggaagccctgcgtctccccttttcctggcgaggcctggccttccagcggggtggtggtctggggttgttcctgggcgtggatggtgccttgaggccaccatgtgcgcagagggcagcttggtgccctagggccagccccctgtgacactgcctttgggggctacctgggagggagaactgggacctgcaggatgggtgctcgtgactggggagcccatctgggttcagatcccagccacgcctttcccggctgggagtccctggacacaccctcagcttcagcctcctgtaaagtgcctgt

SEQ ID NO: 126352 - DNA, 1050 bp, Homo sapiens
ttcataatttatattgcttaaaattatgatttgcatgctaagatgcaaacttacgtgatatcttctttagacataatgctattaagagcacatgctttataaaataaaactggtctcattcatatcaggtgcagaaagccagtcctgaaagcatagactatcccttattctggctgttattaaggaaaaaattcatttaaaaaatacagtaaagattgaaaccaagtttactgtttcttgaacagaataggaagaaaatattttaaatggctgagctggtcattagactattactcatttatcttaaaggcagaaacttgtcaacccaactacgtgaaacagagaagcatgatttgcttaagcaggcgacattagagttaggcctctccactgaagcttcccgaccgtcagcacgtggcagacaggatgcgcccatcattccgcaagggagaaccggagaggcccgggagagtccttggctgtcctctcatcgaatgatgggtgccgagcgatcattcgtcacagtcgggcggagtttcacagtggcaaaggggttttctccgctgcaggggataagaaaaatctttcagaacttctgctctacgagggaaactggattttaacagtgctaataacccgttcttgccctgtgagactgggcggctgaccacctccccagcttgtacaggtcccagcagcgttttctgagtgtgaaagttttgttcagtgatgattcctacaccataccacctgctgcagaacgatcccaggttttaagcgttctggacgtgggcacccacacctctttagtcctgcattgtgtgtgacatgggggtcactctggggtggggaagccctgctcccagcgtggtctaaagtagttggtaaagcgagcagggggctgcactcccccatggctccacaggccgaggcctttctcaggctggaccccctgggctgggcaccgaaggcccttccgggggacactacagggaagagcaatgtcacacactgaggctcacgtaggaagccacgcctacctgagaaaag

SEQ ID NO: 126353 - DNA, 1063 bp, Homo sapiens
gatcgtgggggccgggaacgtcctgctgggtatacggagtcacatcatgaaaattcattgtgtgcttttctgtctgtggtattctgtaatacaatgtttactttaaaatatgtattgggccagggacagtggctcatgcctgtaatcccagcactttgggaggctgaggtgggcgcatcacctgaggtcgggagttcgagaccagcctgaccaacatggagaaaccccgtctctactaaaaatacaaaattagctgggtgtggtggcgcacgccggtaatcccagctactcaggaggctgaggcaggagaatcgcttgaacagggaggcagaggttgtggtgagctgagattgcaccactgcactccagcctgggcaacagagtgagactccatctgtaaaaaacaaaaaaacaaaaaaccaacaaaacaaaaacagaaacaacaaaaacatattggacgtgttcaggcagatttcccgtttaacatctgcatgtttctcagggacctgaaaccccagcactccttctggatacaaggctggcaggagcctctctgcctccctctccactgcaaaggagacccacgagggcaggggcttggcacatacggtgcctcttatctggtggcccccaagggtctcacagcatcctccctgcgtccctgtctcaaccgcatacctcacactcagcccactgtggtggtcactgaacatagacctgccctcctctctgttccctttccttgcagtgggggacacctccaagccacaggcagcactgccaccggcacccagggccccgcgggcactgcctgctgcatgtcctgtgtccccaacaagacaggagaccactaaggccacgaaaccagcagccactacgagagtggttgggctgcaactggagactatagagcgaggccaccaagcggctgactgcggccagggtggacacatcttgtgatcccccatctcccgcaagaatccaagaatccaaaatgtgtgtgtggacactggctgaccacccatcactcgatgcctggtccacacccccttcccgactgtac

SEQ ID NO: 126354 - DNA, 1091 bp, Homo sapiens
tgctgtgagaattaagtgaaaaaatcaatgcaaagtcctttggacagtctctaggcaataactactgttagtatctgatctggaatacggatttgggggttttcggcatggaggtgctcagcaaagcccatcagtgtatttcaagccatgggagtggatgagatggcccagcacaggcaggaaggatggacccagggtgactcccaagaacactgatgtttaattgatgggcagaagaggggtgcaaagagctggtgaggcagaagacaaacagagcacaggtcaagcagccggggccagagaacattccagaaaaagcatacaacagcgttaagggctgtaagataagaacggtaagataagtgtaagataaggacggaaaacacatggcttgggtttagcgaccaggaggggcagggcacagggagggagtttcagagggctgcaggactgcgaggagtaggtggcctgggctgggtctcctcacagcagcaaagctcggggacaacagaaatcacggcagacagcactgtgagccgcggtctcatctctgactagtccacgagagctgaggcttagggcagggcctgcgacacagctagatggtggtgtgttacagaaacgacaaggcaggggtttctgtcaccgggagagctcagccacgttcagggctaccttggcgtgggcacggtcactgcttctgtctcattttcttccagcaacttcgtgtacgacgacgggaaccaacccctcctaccggcaaagagggagaaaagaccctatcagcagtagacatgtggacggcaacctccctgaacaacctggtgagagctcagggcagacaggtccactgctccagaaacgcccatgtgtggaggaaatgaaattaaggcttttaataggtaaatatggactttcacatacactgaacaatgtgtattgttaacaatttttttttaatagagacagggtctcgctctgttgcccaggctggagtgcagtggtgcgatcatagctcacagcagcctcgaactcatgggctcaagcaatccccctgcctcagcatccgagtagctgtgactagaagtgtg

SEQ ID NO: 126355 - DNA, 1049 bp, Homo sapiens
acatggcaaaaccctgtctctactaataatacaaaaattagccaggcatggtggtgcgccccagtaatcccagctactgaggaggctgaggcaggagaatcacttgaacccgggaggtggaggttgcagtgagccgagatcactccactgtactccagcctgggcgacagagcaagaaagactccaccttaacaacaacaaaaaacaaacatgtgcccagctaccttcgcccctaaaggtaaggggatagaggtgcgaaaaggtggtcctggaagtaataaagggggacctgtgattcccaccaacacaggcaaatttggcccagatcaagttaggaaacacacgattgaaatctggaagagaaaactggctcctaccacattgcttctctcgatcatgggtgaagcctgaggagttccagacacgggggtagaggctggggtctttatttcttcgatcatattcatgattttctctggcactttgatggcatcaacacaggtctcctgccaccgaggcagcttggaattcagtagttctgcagactgcaaagccaaaagaagaagactaaagacaaagaagattgtctgaagagctgagaaaaatgacatcacgtcatatcgctgataacagattactggcttagcaccaggagtgtgggggccctgggttaaactcggtgagcactttaagcacctagaggatcagctgtgtctcaccggctgagaggggcaaaggctctgactcaaaaggaaatttcctgatccctcagtgtgaatacagagcatgggactaatacggggatggtaaatggttaagagcaagaacagaaactcaaagggagggagggagcaatctgtatgaatcccgttttccaggtggccccagaaacgccaaccatcactttctccctcccactcctactaaaagcagcacctccaacacaggccacgggccccgtagttgactctgaccgattcagacattagagaagtgaatcagacactgtcctgagagtctgtctatggggaagagggactgggtgagtg

SEQ ID NO: 126356 - DNA, 1033 bp, Homo sapiens
agatgagcaggggaaatgcaccagagtccatggttacaagatatccaaaggcttaaaaaaaaaaacaaaacagcagaaggctgggcacagtggctcatgcctgtaatcccagcactttgggaggctgaggcgggcagatcacgaggtcaagagattgagaccagcctggcaaacatggtgaaacaataccgctcctactaaaaatacaaaaattagctgggcgtggtggtgtgcacctgtagtcgcagctactcaggaggctgaggcaggagaattgcttgaagccgggacacagaggttgcagtgagtcaagatcgcgccactgcactccagcctgggcgacagagcgagacttcgtctcaagaacaaaaacaaaaataaaaaaacaaaaccagcagaaaaaacctacagctaccctaaggccccctaccccacagcccctatttcttcctctgtgcttagatctccccttcccaaatagaaacagactggaaaggatggctgtggtcttctgggggaaaaaagtgggagggccctggaaaaacagcaattatgaagtttttgtttgtttttttttgagatggagtctcactctgttgcccaggctggactgtagtggagcgatcttggctcactgcaaactctgcctcccgggttcaagtgattctcctgtatcagcctctcaagtagctggaattacaggcatgcgccaccatgcctggctaattttttggtattttttttagtacagacaggtttcaccatgttggccaggctaggctcgaactcctgacctcgggtgatccgcccgccttggccttccaaagtgctgggattacaggcctgagccactgtacccggccacaattatgaagtctgaagtatatgcatgctggtaaaaccacacaccagcccacgagggagaaaaacatcactccactcagacacacaaaaaacgcggaagcaccatgtacacccagagcaccgctaacatttctatcagtcctgccctttcactgaaagttgttgaaaa

SEQ ID NO: 126357 - DNA, 1061 bp, Homo sapiens
gaagagtcatggacaattcatagaaaaaaaaaaagaccaaagatagattgtatttttctcatcttccaagaagattttattgtctagttactccgttttggtatttggtattcacaacttcatcatgaaactttataactctcatatgagaaaactcgaaggggtgttatcacatacatgaaaatcatgaatcatttcaaaacgttcattctgtgcgcctcgagggtcggcctctgtgacagcggtgccatttctgatgtctagcagtggatacttacacttagctctctcctggcatcggctcactcactgctgtgtgaataatgtaggatgcttttgcctaaaagtaaaaaataaaatacccaatgaacagtgagttaagcaatcagcatctttattattccacatgaggagcagcaggttgtcagtttatcatcactagggacccaggttccttctctctgtcttctcatcctcatactcatttcctcatggtgccaggatggctgccactgcctctccaaccatcacatcctctctctccccattgtctccaaaggcaggaaggggaatttcttctcaggtgtgctgacaacctttgccccaaagctccagcacacagccccttataccccacggcccaatttagatcacactcccaggacccagctgctagcaaagctccccaggcatgagccaaggaacaccaggtcagagaggatgtggctgttaggagatggcctggtgacagcccccacgtcggcatctctggtattaaaggtctgttttcaacaactttcagtgaaagggcaggactgatagaaatgttagcggtgctctgggtgtacatggtgcttccgcgttttttgtgtgtctgagtggagtgatgtttttctccctcgtgggctggtgtgtggttttaccagcatgcatatacttcagacttcataattgtggccgggtacagtggctcaggcctgtaatcccagcactttggaaggccaaggcgggcggatcacccgaggtcaggagttcgagcctagcctggccaacatggtgaa

SEQ ID NO: 126358 - DNA, 1043 bp, Homo sapiens
tctagcctggcaacagagcgagagactgtctcaaaacaaaaaaacttgtgtttattcatatggtactttggaggctaaaaagtccctaaacaatatcaattaagcactagttaactctagggcaggagtttttggttttgttttttgtttttttttgagacagagtcttgctctgtcacccaggctgtagtgcagtggcgcaatcttggctcactgcaagctctgcctcccaggttcacgccattctcctgcctcagcctcctgagtagctgggactgcaggcacccaccaccatgcctggctaattttgtttttgtatttttaatagagacggggtttcaccgtgttagccaagatggtctcgatctcctgaccttgtgatccgcccgcctcggcctcccaaagtgctgggattacaggcgtgagccactgcacccggccatatttatattttttaatgtaaattgcttacttttataatatttaatgtaaagcagataaatatatatattccgttttaatggacataatgtttttaaaactaagctaaaattcgccatctcctacctctgtttgcaaattacccatttaaagataaacctaattttaaatcttatgatttctgtcttgatttttacgtatgggaatacatgtttaacatttactaacccgagaccgggcgcagtggctcatgcctgtaatcccagcactttgggaggccgaggtgggcagatcacgaggtcaggagatagagaccatcctggctaacatggtgaaaccccatttctactaaaaatacacaaaattagccgggtgcggtggcgggtgcctgtagtcccagctactcgggaggctgaagcaggagaatggtgtgaacccgggaggcggagcttgcagtgagccaagatcccgccactgcactccagcctgggcgacagtgcgagactacctctcaaaaaaaaaaaaaaatttactaacccaagactacacgtgcaacaggcaactagctgaacaaaattgaaaatactcaaattccagttctt

SEQ ID NO: 126359 - DNA, 1038 bp, Homo sapiens
ttttataaccacccactctagtgataattgacccactcctaagatgattgcaatagtccattcatgagggctccctcctcatgacccagttaatccatacttggtcccacctcccaaaactgttgctttgggggttaagtttttaacacattaactttttaaattttaactttaagttctgatatacatgtgccagatgtgcaggtttgttacataggtaaacgtaatacaggaattttgagggacacaaaccgtagcagaaactatctatactgagttccagattataataaaccaaccgcatgttggacatctcaaagataaactacccatacttctaactcaatatgtcaggtaaatttattgttctctttattttccctctattcttcctcctgtttcctatttcttatgtcattaatgctttccaagtcattcaaattcaaaactttggagacatctgtatctcctccacccccaattttattcaaattctagtgcatttctaagtcctaattctgcttgtacaatatgccaactctattctcactgctacaatctcattacttctgttctaaactatacagttgcctctaactgaacgattcagctctacaatgtccatttcagcttgtacattctattgccaggtcagttttcctgaagtacagcactaaagcattgatctgcactgctcagaaaccttcattatttctctatgcaaatgtgtaaactctttagtctccatcatttttccccacacccacctattcattccaatttttactatatcccttgatctaccctcactccaaagtaaacttatgcttttcacaaatgacccatatttttcatcctctggcattgggactcaggttgtttcccatatctggagacagatctggaatgatctttcttgcatgtctaggaccacaagacccactctcatccttcacggctctgcttacacactaccccctccacaaagcttaccctgattttgctcagtttgaaatgacacaataacgttctttattt

SEQ ID NO: 126360 - DNA, 1070 bp, Homo sapiens
acacgaaagctcatactgggtttactcacagcacaacaactttgtctacctgaaagatcctgcatgtatgactcatgctacccatgaggatggttatgtgagtggcagagaccagggcccacagattttcctccacttgaaaagtcgtgcagatctgcagcagtgaatcagctccacctaatctcttagtgtaactgatgctgcagcatagtaaccacccactcattcactatgtcggctggtcccaggtcagctgtgagcccagtatggacttaaaccgtgtgctgggaatcctgatgagctcattccgcctccattttattgccccatctgtttggttctcttgttcttctcacatgcatttttatcttggtcttctgggaaatgtgctaatttccaccatggtgtgagaggatcccatctcatactttcttacatttccttctctctttctcagtgccacttgggaagtcaagaatgagagtgtgagctctaacagaatccaaggacagcttcctgcaaacatgattcgggaactgtcctcggtgctgaatttcaattggaagggggaaatagacgtgtgtgtgtgtgtgtgtgtgtgtgtgtgtgtaaagttcagtgcagataaaatagaatttggaagctccagaggatccctactaacacacatttatgcttaaaatgctaagacgctttcaagagtggatttttttccccactagattgaactgcatggtagtgtggaaagagcttgagctttggagtcagacagctttagtttcagtcccagttttatgacttgccactttaccttgagagaatgatttaacctctcccagcctcagttttctcatctctaaaatcaaagctaaatttactacaaaatattgttaggcttgagtgagataatgtaagtgaacatgtttggcatatagccagtgcacaatagatgataattgtccttttcttccccttttctccactgaatttagacctgtattatgtaagtccctttaaaaacaaagttgaaaaaaattcttccctttctgcaatattctttagagttaaat

SEQ ID NO: 126361 - DNA, 1037 bp, Homo sapiens
gagctgagttttggtctctacccaacatagaattctaggcgttggttagaatattgactttttagtaagaggagaaaaacggctttttgagaagggaaaattagattcacaagtttcaaatattgcagcaaagtaattcttatctgactttgaaatcttttccataccaaaaaagcatcagtgagatgctcccctgcctgccagtggcaagattcagggcttgcgttttggaagcttctccctgtgtggtcgggccatcacagccacatttcacaatttctttttaactctttctgtgcccctccctcctccccggtggctgaaagcaccagctcagagcaaacgtgtccaatgctgggctgcccggcgacttccgcgaggtgctccagcagcggctgggggagctggagaggcagcttctgcgcaaggtggcagagctggaggacgagaagtccctgctgcacaatgagacctcggctcaccggcagaagaccgagagcaccctgaacgcgctgctgcagagggtcaccgagctggagcgaggtgtgtgcctggcctgtttctctgtctggcagtggcctgattttcaccacttgtggtcagacatgcgattctggttgatggacagcagggattgtgacaccacatgggcctggttcccgagtgtgtgagcaaataataaaggcgactgaacaaggtcatctcaggaatgagctgccagccccactggcattatccagggaaaagtgaaagtgtccaggaccagcttcgataagcaaccacacgggcgtttcagtcctttgttaactagtcctggcagcggattctgtgtatctttctcttctctgctcacactgtggtgagtaagtttctcccacaggagacagagtgggagggatcaggggataattcagattgcgtcatcaacccccaaaccactgggtggcttgggtttgaagttgtaggtttgcccgtagtgggtgtttataagactggaattttcccagatgcactaagctgatgaagccacttcccca

SEQ ID NO: 126362 - DNA, 1027 bp, Homo sapiens
aagagagtattaactagaaggaaccagacagagcctctgtcacccaggtgggagtgcagtgatgcaatcatagctcactgcagcctggacctcctaggctcaagcgatccacctcagcctcctgagtaggtggaaccacaggtgtgtgccaccctacccagctaatttttatattttttgtagagatgaagtcttgctgtattgcccaggctgttcttgaactcctgggctcaagcagtcttcccacctcagcctcccaaagcactgggattacaggcatgagccactgcacttggctaattttttaaattttttgtagagacagggtcttgctatgttgcacaggctggtctcgaactcttggcctcaagcaatcctcctgcctcggcctcccaaaatgctggtattataggtgtgagccactgcacccatccaagagctttttttcttctagatttcaagaggcctcttttcctgtcctaaaagatggagctaaattctctaacgtgccccatgcagtgcccacaaaatcttccttttctttccttttctgggcgtccttggggccctgtacttgctgtcacctgtgtctggggttctcttctgcaggtctttccaggccttccctgcatcctctgccttccctcccccggccactccccgtcttagcaggagccactgcctggacttccctcgcgtacctgctgctggtttcatgtcaccttccctgcctgaatgtaagctccctaaggacaaggactccatcttgtgtcctgaatcctgccagacttcagccttttatcagtggctggtgtggagcggtctttggtcgcttgctggagggtccatcaaggctgtgtgagggaccttcttgtgggtctagcaagatgtggctctgggccgtgctggtgggtggtggggtggcctaacgcactcctggcctctcttcctcccaacccccaggcaatagcgcctttaagtcaccagatgcgttcaaggtgtccctcccactccgcacaaactacct

SEQ ID NO: 126363 - DNA, 3076 bp, Homo sapiens
ggagaacctggccccctggcaccccatcaagcccgggggcgtgctgatccttggacaagagcaggtgggtgcagggcaggtgcaggtgggcacagggtgggtgcaggatgggcacagggtggccgtgcgccctttcagggatggtgcgaggaggggccaactgagcagcacgaggccaggcctgcagctgttcctgctcccggccccagctgttggcccctcagacctggccacagtgtcctgacagccaggtcgggggagtgagaacccccgcagcctggcccttgctgtcctgtggttagaggttgggcgtggggtcacggcctgcatggcagggaccaggtgggtgtgtggttcaaacagattccaaatagaacctggcacagaggggtgtgagtgtccctgtggtcatgggtcatctcgtgacacaggctccagcttccatctgggaggaggctgtgtgagggaccctcctgggatgctcatggtaccaactcaggattgtggggctggtgtcttccaggagccccctgctcagggtcttaaccctgatacccagcaaggggcacttaggtaatccatagtgggtgctcagcctgtgggggagacagggatgaaagggtggcacctcaaagtgccctcaagaaacttaccatctaggggagggaatggctaagttggctgtctggtctaggacagataagtgttggcattccagtctgtatttgggtttttgatgatggacagtggggcgtagactccaggtgcactggggggctttgagtctggttccttcttggcccactcctccctcaatttcccctgctacatctccgctgggaggggctgggagtcatgagacctggctctgatcctggctttgggactttgagcagtgtcttcccttaccagcctcagtttcccctgtataaaatggggagatttgagcgatgccacctcccagttctgacatgcctgggagcttcagaacctacagaaacaggtagtgttggtcagagctggggggcatcagagaaatgcccaaatctcctgtctgcagcccgtgtgcagggggacttgtgaaccagccctgacgcagctctcttgttcccattccccaggacaccgtggggggtaggtttgatgccactcaggcatttgtcggggagctcagccagttcaacatatgggaccgcgtccttcgcgcacaagaaattgtcaacatcgccaactgctccacaaacatgccgggcaacatcatcccgtgggtggacaataacgtcgatgtgttcggaggggcctccaagtggcccgtggagacgtgtgaggagcgtctccttgacttgtagccgccttctcctctgtccaggaggccgggatcaggctgttgccatggaagttcagggccatagactgccccacttaaactcttgtcagtctgggctcagggttcccagagctcattccccaggaatctctaagaccagggctggggcagtgtctgtcactggcttgtttgttccctaccaatattctgttgctgtttgaagtagtgccagggtcccctgggaagatgcccccaagacacctgccccaagtgggtggatatctgccttcctgctgcaagtggaggcaggtccagcagcccctcttcagagcccctgtaaatgctatcgcagcctgagtcctgccgccttccagttccttggtgtcccgtgcaccccttctgtctgtcccctttcatggctgtgcagccgtcccgctggagtggccatgtcccttgtgcattgagtgcatccccgctggtgactaagctcgcagcaagcggctaccccccgatctgcaaaagggcctctccctttgtgttctatacattgtgaatcttcccgtctgaagaacgcccagcctgcccagacaaagccccgccttccccaaagcagaggggctgtctgtgtctccagaaaggggacatcgggggggaggggggctcagaaaggagaagggctgtgatctccggtcccttcccccatcatccttccttagactgatgctttgactgaatcatcactagctatggcattaaaaggcctctcttctcatctggtgccaaaggttccgttgcagctttttacaaccatccggtgtggtttggaggatttgttttttttttttcccaacagaaaagaacagccattagaagaaggctcccattttctgatgttccgccccactgtgaagagtgtgctcgttttaaattcatgttgattcttgtaagcactggactgtcttcatcaagtatttccctacagaactcctcaagaaaacagagatcatttggctagagattgtctgagtgactccaagctactcactgtattggacgggagtagtaatttattttaaagataaagtgactaagtggggaaatttataaagctaaatattatatattttatttttcatacatgtttgaagtgcaaatctgtggatattccatttgtaggaccaagtcgacatgcccatcctgacattgtatgctacgagaactcttctgatgatggaatttcgattaaagtgcactgaaagatgcttctgtgtttgtcttcctcatgttctggggctgaaggtgggaaggggtagggctttgcaacttctggcagaaggatgatgtctctggtttgccgcagcctgcttctggtgggtttgggggcgctgaggatggttagaggagggtgtggtccagctgtccatccttcctatttcaatgcctggctcaggctgtgggtgcctggcaggctctgcccaggctccttgtccccagctcacccctgtcttctcaaccaggagagccagcttagctagaagacctgcggccgccttccaggtgtggtacctgcttagcgtctactctgtgtaggtgttctttagacatctcattgaatcctccctgaatgagctaatcccattttacaggtgaatacacaacaattaaagctattttgggatcatgcagccgatagaggatagagctgggctcaaagccgtcctgtggctctgagggctctgtcccttccac

SEQ ID NO: 126364 - DNA, 1103 bp, Homo sapiens
tggagtttccagcagggtggtgtgcaccactgaccaggaggggttcatttgcgtggggctgttggcctggatcatccatccatctgtacagttcagccactgccacaagcccctccctctctgtcacccctgaccccagccattcacccatctgtacagtccagccactgacataagccccactcggttaccacccccttgaccccctacctttgaagaggcttcgtgcaggactttgatgcttggggtgttccgtgttgactcccaggtgggcctggctgcccactgcccattcctctcatattggcacatctgctgtccattgggggttctcagtttcctcccccagacagccctacctgtgccagagagctagaaagaaggtcataaagggttaaaaatccataactaaaggttgtacacatagatgggcacactcacagagagaagtgtgcatgtacacacaccacacacacacacacacacacacacacacacacacacagaaatataaacacatgcgtcacatgggcatttcagatgatcagctctgtatctggttaagtcggttgctgggatgcaccctgcactagagctgaaaggaaatttgacctccaagcagccctgacaggttctgggcccgggccctccctttgtgctttgtctctgcagttcttgcgccctttataaggccatcctagtccctgctggctggcagggggctggatggggggcaggactaatactgagtgattgcagagtgctttataaatatcaccttattttatcgaaacccatctgtgaaactttcactgaggaaaaggccttgcagcggtagaagaggttgagtcaaggccgggcgcggtggctcacgcctgtaatcccagcactttgggaggccgaggcgggtggatcacgagatcaggagatcgagaccaccctggctaacacggtgaaaccccgtctctactaaaaaaatacaaaaagttagccgggcgtggtggtgggtgcctgtagtcccagctactcgggaggctgaggcaggagaatggtgcgaacccgggaggcggagcttgcagtgagcccagatggcgccactgcac

SEQ ID NO: 126365 - DNA, 1092 bp, Homo sapiens
gagagagagagagaggaagaaaggaagaaagaaagaaggaagaagaaagaaaaggaaggaaggaagggagaaaaaaagaaagaagagaaagaaagaaaaaagagaggagggagggagagaggaaggaaggaaggagagagaaaagaaaagagaaaggaaggaaaggaaagaaaaagaaaggaaggaagaaaagaaagagaagcagggaaggaggaaggaaggagggaaggaggaaggagggaaggaagaaggagggagggagggagggaaggaaggaaggggaaataagactgaaaagactgtgatttggagtcagtgggacccaggtttgatgtcgaattggctgagtgacccttgggcaagtcacttgagctgcctgagcctcagtttctccacctgggaaatagaatagttgatgccagcccagaggtggctgtggggctccttgccacacaccattctgaaacacagtctttgtttctgggctcctaggcctgtatgaactcaatctcaccaccgatagccctgccaccacgggagcggtggtgaccatctcggccagcctggtggccaaggacaacggcagcctggccctgcccgctgacgcccacctctaccgcttccactggatccacaccccgctggtgcttactggcaagatggagaagggtctcagctccaccatccgtgtggtcggccacgtgcccggggaattcccggtctctgtctgggtcactgccgctgactgctggatgtgccagcctgtggccaggggctttgtggtcctccccatcacaggtgagggtcgctcccatttgctagtttgccttcaaacccttggtgcagagaaaaacatcaagcttcgctaggaatcagatcaatgcagattaggcccgtaggttctgggggattaggcccgtaggttccttccccgggtcagtcgagttagaaaggatctgaaaatggcagtgattgcccccaggaggtattgtgctaaaagggacgcctattgctgctgagggtatacattaatacaaccctgtggagagcgactggtcaataggtactgttggttagaaattattgtagtct

SEQ ID NO: 126366 - DNA, 1769 bp, Homo sapiens
tggggaaaagaggaaggatatttcatggtaaatgagagttatatgaaattcagatttcagtgtccataaataaagttttattggaacacagcctcatttatttacatgttgtctgtctgtgactgctttctggttatagcagcgctgagtagttgtgacagactgcgtggccacaaagattaaaatatctactatgtggctctttacagaaaatgtttgccaacccctgactcagagaaagagaaaataccgtaggaaggaacagtatctgcatacaaaaatcatgtttcaaaattaatagacaaaattggagttgggtaaacttcatattaaaaaaaccagaaggaatagtgttagattctggattaagatgaaagcgtatcgattatgtaggcctttaggtaagattttcacagagattgtgatcctgtgccctccataaattgactaactctatgcttcttttcataggctggttgaactcatggacctgatacttttctcttgagaagcaaaccagcccaaaagaaaaatggcgtttgttgcaacacagggggccacggtggttgaccagaccactttgatgaaaaagtaccttcagtttgtggcagctctcacagatgtgaatacacgtgagttgatcctttttatcattaagaaatgcataaataaggccggatgcggtggctcacgtctgtaatcccagcactttgggaggccgaggcgggtggatcacctgatgtcaggagtttgggactagcctggccaacatggtgaaaccacgtctctactaaaatacaaaaattagccaggtgtggtggctcacgcctgtagtcccagctacttgggaggctgaggcaggaggatcgcttgaacccaggaggcagaggttgcagtgagctgagatcgcaccactgcactccagcctgggtgacagagcgagactccctctcaaaaaaaaaaaaaaaagagaaatgcataaatatgacacatttatctcagctcagatgttgtgtactttgagattaatcgtaacagtaacttttattctcattttccttttctctaccttgtagagaagcaaagtgatgagtaatactggctggagccccaaagaggcacgtgtgtgtgtttgtgtgtgtgtgtatatgcttgtcagtgcatgcacgtgtatgtctgggagtacaaatgggtgcgactggttgtagggaactagctatgtgccttctattaggccatgacagtcaaactgataagatctgattgcttctcttaaattactaaatccaagttttgcattaacataatttccttaacataatttcaattacctgatgcttgttttgccgttcacagctgatgaaacaaagttgaaaatgatgcaagaagttagtgaaaattttgaggtatgagcattatattttctatttttcattttgaggtaaatattcttattcactttcctgtcctgctttgtcagtctttttactagcaactcaaagatcattgtctttgttcaagtaatttagtatatttcgaaactgaaatctgaaactttgtacacagcgttttccatcttcacgctggtgatagcgaaccccataccatgttgaggattgtcagttttgttttggttggtttaaaaacattttttcattttaaaatatggtagctcttttaggctaccatgcctgttgggatgcactcagatttattcttgtacttttctttctttcttttctttcttttttttttttttttgagatgga

SEQ ID NO: 126367 - DNA, 1050 bp, Homo sapiens
tacagtgcccagcccttcctattctacttttaaaatcagtactaggatcaataatggattagattagattataatataattagtatacatctaattagcacataatgaatatacatctaactaatacattggtttgctcaggctctttgttttccagatcaagaaactgagacctagaagctaaataacttcatagaggtttcatacttagatcgtggcagagacaagctagtacaggttccaggttcagcatttcccaaaggattggtatttctaattttaataggaaaagttagcatttagttttcctgaattggatttcagaaatacaatcatcctaatttaaaattatgttattactaaataatacaagtagcacaaatttgcttttggctaaaatgttttatattcctttgcagttattataatgtgtaaatttgaaatgaaaatacatacacataactgaatggggtcttttatttttgcacaattagaatgtcacgtcatctcctcagtattctacattcctagaacatatcatccctcgattccttacatttctccaagatggagaagttcagtttcttcaggagaaaccagcacaggtaatgtaaaaaaataacatgagaagacaagggtgctgtgggattgtgaccagttacgaattaactcagaaaacttacggttccacttaaaaacgaaagaggttttgtcacataaggataactttgttcaagaccgctgcctcctcagttacatgtcttggtttgatttttgtctaggacgtcccttttacaatttaaattattcacatttgccaactgatgacatgtgtgtacactgtttactatagaccagtgcaaatgtatacagaagaaggaatgactaccccccatacctattgcctagctccaatcttactgtcttattaatgtcagttcttttttttttttttttttttttttaaaagacaaggtctcactctgtcacccagtctggagtgcagtggtgccaatcgtagctcactgcagccttgacttcttgggatca

SEQ ID NO: 126368 - DNA, 1076 bp, Homo sapiens
ttgttccctctttgatgtctatttagagagtgaaaaattaatcagtggggactgccagctcgtagtttcttcccagaagggatggagtgctttctttcctgcctcactgtggtaggaatgtaatagggtttgtatttaatcatttattagccagggcaaaaagagtagaaaatacttttaggcaagctttgtcttctgttgttgaagatggagaacatggtccctgtcgtgttatctttatggtcctgtgggaagagtaaacgtctagtgtgtgttggtttaggctttaaggggcattggaaaatgaatggctgagcctaaatactgtggagttggtgcagcataaaaatgtagaacatactgtttttttccaccaaagagtcaagcgtctttttgttttgttttgttttgttttgtttttgaatgaatattgggtttgactttaggaaaaaatatttttatgacttttatgtagaaccgctactttgagaaccctcaagtgatccccgagaacacagtgcctcccccagaaatggttggtatgataacaacgattgctgtgaaagtcaacccggagcgtgaggacagtgagactcgaacagtaagtgtttcgctgagttatttctacccgtggctcctgtagtttcggatactggcctgttaaaccatttttttttctcttaaatacttggaggcatttaagacaaacgtgtgtgcctggcaaagcatcactggtccttctctgcagcctgggaggggtgaaagtgaccttttgggtgtcattgatgccaggctagaaagataaggttgttgttgaaacccagaatcaccctgctgggaagagcagcagaccaggtgtggggtgtctgttctgtcccttagctttgagtcttttgacattaataaagtcccttaaactatagataaaagcatatagctcagtgactgagagtgtgggctctaggacagagagctccagtacaatgtcctggccccactggggttttctgactccaagaaagttaatgaacctgcgttctgaccttatttttcctctcattatctgaaaaacctgt

SEQ ID NO: 126369 - DNA, 1337 bp, Homo sapiens
cgaggtgaggcgtcactgtagccggctgccacagtgcctggattccaagtaaaaatacacttgctgttgtcattcttaagacatgaaaattatgagtgataaaattttggtaaaattatatgcactgttgactttctgcacctgtgtttcagggatgacagttgtagctattttcgttcttaatttggaaagatgagataatagctcgtattctggtgcgttgtaaattaaaaatgtcgtcaggcattaccgtgctcaatgacagctatggcatgtccaagccttgctcaccttcaagactttgttcttgctgattgttcagcttgagtgctagaatgttctttacaccctcagttccccatcagccttcatctccagataggctgtgttcatcctttgaagcctctcggtgaagccttttctcaaacctaaggacgttcctcctgagactgtcttcatgcaccctcctgacttggagcccgtctggctgtgtcatttgagggcagcatctgaggaggaatcttctttggccatcgccacggccctagttggggtcttgcactgagcagatgttactcgaattctttctgcggattgagtagaacggcctggcactggctttgtgggattcacattgtaactgctatggaatgggctggagaactggttggtgtgtttccttaaaacttttatgttatttggaattgcacgaaaggtgtagacacctttgctattgttgctgtgttgtttgggtctgtgtggaaatcaatcttttgggtttagtaatggttacaggcttttaattaatactaacatcactcataattgagaggtaatatttttgttctcttcttattcaggcaacataagctttacaacaaggagttgtatgctgacttcattgctgctcagattaaaacattgtcatttttagcttacattatcaggatttaccaggtaaggtcattgacttttatgtcaggtttattgagatagtttacatacaataaaattcaccttttgtgggtgtacagttctaggaattgacaaatattggtaatcattactaacacatcaaaatacggtacatttccatcaacctccaaaattccattgttatatatttgttgtcagtttcttcccaccacctccattccttggcatacacaccgatttatttggtccccatagttttgtcctttctagaatgtcatctaaatggaaatgtccagtgtctagtctctgcaaccttttgagtctggcttctttcacttagcagtaatgtggagataggaccttgttttactgattactttttattgctgtgtagttgtctt

SEQ ID NO: 126370 - DNA, 1003 bp, Homo sapiens
ttagctgtatgtgccagcatctattagtaactttatgacgtgcacaaagttaaccttttagcttggaaggtaaagatggaggtatcagtacaaaacttgagccctcttctgtcatgtatctgggagagagtaatgtggtgaaaatgggccatgtaagtgtgccgacccaggggtggtgttcctggggcagatggtgatatccttggtggcctgctgcagcaggcatggccacgtgggaatgagcactagtcgaggtctctgcccgcaggcccctcgcctacagcacgctggccgacctcgtgcaccatgtccgccagcacctgcccctcagcgacctctccctcgccgtccagctcttcgccaagaacatcgacgatgagtccctgcccagcagcatccagaccatgtcctgcaagctcctgctgaacctggtggactgcatccgttccaagagcgagcaggagagtggcaatgggagagacgtcctgatgcggatgctggaggtaccagctcttctgagagtatcatccatcctgcactctatcctgtttgtggctaaattttttttttttttttttttttgagacagatccttgttctgttgcctaggctgaagtgcagtggcgtgatctcagctcactgcaacctctgcctcctgggttcaagtgattctcatgcctcagcctcccaggtagctgggattataggcatgcaccatcatgcccaactaacattttgtattttagtagagacagggttttcccatgttgaccaggctggtctcgaactcctggcctcaagtgatcctcctgcctcagcctcccaaagtgctgggattacaggcgtgagccaccatgccggacttgtggccaaacttgaaccagtgctgtaggggcggcttgatcgctaggcttgatcccaggagttagaccacctaggttcagacccaggctccccagatgcttcacttctgtgcaccagttttttcatcttttcacttggg

SEQ ID NO: 126371 - DNA, 1265 bp, Homo sapiens
ttattttctgggggcatagtacccaagtgctagactggctgtggacctctctggggagacacccagagtgtgagggatgtgattcctgagccccaggggtggtggcggggccctgttgggacgaggcctgtagtcctggatgaaatccaggccctgcttgtcaggccagtcactcagccttcctgagccagactctgcacatgcaaaacggatatggtattgggagtaaatcggcaccttttcctttacacgtggcacaaaggaggtgcccagatgttaccagccttccaccagttttgttgggttggtgcgaaagtaactgcagtttcatcagaagtaatggcaaaaactgcaattcctttgacaccaacctcatagaaaagcagcatgacttgagcagctggtgtcagtcccatcttattttactgtgatctgagcagtatttggcctgttgaagaagaataattctgtcttccctcttgaatttctcttcccgttaggttttcgttctcaaattccacacaattgctcggtaccagctctctgccatttttaagaagtgtaagcctcagtcagaacttggagccgtggaagcagctctgcctggggtgcccactgcccctgcagctcctggccctgctccctccccagcccctgtccctgccccacctccacccccgcccccacccccacctgccacccctgtgaccccggcccccgtgcctcccttcgagaagcaaggagaaaaggacaaggaagacaagcagacattccaagtcacagactgtcgaagtttggtcaaaaccttggtgtgtggtgtcaagacaatcacgtggggcataacatcatgcaaagcacctggtggtaattctgctcttcagttatgtagacaaacaatagttttcataaagtgagttttattcaagttaacttaatatactttctcttttccagaagctcagttcattcccaacaagcagttacaacccaaagagacacagatttacatcaaacttgtgaaatatgcaatgcaagctttagatatttatcaggtaaggaagtgccctccagccaggctttcgcatatggaaagtacctcttagtattagaggtcatagtggtggggtggcagtgagagctgttagtatttggatggtccacagtatttgtatacccagatgtgttttgttccacaacatagcactgcgtttatgtgggaattcttatttataagagtctgtgcatttttgaggggcagatagtgt

SEQ ID NO: 126372 - DNA, 1016 bp, Homo sapiens
gcccaggaggttgaggctgcagtgagctgagatcgcaccgctgcactccagcctgggtgacagagcgagacccccatctcaaaatctcaaaaaaaaaaaaaaatgcattaaatgtatttgatgatgaggatgaaataacagattacatcattgaagtgaactgccctgctcagtgctcagtaaacccgtttcatttttttcctttggtggataattaaatttcttggaatgtgtgatacaggcttggttttatgttttttgaaagcttactactttgtcttaaaactgctttggggaagggattaatttttcacatgtgtttcttgtattgacagattgttgccaattccttcttggcaaatcctactacctctgctctgtttgctacgattctggtggaatatctccttgatcgcctgccagaaatgggctccaacgtggagctctccaacctgtacctcaagctgttcaagctggtctttggctctgtctccctctttgcagctgaaaatgaacaaatgctgaaggtaaagtccatttaatctaagtagtgcttctgttcagggttttttattgttgttagagacagggcctcacggtggtgtccaggctggtcagcgttctggactcaagcaatccacctgccttgatctccccagtttttgggactataggcactcaccactgtgagtgtgcctggctttttttttttttaattcttattttcacttttaaacaaactatagtgactctttatatttataaagtactcttcgaagtagtaaatatttgcaacaaataagggccaagtgtgaaaatcattccgtgtatgtctaagcagtaactaatttgtctatctagtaacttaaaatgaaaaatccagaactcttacggtaagcaagtgtggtggtattagtattgacaccactgattttcttttttaaacctattttctttttttggattacacaaataggagcagatggttctatttttaaaaatttcagtgatgcaaa

SEQ ID NO: 126373 - DNA, 1310 bp, Homo sapiens
tccaggctggagtgtgatggtgccatctcggctcactgcaacctctgcctcctgggctcaagcaattctcttgcctcagcctccctaatagctgggattaccagcgtgtgccaccacagctggctaattttgtatttttagtagagacggggtttcaccatgttggccaggctgatctcgtactcctaatctgaggtaatctgcctgccttggcctcccaaagtgctgggattacaggccggagccaccttgcctggcccctgtaggttatttttgcatttcatttgttacagataccaacatatactttaagataaactattttgagttaaataaagattggaatatgcttgtttggttttttccctttggagtaaacacatcagaattgccttccattgctgtcggattacagtgacactttagagtctggagggtatagaccctcctcatttagatgccactaatctgcgtcttctccaccccgcagcctcacttgcacaagattgtgaacagctctatggagctcgcgcagactgccaaggaaccctacaactacttcttgctgctacgggcgctgtttcgctctattggtggaggtagccacgatctcttgtatcaggagttcttgcctctccttccaaacctcctgcaaggtcagagcagtgactttggttgccttttagtcttgtgtgtcatgtagtcatgtgtctagccatcctgattgctgggtttcatcctctgtaactggtgagtgtcatggttggtgggatgggatgtggcacatccgccgcccccctgcccccctcccctggccctggtcatctactgggactttgaagggcgctgccttcagggatgggcccttcccctccctcctcagcattgaatgggatttaggtgttagttgtcctggctagggcttggttgcatttttatagtgtttggtaagcaagtctagaaaatgatttctagtggtttagtaagatcagagatccctagactgaaagagaatcagaacaaaaaaagaaaaagcaggtgacaaagttgagacagagttgacttacagttagtttatattttcatttagcttctgatttacatagccagaatcctgtaattcctgtataattaggaatgctctcaaggtacatagttaacagggatctgggttcattgaatgcttttggggtgtgtgctgattggaaacactgtcccaggaattcattacacttcttggtatggtgagctcttggcaagggattgacccttctcatgtatttccttaacttccttagagaagtgacata

SEQ ID NO: 126374 - DNA, 1074 bp, Homo sapiens
tctctttctagccagcctcagctctcagtggcactgtctcaggaatggggtcagtaaatccttaactgtcctcgtgagtggtggggagggggactttatcagaaagaggctcctcgccatttataatacaaaaaaattagttttaaaaactgtttagagaatagacctcaactgtggtttactaaagtctgatagtacaacataattaaaaaataatttatgatattaaaaggatatagtactatgattataatttaaattataatttataacagttacatacggcctactgttaccactcagaaggggtcatgagtgcaattattggacagatgtaacagggtggagtctaagggcacagaggtctccctgcagttgtgctgatgtgcacaagagaaggaggggcagttcttttgtgtgtttcacctgggcccgagtctggggagcgtcttccctctctgatagctgcacccccttccctagggctgaacatgcttcagagtggcctgcacaagcagcacatgaaggacctctttgtggagctgtgtctcaccgtccctgtgcggctgagctcgcttttgccgtacctgcccatgcttatggatcccttggtgtctgcactcaatgggtctcagacattggtcagccaaggcctcaggacgctggagctgtgtgtggacaacctgcagcccgacttcctctacgaccacatccagccggtgcgcgcagagctcatgcaggtaggattttagtgaggttgttagctggctgcttccctggaagcagtgggccgtcattgggttctctgtactcaagagtgggctctgcaagatggaccagtgcagctctctgtttaattcatcttcgtgagtcttctggtggattgaaatatgtaaagaaggccgggcacggtgtctcctgactgtgatcccagcactttgggaggccgaggagggtggatcacttgagcccaggagttggagaccagcctgggcaacatggtgaaaacccatctctacaaaaaatacaaaaattagccaagcatggtggccgacacctgtaatcccagctact

SEQ ID NO: 126375 - DNA, 1121 bp, Homo sapiens
agctttagatgatggaggctcagttactcctaggagtctctgttcaaattagattggagactgcagctaggactgagtttgaggttgggatattttccctccctgtcctgagatttagatcttgggcttcatctaggctggaagaagatggcgtaggggccaggtgtggtggctcacacctgtaatcccagcactttgggaggccgaggcaggagcattgcttgagcctaggagttccagatcagcctaggcaacatggtgaaatcccatctctactaaaaatacagaaaattagctggatgtggtggtacatgcctgtagtcccagctactcacgagtttgaggtggaagaatccgttgaactcaagaggttgaggctacagtgagacatgattgaaccactgcactgcaagctgagtgacagaacaagaccctgtttcaaaaaaaaccaaaagataaagatggcataggccgtgggtcagagtccctgctggtcacctggaggattgatgagagcctgcctttagaacagtagtattggttctacaaggcaaaccctgcggctgacccagggtgcatgagcagcttgtgggagaggaggaggaggtggttcttaggccttcttaccatccatgaggcagatagcccaaaagagacacacacaggctcaaggccacaggaaccaccacaggcctccagatgaatggcacagggtcagcctctcccagtcccatcaaccagctaaggccatgcgagcacagcaggagggcatgcttgttcccagggctgccccctcctgaggacacccaagggttgggtgggcctggtggagggtagatgaggtgagaggtcttagactacttttctgacaattattaagaagcctgtttgaatctacgggaacgtaagagaaattggaattttgcttggtttagagaaaagtaccaagattttatgttaaggagtattgctagacatgaatatttggcattgttaaatggaaggtgatttaagaaaatagatttatggccgggtgcggtggctcacgcctgtaatcccagcactttgggaggctgaggcgggtggatcactggaggtgaggagttcaagaccagcctggc

SEQ ID NO: 126376 - DNA, 1041 bp, Homo sapiens
gggcagatcacgaggtcaggagatcgagaccatcctggctaacacagtgaaaccccgactctactaaaaatacaaaaaacttagctgggcgtggtggcgggcacctgtagtcccagctacttgggaggctgaagcaggagaatggcgtgaacccgggaggcagagcttgcagtgacctgagatacgcgccactgcactccagcccaggcgacagagcgagactccgtctcaaaaaaaaaaaaagattcttctgggtgctgcagatgctttcagtgaaagcttttcacaatcatgtaatttcagcacaaactgtagtttctttgtgtcttggttgtaggccattgaaactgctctggactgcctgaaaagcgccaacactgagccctactaccggaggcaggcgtgggaagtgatcaaatgcttcctggtggccatgatgagcctggaggacaacaagcacgcactctaccagctcctggcacaccccaagtatgtcggccacttccttctgtgtggttgggtggatcctgttttaggaattggggctgcagagggcctcccaggtttcctggtgctaggagcaggctccttgaagtccagcagatgccatattatctacctactccttcttgttggggccttagagaaaatggaaaggagaactgggtgcttgagaattagaagggatcacagttgtcgcctgcctttattgtgtcttgtcacctcctccattagtttgtaagtgtgaagaaatcaagggtcatgtcccttctccctccctttgtctcaccattctgtccacagcagctggcgcctgaaaggcatgcagtggaccctctgcattttcatttcacagtgatctttctccagatatttctcatgtgatgtctgtatcttgctcttacctcttgagactgtgcatgaccttaatgtaatgatcttttgaggtaacacacacataccatttttctgcattgtaagtttcaggggatggatttttcctatatattttcacattcttcactgcatcagaagtgatgc

SEQ ID NO: 126377 - DNA, 1033 bp, Homo sapiens
aaaaaacgtgctgtaatcccagcactttgggaggctgaggcgggggtgggtcacctgaggtcaggagttcaagaccatcgagaccagcctggccaatatggtgaagtcccatctctactaaaaatacaaaaaaaattagctgggcgtggtggtgggcacctgtaatcccagctacttgggaggctgaggcaggagaatcgcatgaacctgggaggtagaggttgcagtgagccaggatcgcgccattgcaccccagcctgggtgacagagcgagactccatccaggtgttgctgaaattaaagcagataaattacccaggcctgtctgaataagagggaagcaagcagattaaaaatttgaaaagaagtcctagtggagtcatcagctcaggagttgggtgtcgtgacaccagatctgattttgcctttcagctttacagaaaagaccatccccaatgttatcatctcacatcgctacaaagcccaggacactccagcccggaagacttttgagcaggccctgacaggcgccttcatgtctgctgtcattaaggacctgcggcccagcgccctgccctttgtcgccagcttgatccgccactatacgatggtggcagtcgcccagcagtgtggtgagcacgggggcacggtggggcacgggattggttctttgacttttataggtgctttaaaaacttgctcaggacattttgttgttctagaaaaagctgagtttggctgattgattttcggcttttattttccaattttccatttacgacattgataattggtatttcagtggtgggcactatatcagcttgaaagttactacctaccaagttttgtttgtaagatagacccaatttaataatacttctgtgtccaagtgctttgggacaagctgcctgtgaaacagacagtttgtgttcatactcactgctcaccttcctctgcctggctgtgttttccaaggccagtcttgccctccagaaacttctccatcacctgctccctgctctccaacccatgc

SEQ ID NO: 126378 - DNA, 1703 bp, Homo sapiens
ttgctctgtcgcccaggctggagtgcagtggtgcgatctcagctcactgcaacctctgcctcccgggttgaagtgattctcctccctcacccctcctgagtagctgggattacaggcacctaccaccacgcccgggtaatttttttggtatttttagtagagacggggtttcaccacattggtcaggctggtctcatactcctgacctcatgatccacccgcctcggcctcccaaagtgctgggataacaggtgtgagccaccacacccagcccacgcccagctaatttttaaaaaaatttttatggagatgcatctcattatgttgctcaggctggtcttgaactcctggcctcaagtgattcccctgccttggcttcccaaagtactgggcttatttaattgtaaaagattatgaaagtggcaaagtggcatgagccactgtggttctcattttgaactaatatatttttgagttatgattgagatacatgaaaataacacagtgtatcatagaaaacgttcagaaaaatacagcctaaaggcatatcagaccacttaatttacacataattgcagtttaacagaagttggcttgaaatctcagtggtggctttttatggagtttcttttttttttaatttattttttttttgagacggagtctcactctggcggccaggctggagtgcagtggtgtgatctgcaacctccgtctcctgggttcaagtgattctcccgcctcagcctcctgagtagctgggattacaggcgcctgccaccatgcctggctaatttttgtatttttagtagagatggggtttcaccatgttggactaggctggtctcaaacttctatgtcaagtgatcctcctgcctcggcctcccagagtgctgggattacgggtgtgagccgccgtgccctgctttttatggagtttctaacttcaaggaaaacattggggagttctgcagtttgagggacaagactgttctcacgtgccttcccatctctccttttaggccctttcttgctgccttgctaccaggtgggcagccagcccagcacagccatgtttcacagtgaagaaaatggctcgaaaggaatggatcctttggttctcattgatgcaattgctatttgtatggcatatgaagaaaaggagctttgcaaaatcggggaggtggccctagctgtgatatttgatgttgcaagtatcatcctgggctccaaggagagggtaaggaagggttgaggagtgtcttctgatttggagggtgtctgtacctgagagtggtccttctagaaactgatagtttaagaattgcggccagacgcagtggctcacgcctgtaatcccagcactttgagaggccaaggcgggcggctcacctgaggttgggagttcgagaccagcctgaccaacatggagaaaccccgtctctactaaaaataaaaaaaattagccaggcgtggtggcgcatgcctgtaatcccagctactcgggaggctaaggcaggagaatcacttgaacctgggagatggaggttgcggtgagccgagatcacaccattgcactccggcctgggcaataagagcgaaactctgtctcaaaaaaaacaagaattgcagtaacgtgttgtggtttgttcattttcctctccaggcctgccagctgcccctgttttcttacatcgtggagc

SEQ ID NO: 126379 - DNA, 1047 bp, Homo sapiens
ttttctgtacttgaaaaaaaaaagtgtgttcacttaaatatttgaattatagcccatctgtttcttgaacacttgtctgaggccctggggaggctgatctgaaccaggaagacacggccctgccatcatgggatttgcagttagataaagtaaccccctgttttgaggagaaaaaaaaacgtgatggtatcagagtgggtgagaaaaaaacatggtggtatcagagtgggtgagaaagtgtctaagaattctttccactaatgaagtaaactgagttttgccttaaagaggctcagtcatactttgatacttaaaatctttaggatttgagcttagtttgtcagttgttaattgtgttgcagtgtgtggaagattgctgtgttctgttatttgcaaggttattatgtcttcacaggaagagtgggctaaatgaaattgttttatcttttgcagctgttgaatttgtgtgaggctgaagattcagctttaacaaagctgccctgttataaaagccttccgtcactcgtacctttacgaattgcggcattaagtaagttaatgaaaatctacggggtataaaagtgaaaggagactgaccacaggaggtctatagaaaaaaaaagtggccttttgttgttgtctaatttttatgactttttgtagtctttttaagatgggatcaaaaaattatttttgtatgtttatcaaactgtgtaatgagatgccataaaattacatgtgttgttaggattgaagtaattttgtgctttatagtaaagtctgttgttgttttatgaatcagacgttctggtttaaaaggattgtcgtatcattcatatggtgccagaatcagagtgtatatatagtaagggacatgacagccttagaagcttttcaatgactcaagcatttgttaatcctgcagtctctagcttttcactgggaaacctcagttatcattgtcaagcacaggaatgatgcaaagtgtaggaaaatagactagatctgtattggctgagatagaaacaatcattttctttctagtgg

SEQ ID NO: 126380 - DNA, 1037 bp, Homo sapiens
caatagtgagctccaagaggccggagaagcctgtatgagaaaggtgagtgtgtgtgcgtgcgtgtatgcgcacgcgtgtgtgcacacacatgtgtgtgtactctgcattaagagttcttcctgtttattgctatataaacagtgtatgcctaaaaggctttatgcatgtggttattacacactaaactgtaataagaatatacctgtttcatagtcatactgagttttttaaaatattaaacagtaaagataagtctccatcatttcgtcataaatttctgaaatagtatatgattaatattccatcttcctaaaggagaacggaaacttgcagctaaggttgaagatgagttctgttctattatgaagtgtcctcagttgtctatttttctttacaacttttcttttttaatagtttttagaaggtgctaccatagaagtcgatcaaatccacacacatatgcgacctttgctgatgatgctgggagattaccggagcttgacgctgaatgttgtgaatcgcctgacttcggtcacgaggctcttcccaaattccttcaatgataaattttgtgatcagatgatggtaagccaaatgcatttaaacgctctgtaacaaactttcaaaaaattaaattattttaaaaataaataatgcagctgggcacagtggttcacgcctgtaatcccagcactttgggaggccgaggtgggtggatcgcttgcagttgggagttcgagaccagactggccaacatggtgaaacccctctctactaaaaatacacaaattagcctggtgtggcagcgtgcatctgtaatcccagctacttagggaggctgaggcaggagaatcacttgaatctgggagacagaggtcgcagtgagccaagattgtgccactgcactccagcctgggcaacgagtgaaactccatctcaaaaaaagaaaattagccaggcttagtggcacgtgcctgtggtcccagcttcttggcttggaggctgaggtgggaggatcacctgagcatgggaggca

SEQ ID NO: 126381 - DNA, 1050 bp, Homo sapiens
gtgaccacttgttatgtgtatgcacacatacatgcgtgcacacacacacccacacagagctagttttaggaagactgcttactttacatgataacccagctgtccattgggtgcggtgatggcctaaaccacctggacctcttctgactgtagccgggaaagaggtttttgttattttttattatcttagcccttcatataaaatttgttcactctacaaaagactttttaaaaatgtacttgcatacaacaaggtcttccagtttctcccctttcacaagaatcctgaaaccctattttgaaaacgtgctgtagggaagaattccactgttagacactctctgtcagatgggccgtgttttgacatcgaaggtgaaagtgtgctttttgctgttgagcatttgttaattactgtgtgctttctgataatttgtgtctttactgtcttgttaaccccaataacccttactgtgtttgagtatgtgggaagtttttatgtaaataacataaatagaaaaaagatgattttcctccccatcctcaggaaagcatttccgagtgcgggagatgtcccttgtctccattctgtcagtttgaggtgagaacaacctattaacagtcagtttctgacttgcaatgtgaagaaaagtttaccttttcttttcttttcttttctttttacctttctgttgccttttttcatgctgtaatttttgttttggttcagcctgccatggaaggggtagaggtgagaacttgagcggagctacaggagggggttgttgtcgttgctggttttgctgtgactcgttagctgtgtcgtggttctgtactggacagagtgcgttgtgcccttgagtgcagtgacctgtattgtctgtctgtggcagagttgtatcagtatcattgctgtgaactgtctgatgccaagcatgttttctattaggatgttttaagcaagactcttaagttcgtgtgagaattgcaatgtctcaattatattcaagattgaattagattttgtgttcgtaacctctatctgaatacaca

SEQ ID NO: 126382 - DNA, 1079 bp, Homo sapiens
tccccttcatctccctcttgcgtgcacacacaccacacatgcacacacaccgatgcactcacaacacgcgtgcacacagaccacacgtgcactcacaccacacatgcacacacaccacacatgcacacacaccagtgcactcacaacatacatgcactcacaccacacatgcacacacaccacacgcgcacacaccacatatgcacacaacacatatgcacacacaccacacatgcacacacaccacaatgcactgacaacacacatgcacacacaacacacatgcacacataccacacatgcacacacacactgatgcactcacaacattgtgcagcattgcacacaccccgagctttccctcttgtgtaaaatggggatgatggcatctgttactcctgcctcccagtggtgttgcaaagacccaaagaagtggtttctgtgacagtgctttgaaaatgaaaaagcagattgtaaaagtaccattttagaatgttataatttcaggatagaacttactcttcctaagtcttgcagattctggggaagagaattgtagggggcatggagctggccttgagcccattttcctcattttgtctccatctcctgctttgccttttggtgtaaagagaaattctgaaaagtctctcaggtgctgctgggagtggggcccttcctgatccgtgctatcatccccttcttaccccgaggatcgcagcgcgcacagcgcagcacggcacattggaacgtgtccctcccttgtggccatggagaattcctttgaatgacaggagcaaaactggaaagtgagaagggaaagctggagcaacagcagcccacccctgagctgtgagacagtagaacatgcagcacccttggcatttcacacatctttgatttaattcagcggagcagtttgtcagctttatttttaggcctggttgacaaatacttagtaccaggatcagttgtttatatacattgatatttaatttccagggtaaatagttaattttttgaagaactttctctgctagggttttttttgtttgtgtggttttttttttcttttcttt

SEQ ID NO: 126383 - DNA, 1077 bp, Homo sapiens
ggattacaggcatgagctaccacactggccactgctaggttttgagggcaaaagacatctgtgcccttagaacttagtgtgttgagaggacctcgtgataccttggcaaagtagggcatcctcacactgctctggccccaggtggaatcatccctgcttctgtgaggggactattatggcagcctggtaaggtcacctttaccacttgtgagcacgcatgacagcaaacagcacgatcacatcgggtgtacaccgtcggcccctccacacccctacaatggacaggaatgctgaaggccacgggcagtcagtttccttaggacacagcacagttagaacctaaggctagtaagttgtggcttttacatgtgaacccttcgcttcactgcctagccttgccaacatagttagactatagtagggtctgtagtgacgttgacctctgtcacttgcaaaattaatcgacctgtttataatttctggttttcttgatcaggaaatgaagatttgctcagcaattataaacctttttcatctgatcccggctgctcctcagacactggtgaagcctttgctagaggttgtcatgaaaacggagcgggcgatgctgatcgaggtaagggccatactgaaggctgcttctcgctctgccaccctccggtgcttatagcgtcctcacttgatcgtattttcaatggacggaacagcataaagacgttcgatgtcaacatttgcttgtgggtgttcatgcactccagtaacaagggaccttgttaggtagacagcctcaagctctgagaagaggaagttgtgagatgcagcattcccacatgttttgcaggcggggagtccattccgagagcccctgatcaagttcctgactcgacatccctcgcagacagtggagctgttcatgatggaagccacactgaacgatccccagtggagcagaatgtttatggtaagagctgtgagcagctggagtcaggggtcccttcaaatgcttgtgagctgtcgtgctctgaaatgttcagttcatatttcactattcagtgtcctggctgcttttttttcaga

SEQ ID NO: 126384 - DNA, 2387 bp, Homo sapiens
taccctcagaactggtcttctctgtgttcccatgacctcacatcggggcctcacctctcacttgagtgactgcagctgccgcttctcagcgcctctcttgttggccctgttcactttatttcccatcctgcagtcggagggagatgagccatgtacctccctaactcgctgctggttaggcgggacatgggatccctgcagggagcttggtcttacctgtctgcatgtcctggcctagttcagcacgggcacgtagtaggtgcattataaatactagaatgaatgtattcattggtcaaaacttaacagaaagcaactaagttgtttcctaataagaaagtcctaagaagtttttaaaaaattgttttggaaaagtagcatgtcttgacaccaagggattgtcttcttatttcttaaagccttccttctcatcctccataaacgtctcttccctgttttaggtttttcatagtctcctcaaggctcacgcaatggaagctcgagcgatcgtcagacaggcgatggccattctgaccccggcggtgccggccaggatggaggacgggcaccagatgctgacccactggacccggaagatcattgtggaggaggggcacaccgtcccgcagctggtccacattctgcacctgatagtgcaacacttcaaggtgtgtaggagggacggtgggctgcggggcgcgcgtcttcaggcattcactttgaacctttaccttgtcttgttctgcaataatcaggtggtcgttcatcttttagtaaggctacttctggttcattgattagtttgtgtatgtgtgtatggctttatcagcatggaaattgctgtaatatagagaatatgtcacaggtgtgtgtgtctttgcgtctgaggctacatttctgttgtaagtactgtgcccagttaacccttgtatgctgctaagtttgcaccttaaggtgggagatagtcctcattgactctagatttccatcacctgccttggaaagttattcatgttgctggcacctccttctctggccaaattaccctttttgtgggatttatttatatgtaaatgtttcttgtagatttggggtagaagagaaaggattgagttgaaagcaaattcttttatagtcacctcttagaggaactttgcttttgggtatgtcttaaacttttacaatgtcaagttctgaagtttgatacatgtgattagactcaccttcctgtctgaagagaatttgatttttcaagactgaagtatactattgtaatgggatgtaatgggatgtagttggggtgggggagggtgataaacacatacataaggcagtgagaatttcctcgctcaggttaggattcagaattcttgagcatcaagttgggctgtgtgtgtatgttggggctgagaggcatgtcgggggtgtgtgtgtgcacgtgcgcacacgtgcatgcactgtgggaccaagctcccatgttccggcgtgatgctggccctgcgtccgcaggtgtactacccggtacggcaccacttggtgcagcacatggtgagcgccatgcagaggctgggcttcacgcccagtgtcaccatcgagcagaggcggctggccgtggacctgtctgaagtcgtcatcaagtgggagctgcagaggatcaaggaccagcaggtaggggtgtcagcctcaggggtgccccgatcgtcttcctttgacttctccctagaaatcagtcagtaaaaccaagcgcctgtgtgtttttaagccggattcagatatggacccaaattccagtggagaaggagtcaattctgtctcatcctccattaagagaggcctgtccgtggattctgcccaggaagtgaaacgctttaggacggccaccggagccatcagtgcagtaagatcatgtgcctctgtatgggtgctgcgcattctgctgggagttggttcgtttattccctatatttagaatgtgagctcggtgctcagctgcattcaggagaggaagctgggaacagccacggtcaccagattgaaactccaggacatgtcactcatgcaaggggttcccaggtcaccagacatgcttgcctcatgcgttcagttcataccattaaagttctgttgatgatggttgattacttgcagaaaggcatctagagaaactctttgaagtaaggagttgattaagaacatgtgcccatactgagatcagtttctgagaaggacatgtgttctgtttcacgaggcagccaccaagagggtcctgggtattgccccttgtggagtggtggccctaggagccctgagtctgaccccagctggtgtcatggacctgctggcttgtggacgcaggcctggccaccctacttctggcttcgtaggcc

SEQ ID NO: 126385 - DNA, 1028 bp, Homo sapiens
agggcaagcgttcatctaaagcgtttttgggctgatttaaaatcctgtgtcagaaagttgaatagtatatttttgtaggtgaagattcattttttcttcaaatataaaaaagtttgaattctgtctgcgtgccctagaaaataaaactgtggacttgtcaactcccattgttcttttttttttttgagacagagtcctgctctgttgcccaggttggagtgaagtggtatgatctcagctcactgcaacctctgccttccaggtttaagcaattgttgtgccccagcctccccggtagctgggattataggcccatgtaaccacacccggctgatttttgtatttttagtagagatggggtttcaccatgttgcccgggctggtcacaaactcccaagctcaagtgatctgacttcctcggcctcccaaaatgctgtgattacaggcatgaggcaccatgcctggcccccatcattccttaagcagaaagatggagcagccgggccagggcctgaccacgctgtcggttttggttccttagtgtgaggagtcgggtgctggcaacacaagcgtgtttaacatgctcagtgttatgaaagcgaggtccagacctagagtagaattgacttttcatggaaggcaagtcagatgttctttgagtttccagcaggattgtggtaagcttctagcttgctagagtttcagcctgtggctcactcatcagcttgagtttgctgtggcaggttaccagtgctgtgcaggtagttctcgtccatttacctggagtgaatgaaaccaggtcaccacgtactatgtctcctgagacagctgggacagaaggtggattagttctctttgatgagaagaagggagtgagttgtggtgctgggtctcaggagagcctgctagcatgtttcctgttcgtgccggatgggcgttctcttggcgcgtgtgcagcgtgcgtttggaattttgcctatggccacacctgggcagagttccctgctcttccatcactcgttcaggag

SEQ ID NO: 126386 - DNA, 1047 bp, Homo sapiens
tacgcagcttggaaaggattcgttgctttcctcccatggacagttcaaagcctaaatcaggatcattccacagcagtgtaactttttctgtttcttttctttttctttttgagatgggatgttgctttgtcacccagcctgcagtctagtggcgcagtcgcacctcactgcggcctcagtctcctgggccaagcgatcctcccacctcagcctcccaggtagctgggaccacagacataggctgccacacccagctaatttgttaattttttagtagatacagggtcttgatatgttgctcagactggtcttggattcctggactcaagtgatccacccaccttggcctcccaaagtgctgggattataggcgtgaagcagagatttggagtgtcacagtgtcttataggagaaaataggaaaaaagttaatttctccaccaccatctcttgaaagaaacggtaaaaccgtgtacaaaaaatgtgtgaggagacataataatgttggattatttttcaagtgcactaaaagaggagaaaatgataaatgagttaatttgctaaatcaagcccactttgtggaactgggggcctccaggtgcatctgtgtttgaatctagccaggtagaaactctctggcttctgcaaactctcaggtaaattataagtctgtttttatgtcctgaccttgaaagactggttgaagctccgtgtaccaggttgcttttgatgaggaggtatttttctgttctttcaggagctgggtgatgattctgattattctgttcatatcaggagctaggtgggaaaaaagcacaaactacttttcgcaagtgatttttacgttaaaatcttttggtgacctatgttgaacttgtgcactggatcagtctttgaacttatacccaagtgacaccattgtcatcttggataaggataaaatgcttttctgtgggatggagcgggaagcagagcagcctgatacatgtgagtgatagctctcatgttatgggccaggcacttcttttgtttgtttgtttgtttgtgt

SEQ ID NO: 126387 - DNA, 1085 bp, Homo sapiens
tctttaaaatcctgttttggaaaattgtagttttagcttttggtaagtattcataaaagaacacagtctcgaacaagtttcagaaaatgagggaaccgctggctgtcactcgagcgaattaggaaaggtattcttgcatcgagagagacagcaagacttgccgatttttgaatgaaggcctaaatgacatgtgctttggtttcaggcactcgcgggtgagataagtccatttctgtgcagcggcagtcaccaggtgcagcgggactgccagcccagcgcgctgaactgctttgtggaagccatgtcccagtgcgtgccgccaatccccatccgaccctgcgtcctgaagtacctggggaagacacacaacctctggttccggtccacgctgatgttggagcaccaggcttttgaaaagggtctgagtcttcagattaagccgaagcaaacaacggagttttatgagcaggagagcatcaccccgccgcagcaggtgagggtgcgcctcagtttgttaattacctcttccctgccagtgacttcacactttaaataaatactcctcccaaatgatttcaaatgacagcacagtgaaactatttttaggggggaaaaaaagtctctgtctcaagcactcaggaaccttactttgtgttttcaggagatactggattcccttgcggagctttactccctgttacaagaggaagatatgtgggctggtctgtggcagaagcggtgcaagtactcggagacagcgactgcgattgcttacgagcagcacgggttctttgagcaggtaaacctcagaccactgacggtcttgggtgtgtaatgagaggtcatttataacggttctttaataaaatgtcctcaagtcggagttcacgttctctttttttgagatggagtcttgctctgtcgcccagcctggagtgcagtggcacaatctcggctcactgcaacctccacctcccaggttcaagcgattctcctgcctcagcctcccaagtagctgggattacaggcgcccaccaccatgcccagctaatctttgtatttttagtagagacggggttttgcca

SEQ ID NO: 126388 - DNA, 1778 bp, Homo sapiens
gtttggtttggtttggtttttttttcccccaggttttctattttggggtagggaatgacaggtcggggtggtaatggtacagggaaagatgaaggtggtagaagaagtaaagttttgttttttgtttctgtacctgttacatttttctagttggggcagaatcgtacaggccggggggatcaatgctctgagccatggcactctgcgttgaaggtcccatcccaggacgagttgtgctcaggtggctctgcgtggccttttctggttttcctggtccccctcttatcccctaaacctgtcaggcatccacgtgtttagagcagcctttgtcattttatgatttggttagccaagatggtaacactccactcaagaattagcaccttttaaaagttgcttatggcataaaatacaaagtaacgagggtttatcacagagctgcccattttcataagccatgtgtgtgtgtgtttcattttttatttaagccttgttgtgaagtgctttgaaagaggatcggtgtgggctaatgattcctttctttgccctctagcgattgtaactgcctatgagaatagctctcagcatgatcccagttcaaataacgctatgcttggggttcatgcatcagcttcagcgatcatccagtatggaaaaatcgcccggaaacaaggactggtcaatgtagctctggatatattaagtcggattcatactattccaactgttcctatcgtggattgcttccagaagattcgacagcaagttaaatgctacctccagctggcaggcgtcatgggcaaaaacgagtgcatgcaggtgcggacaggacacttgaagaatgaggccaggtggagattgaggccaggtggagaatgaggcaatgtggggtctcctggttcagaatataaggaaggtggactcgaactttccacaaatacagcctcagtaagggggaaacagtccttccaaaacacaaaagggaaaggaagctacttgactgtgaattacagtctcttgtggtctctgtcctactatatacttagttaatgtgtttaaggaaagaaaaaaattacacactacagaattatgaggatctaagatagattttgactattttcagaggaatcttgataagaacaataaaaccgaccagacctataaagctttggagaaaataagacccctaagtatttaggattaaatacttaaagttagctttagtaattcagtttaaattctgaacgtcaatcaataaatattcatggtaggcaaatcttttgtcaatttaaagtacattggtcaatgactcataggacttactgcctagattagtattttatgaggttttcatattgtttagaaatttcaagaactttttttctgctcattttttttgaacagggccttgaagttattgaatctacaaatttaaaatacttcacaaaagagatgacagccgaattttatgcactgaagggaatgttcttggctcagatcaacaagtatgtatgttatattgaaaggataagagaaaaaatgcatcagattatttaaagttatttataacctgaagccaatgtgaagctcaagctagaaatgggtatgatttggtgacagtcattaggtaggattttttaggtactgcacctctgcaaaaagagtaacttgtgacaaattgataagcctatttgatgtgtagtattttaaaagcttttctcaaatgagctactggatcacagaactgctgataacatggattcatttccccatttcct

SEQ ID NO: 126389 - DNA, 1049 bp, Homo sapiens
agccccggggccagctccttactgctgtgaagtctcgtgtgtgcacagtgcacgcagacacgcggtgggaacagtacagctgcctgaaaatgcaggggttttgtggctaatcgcagacgggtgtatgatccaaaaaagtggggcttttctgttttcgctttttgaatgttcaggtcccttactccccaaggtcaaaagcgcctgctcccatgtggcatgcacaggcgtcccgtttcttgcacacgccgatttcatgcctgctgtgtgtgggtcctgccggggagtgcagagatgaccctgggctgggagggccgcactcaataggcgcttttggctgctggttctggagtggagggctgtgtttgtcagttgtctctggctcttttctaccaggttctcaggcagctccaacagggcctggcgaaatgttactccgtggcgtttgagaaaagtggagcggtgtccgatgctaaaatcaccccccacactctcaattttgtgaagaagttggtgagcacgtttggggtgggcctggagaatgtgtccaacgtctcgaccatgttctccagcgcagcctctgagtctctggcccggcgggcgcaggccactgcacaagaccctgtctttcagaagctgaaaggccagttcacgacgggtgagtctccattttccttcccttccatagggagaattgtgcacgctgatttcctccggctttagtgttgaagctgattggatccttggttttctgatcactgcacggggcacactggttacactctgtttacagtgcagacttcagagtgcatagctgagaccacatgtttttctcccagggaggggtcaaggtttggagcaggagctgccaggatccaagacggggtagaaaatgcatggtttcaggccacactgccctcctgccctcctgccttcctgagacccttccttcacttgtttttggtgggaaacagggtagggtggggtggtgggagacattgttagtgtgaaccagtaggagacagagtcctggtgagccggtgggagatggg

SEQ ID NO: 126390 - DNA, 1352 bp, Homo sapiens
ggtgggcggatcatctgaggtcgggagttcaagaccagcctggccaacatggtgaaaccctgtctctactaaaaatacaaaagaaaaagaaattggccaagcctggtggcgggtgcctgtaatcccagctactcgggaggctgaggcaggagaatcactgaaacccgggaggcggacgttgcagtgagcggagatcgcaccactgcactccagccagggcaacaagagtgaaacttcatctcaaaacaaacaaacaaaacatgtaattcgtagctggtaggggcttgagcgttttttgcagtgtgttagaactggcccagatgactaaaaacgtttttaatcatgttttatttttaagattttgacttcagcgttccaggatccatgaagcttcataatcttatttctaagttgaaaaagtggatcaaaatcttggaggccaagaccaagcaactccccaaattcttcctcatagaggaaaagtgccggttcttgagcaatttctcggcacagacagctgaagtggaaattcctggggagtttctgatgccaaagccaacgcattattacatcaagattgcacggtgagtgggccagcctggcaggtggaactaacccacggcgcccatggacatggagccccatgggagctccagggtggaccctgtggggaattttggacacagattccctgacatgggagaacataagatgattctggaatgtaagtggtcaggcactttacaagttctgcccgcgctgactggttagctgtcctgagtgcagtctgggtttgcattcagcagaccttcttccgagtcaccatagaacttgacaaaacagtgtgtgtcccactcttgtaaatcctcgaagcacagtattgaggcagaatcagatgattgtagcatttcctagagtgtgctgcatctcatttgaaatgctgaaagggctttgaagaggtttcttttaacaaaaagtgtgtttcgtctttatttctgaaccagacacagctctgcttttctatatgtccagagtttagttgccctttcctccaaatctggctcctgtcctggccagctctccctcctccttgacttccgtccgtggctgctgaattgaaaatattgtgactcatttacaccgcatcagggtgaggcagggtacaaataaattgataaacgaccgctggcctacacagtccgttttcccgtgacagttcggacattcctagcttcttctcaagacaaggactggtagcagagatgcagggcatgtcctcatggcttctcgctctggcaggttcatgccccgggtagagattgtgcagaagcacaacaccgcagcccggcggc

SEQ ID NO: 126391 - DNA, 1083 bp, Homo sapiens
ggaatttctgagtgagtcctttttttatggtgtcctccctctgtgaatgtacaggcggaactgtacgaacagctcccttccatccatttttaactctttcggaaataacacctcacagcagcttcgtgcttttgtacagacctttgtaacaagtgtacagaaaactcattttgtttgagaaacaggagttgatgaacccatcatgctggtttttctctgagcacaaagttttaggctgtacacagccagccttgggaatctcgttgagcgttcggcgtggatccacggggccaggccaccctgcgggagcgccacacgcatccacttcggattcagtgggtgaagacagaactctgagagtctgcaggcggctcctgtgctttttatttctggctcttcggatgtcttctagacatttactatcactgcacctgaagaaaaaatcacttttaccttcctaatttaaaaagacaaaacagaaatgtacgttccttcgctagctttagtctttctgttcccatttttataaatctgagcattgataatgttctatctaaatttgtacagtgtgatttttttttttagaataaatattttataaaagggtttattgtcccttgtttatgttaaaatgcttgtttccatgaggggtttcttccctctcaatgtccctagccccttgggaaccagaggccccagagacagtgtgggctcctcagcgtagcctcttggtgacagcgtgcgctgcctgggcaggcacagtgctgctgtgatcacaggggaggccatgacttggcacctgggaagccagctcagagcatattcagtcaagttgatgaggaatggcggcccgacctcagcagcaggtcggcgtgcgggactctcagaatggcggcctgatctcagcagcgggtcggcatgccagactctcggagccctcagctatcttcatgtgtttcaggactgctgccatgtaacgtgtgtgtgtggagagtgtgcggagtgtacacgaagcatgcccggaggctcagcatgaagcactctgtacccagctctacctcctcattgtccttcatccagtgt

SEQ ID NO: 126392 - DNA, 1083 bp, Homo sapiens
acttcctactattagggccttctttcatataagaaatgatatgccgtggggagcccctgttccttatcatggttataagctctgaaactgcctatttttttttttggagatggaatttcactcttgttgcccaggctggagtgcaatggcgtgatctcggctcactgcaacctccgcctcccaggttcaagcaattctcctgtctcagcctcccaagtagctgagattacaggcacccaccaccacacccaactaatttttgtattattagtagagacagggtttcatcatgttggccaggctggtctcgaattcctgacctcaggtgattcacttgcctcccagagtgctgggattacaggcgtgagctaccgcgcccagcctgaaagtttggttttaaatctctcggatgttgctgctgtttgcagcagagaggcctggactgagtagaggtttggcgtaagtagcaccacgaaggtccatcttagcagagctgggacacagacaccttgataaggaacctctgtggcttctgttgctgacttttggtctcattcctccatactcagttggacaaacctctctgtatcttccattttggtagagaccttaacagtgtgaactgtgatgaacttggaccactgccgccaggctgggaagtcagaagtacagtttctgggaggatatattttgtagatcataataaccgaacaacccagtttacagacccaaggttacaccacatcatgaagtaagactttaaaaatattttttgctgacctctttcattggtaatcgaatgctttcttggactggtatttttgtgaatttattgactgtcttgctggttggataataagcatggtcaaaatgatgttaaatatctggcggataattgcatattttaaactcttaaattagctgtgaagagcactgaagccctatgttgttgctacccttttcttacttgcagcctacataaaatttaccgagatggcagtattaggcggctgcacgaaggaagtttccgcacgcagcgctctcatgagacacgtggcccttaggttgagaagtagagatacg

SEQ ID NO: 126393 - DNA, 1036 bp, Homo sapiens
aacaagcagtaattgctaacaacatcacaaaagagagatgatccaacattaacacacctcttggaaatacagggaaccaggaatgtgtctcacggccccaagggaatataatcaacaaacatccagaatggggccttctgtaggacagacaacccagggtcttcaacaaatagactgcaagaaaagcaaagacaggagggaaggagaacctgtcaacaattcatattcaaacaaacttgagacatagctacacatgcaaggtgtggactttggatcctgatttatgagacaattggagaaatctgaacaccggtatttgatttttttaaaaaattaatgaacattttttagtcatgataatggaaatatttaaggatgaagtcataaaatgttggggttggtggggagggattggaagagtggacattggatgatggttagctgggaggggtggacacagggggttcattgtactggtctctcattttttatacatatttgaaatttttcaatctaagattttaaaagagtatttgcttctaagggacagtagcctattaaggtgaattgtcttcaaaattgctcagggggtgaagattgatgtttaaaaagtatctaaaggcattttggcattttatgtaaccaggagtttcattatagagtaaaataacaaggaaaatggagtatttggatatgattttattttattttaaagatggagtctcgctctgtcacccaggctggagtacaatggcacaatcttggctcactgcaacctctgcctcctgggttcaagcaattctcagcctcccgagtagctgggaccacaggcgtgtgccaccacacccagctaatttttgtatttttagtagagatgcggtttcatcatgttggccaggctggtcttgaactcctgacctcaagtgatctgcccacttcggcgtcccaaagttgggattacaggcgtgagccaccgcatctggcctggatttgattttaaatcaagaaaaatgagatctcatttcacaaactcctc

SEQ ID NO: 126394 - DNA, 1169 bp, Homo sapiens
ctacatttgccccttccataaggagcaaggtagttcttcttcccagcttgttgaaattaatggatacgtatttattaaatgcctgttacatgtgtaatacagaggcaacattattttataaggtttcttaaagagaaaatctcaatgagatatcataattcagaaatacaattaaaagctgggcatagtagctcatgcctgtaatcccagcactttgggaggccaaggcaggtggatcacctgaggttaggagttcaagaccaacctggccacatggcgaaaccccatctctactaaaaatacaaaaattagccaggcatggtgatgcacgcctgtagtcccagctactcgggaggctgaggcaggagaatcacttgaacttgggagttgcagtgagctgagatcacacaactgcactccagcctgggggcaacagagcaggattctatctcaaaaaaaaaaaaaaacaaaacaaaaaaaaccaaacacaattaaaaatgagttttgcactttctttccagatatgttgggaaaacggattcgataaccattagcgtgtggaaccataagaaaattcacaagaaacagggagctggcttcctgggctgtgtgcggctgctctccaatgccatcagcagattaaaagataccggatgtaagaaccaaacactttcctgcctcttaatgcaaccaaagaaagcttaggaggcatcgttttttgttttgatcgctgaatactgaattcctgccttcctccctagttcacgttccttgggttaagttttgaattgtttgtttacagaccagcgtttggatctatgcaaactaaacccctcagatactgatgcagttcgtggccagatagtgggtaagaactttcttgtctgtgtaaagagatgcttttccagaacttacattcaacccttcatcgccgagaactcacatacaggcactgacgatgctgacgggcctcagaggacagaccacgtacggggccttctcttcagtactaggaagttttgtcttgtgtagtttttattattttatctaattcccttctcctggcttttttttttttttggtttttttttttttgagatggagtgcagtggtgagatctcagctcacctcaacctccgcctcccaggttccagcgattctcctgcctc

SEQ ID NO: 126395 - DNA, 1025 bp, Homo sapiens
tctgatctaataaacctctctgattcattctctagcatttagggacttaccgaattaaggcctggtgaatacttgcttccatagataagataggcaaagatcagtaaacaaatttcggggcattattaatttttagaaagtctaaatacaattactttcagacacttttccctccacttaattagccccactttaatagaaatttgaatgtaagcctttttttttttcagtcactttcttttctaccctctaaaaatctgagtatggaggcatactaggctctcttagaaagctcaatagacataacttattttgctgattgaaattatcctgaaattagagaacacgaattgtgtgttctgtgtcacatggatggatgtgaggtctcatctaggtgtgggtctcctctctcctctagggctccctgacccttttgcaaagattgtcgtggatgggtctgggcagtgccactcaaccgacactgtgaaaaacacattggacccaaagtggaaccagcactatgatctgtgagttgaatgttctgtaagccccatgcggagcggcaggaaagcaggtgtctaccttttacgagaaacatccaagagaaaaaaaaaaaaaggatgactttttattgataacaaaagcggatggccaaatgaatgtctacattgcctaattttagaattcatgtacttggaagttcttgcattttgttactttcttttttctttttttttttttttttttgagacggagtctcactctgtcacccaggctggagtgcggtggcgtgatctcagctcactgcaacctccgcctcccgggtacaagtgattctcctacctcagcctcccaagtagctgggattatggacatatgccaccatgcccagctaatttttgtattttttagtagagatggggtttcaccatgttggccaggctggtcttgaactcctgacctcaagtgatctgcccaccttagcctcccaaagtgttgggattacaggcgtgagccactgcgcc

SEQ ID NO: 126396 - DNA, 1032 bp, Homo sapiens
gcacgatctcggctcactgcagcctccacctaagaagttcaagtgattctcctgcctcagcctcccgagtagctgggattacaggcgcctgccaccatgcttggctaattttttgtatttttagttgagatggggttttgctatgttggccaggctggtctcgaactcctgacctcaggtgatccacctgcctcggcctcccaaagtgctgggattacagatgtgagccactgctcccggccaaatactttttttttttaaagaaattttcatttagtaaataatgctgagctcagaggtttatgtgtaggagagttatacaatgaaaatgttttattcatttatccaacaaataattatttcatgattaaaaggaattagagaaaagagatgccagagcctattgtactcatccagacatgagataagagttgcctggacttgagcagtggcagcggggctggaaagaatggacctaaaagatagcacaaaagatggattgatagcgtcggaggagtcatttaatgtgcgcggcagaagcgatcagccttgcactatcgttgcttttcttgctgatgcatttttgtctatctagctaaactctaaactcttatgcccagacactaccttttatactccttttacaataggtgccattgtcgttttattcttgtttaaataatttatttaaaatgtattgttccgcagagcatggcattttaaacaccgacttaacatcctctagtaagataatgctaagacttataagaagcaaatgccacttctgtaagtcttcaaatcactcttgtgtttaattttttttgtttgttttaagacagggtctttctctgttgctcaggctggagagcagtggtgcactcatagcttattgaagctttgacctcctgggctcaagcagtcctcccacctcagcctcccaagtagctgggaccataggcatatggcaccatgactggctaatttttttaaaattaaaattttttttttttgtagagatggggtcttgctatg

SEQ ID NO: 126397 - DNA, 1001 bp, Homo sapiens
aaactgattagtgtggctgtgttccaataaaactttatttacaaacacaggcagtagcttgccaaccccctaactagagcgtagctgtcactttgagacctgagtaacttctctgtaggattacacccttgcaagaattctgcccgcagcatttccgagtttgcattataaccttgtgggcagggcagtgaaagtactgttatataggaaagttaccgtctcctaggaattttgttttaagaaaaagattctaatactaaagtatgacatttgttgaatattttttattggcagtaggaaaggaaaattgaaattacatacaggaactccaaaagcttgctcgtgctcatttttcttctattacagattgaacatttaatgataaatgtgggtggggggatttaatatttcagaacagaaggcagagattaattttattttgccccctaaaatgtaatacattttctctctcttcttgccccctgccctgccctttcccactcctcctctctgtccctttgctgggatagggaaattgactgtaaggggattatgggtctatgtgggagggagagataagagggtctcagcaaaatgccaccttccaaccctgctatcgctgtaagcagtagggaaaggaaggggtaggtttatagctcccaacccatgatcaactagttctacttccttgattgtttgatcatggtcaatctgtagaggatccatttctgaagagctttgtttaaaacggccccttctctaaacaccttagagttttgcacccagtgccccggatcacccgctggaggccacagaggacaaacgctagttgcagtgtttgtgagctgcctttgctgaacagtagtgcgcgtgggaagcatcagcaattatccacctgtttctcaccatccctttccaaactgacttttactcattcatggccatggagatatatttgccagtctttgtcaattcatcagtttttttccaggaagtccttt

SEQ ID NO: 126398 - DNA, 1007 bp, Homo sapiens
ctctgcaaacatctgtgaatgaccagggaggtgccacgagtattgatttttggggttacaaatacattttagcaagtaggtgaattcacaaatacagaatccaggaataatgagaatcagccatactcgaaagactagaattggagtctgtctcagtttccatatttataaaatgggtataaatatgacacacactggaagtttgtgaatatcaatatggaaaggttaaatgagtaaagctttcattgtattgccagacctttgagtcctcgataggtgatagtggtgttagtagtaattattaagacaagttaaaaataatagcagctatctttatttgatacctatatcattgctcgcaataaccctgaaaagtaggaagtattatctgtatggcacagatgagaacattaaggaccagagaggttgagtaatttggcccatccatcacccatctgggaaatagccaaaccggactttgaacccaggatttgatgacttcaaaatccatatcttttggtctggtgcagtgaataaagattatgtctggcttcaggtcccagatgatgaagttgggattgatattaggctggtgcaaaagtaattgcacctaatgcatccaggtgagggcagaaagtagttagggcaagaggaaagccatgtggggaaggttagacttgctgcccagagctggagacattagggcagagtaatccaactgactaatcttgggatgaaaagacgtttaaaaaaaaattataagactagggtagaagccagagggggctagaacgagaataaagctttagctaggaaccatctggaaagagggtctgggcaaggaacattttgtttgtgagggaggtggtgaattagaggctccttggtttcagatactcccgtccaccatctttctagctgtccacaccttcccttttcccctcttaactgttgtgtagagattattctgagctaaggcagagcagtcttgtgaatgcccagaccct

SEQ ID NO: 126399 - DNA, 1019 bp, Homo sapiens
gtttaattttttatagagacagggtctcacaatgttgcccaggctggtctcgaactcctggtctctagtgatcctctcagcctcccaaagtgctggaattacaggcgtaagccaccacgccctggccataatatttatttttttattgccatttataacttggcttacactgctactggctatttactaaaaatcagagcaaactttgccttattattatgtattgcatatatatttttgaaaggtcactcttgcagttttactaaaaaaaaaataaataaaagtttcagtgaattccggaagtttgggaattctcggtttacgctagccctgtcctgtgtttctgtttggctctgtcctcaggccttgccaccattttctctcggtgaaagaacttggcttcacattctgttcagtttcatgaacctgcctgtcactttgaggcagcgtttgggattctgcttcattagcctttgaactcatgaaccaagttgagaggatttgctactatagacaattatttgatcttcgagatattttgaacagttcccaagtgcaacaccagtggttgtccaaaagacacagagaagtgatgtgaaattttaattatgtaaaaaaaaaaaaaaaaaaaaaaaagaaagaaagaaaaaagccctgtggcatggttgatgtcagtgctatggagtgagccttttagtagtgcggtcaaggacactacttttttttttttttttttttgacacggaatctcgctctgtcacccaggctggagtgcaatggtgccatcttgactcactgcaacatctgcctcccaggttcaagcaattcttctgcctcagcctcccaagtagctgggattacaggcgcccgccaccacacctggctaattttgtattttttagtagagatgaggtttcatcatgttggccaggctggtcttgaactcctgaccttgggtgatccacctgccttggcctcccaaagtgctgagattacaggtgtgagccactgcgcccggc

SEQ ID NO: 126400 - DNA, 1012 bp, Homo sapiens
acagatgggagcattgtgtgtgcattgttgtatacttgctttttgcacatacggatcagggatttctctgtttccttacctcctgatctgcctgcgtggcaggaacattcactatgcaatgactatccctgtgctcgtcaacgttcccgtgtgaccttgcagttaggtgggaccatgtaactacttctggctagcaaactgtgagaagtgagttgtcccacttcggggctgaagcactaggaacctccagctctgccacagaagctgtgtgtcatgtggtggagcctctatcagcctagatccctgagtgattacgtgaagccgaagctggcccttccccccggcccctgctcagacccaacctatgctgaacacgtagttgagcaagaaataaacttctgttatgttaatttgtttctacatcacacagctcctcttgatatagctgatttctttttaatagctgtgaaattcataacactttgaatgaacccagttcagatgatcaaatgcttaagaacaaaaaagcatctaattaaagaataataactttaaatatacaaatatcagatcaatgcatcttatcccaatgtgttgccacgcaaatatctgtatacataatttctaattaaactttttaatttttttaaatttatttttctgagatggcgtctcgctctgtcgcccaggctggagtgcaatggcgcaatctcagctcactgcaacctccatctcctgggttcaagcaattctcctgcctcaacctccgagtagctgggactacaggcacatgccaccacgcccggctgatctttacatttttaatagagacagggtttcaccatgttggccaggctggtctcgaacatctgacctcgtgatccgcctgcctcagccaaccaaagtgctgggattacaggcgtgaaccactgcacccagcccagcccataattaaaaaaaaaaaaaaaggaatatatgcttattgaaaagtataaagaagaaataagtactt

SEQ ID NO: 126401 - DNA, 1037 bp, Homo sapiens
attttagtaggaaaatagtttttaaatggtttcagtaggtttaggggcataatatatccagaatcaagtgatcttttgttaaagagcattatcttgtagtcattggagttcactggcaaatcaaacactttagaaacattttgattgaaaaatcaagcaggatttgcaaaaactttgttcttatctggtacacaaatgaatcccagacacattgtttaggccactttgggtaaaagaatggaattcagggttctacaatgctcttcaagaaaattaaattttattgtaatgtcaaccaattagttgaaatacaagtgcctaaacttttttgtgcttttatgcattgaaatactctcagatatcctggtgtttttatatcttttggagcatgactgcatattgtgaagtaagaaaaactctaattccaaacagagaggaacaaagagactttccttgatagcatgtggaaatatgaggttgtttttaaaattgtagcttgtgggatgtaagggtgacttgtgttttggcattcagatggtgcaactgtgagtgaaatagttgtggtaatagctgttgatgatgttggttgatgaattacaggtgtctcaattgattcaaaatagttaagtctctcaagaaagattaagaaaattgttaagactgttgactttgtcaatttgtaccagctaagaacctcacttatgtgaggcaggcaaaacttttgtttcaaaaaccatataacacagttgctgtgataagatggaataagtggtcagtttttagctccctttgcatttacattttccttagggtctgcctcaagtttaggaagatacagttaaggcagttctttgagatgaattattggaaggtgtaggatgggttagaacaaatgctgttgcaaaacttgaattgcaattatactttaagaagaatcacattctgccaaatagaggtttttgtcattgattttgtgatttgatcacatttgtgttgccttttagaacaactttcttttttcaaatccattttttttt

SEQ ID NO: 126402 - DNA, 1146 bp, Homo sapiens
caatgtagatacatttttatttatgtggtaagataaaagtaacatttttgagattgtaatacttgtaaagcttttaacttggttctgatttacagctcagtctgtaattgacatcagattggtttcagttatcttgttaaaagcgaaagcaactgattttgtgttagaaatatgatgaatgttttagaaggaataggttttaattgaaatgtttatgtctggtgtatgtatattaatcaatcctatttgccaagcctgagccttgaaagggaggacttggtttctcctcctaccaaattatttttggatttaggaatttagattatcgaagcaagaatgctttgaggaatttttggatgacatttgatagggaaggatcaggtgatgagtgttgtttctgaaacaccttttccctttccctttccctttcagtagatgttatgaatggtttgagaggatttgtgagtgtgatcatccttacaataggattgcggtttagcggtaatggtacacatgcaatgccagtacgtggaaccttagtttacctcgaaaggtttgaactagaagtttgttgacggtggaataggttttagtctcatctttctggttaagggaagtttgaattctcacttctgggatgttgagaagcaatctttcaaaatttgaatacttttgttacaggtttcagagtttatttccatgtttgttatttggaaaaaaaaaaaagactgttaaaaatgagggatatttcaaccagtcaatgaatagacacagagcgaaattcagtgcaaagatagtgaagatggcctggcgccgtggctcacgcctgaatcccagcactttgggaggctgaggcagatcacgaggtcaggaggttgagaccatcctggctaacacggtgaaaccccgtctctactagaaatacaaaaaattagctgggcgcggtggctcacacctgtaatctcagcactttgggaggctgaggtggggcggatcacgaggtcaggagattgagaccatcctgactaacacagtgaaacctcgtctctagtagaaatacaaaaaattagctgggtgtggtggcgggcgcctgtagtcccagctactgggtaggctgaggcaggagaatggcttgaacctgggagg

SEQ ID NO: 126403 - DNA, 1009 bp, Homo sapiens
accctcttctcactcccccatcctctttcgtttctccctcacccccccacaccgtcctcctcccttcttcccctagccccgcccctcactttcaagccccgccctcattcctgcctagccccgccccctcgctgctgtctggcgaggcctccaccctttctttccttcagcctgaaattcctcaatcctatcttgtagctgctcccagtcctgctctcttcacttccccctggtccagccctcttcagtctcagtctgggccacttcctgtctcttaggccagaccgctagctacttttaactctgcttcttcaatttttaccttttctgcattttgtttcaccatcacccccacactcagcaacccagagcgccgtgaggctctgatccctactcccacactcactggaggctttggaagctgcccacacgcaggctccttgattcattttgtcttcaatgaaaagtccgtgtttcctgggtggctctgtagtgccaccttcaagggtgagcgcaacgctctgccgcgggcctgcgacttggtggcgcggatgtgatgccaacctgtttccccccgggctccagaggttctggaccaggctgcatcctcgtcttccctttctcactctcattggtactactctctttccagtttcaattcatccctaaagcaggatggccgtgttgcaaatgcggctctgctccgggactttccaaactcgaatatttccagctctggaaggaaactaaaaagttcattctaatccccgtcagggattttcccctggatttttctgttcagtggctcagtcgggtgagaactccaaagtcctggtttggtcaggtcctttcaaagagagaatgagcgttttgaacactttatggcagatgcgcagccataaagtcatcggtaaaatccatgcaaacaataggtaatttttttaaactaaaatttactttgagagcccatagttgttgcatggcccaacttttgtcttaagagaaggtt

SEQ ID NO: 126404 - DNA, 1026 bp, Homo sapiens
cggcgcccagcccggagccgtaaccttgaggcggcggcggcggggccgggccgggccgggctggggggcggtggcgctggatccgcggctgcccgatcgttggcgggagatgtcgaaccccgggacacgcaggaacggctccagcatcaagatccgtctgacaggtacggccggcgggaggcccacccgcgccccggcgccccctcgcccgccccggaattccccgcagggcgcccttggaagcggccctcccccacgccggccgttgtcccaggacctcgtcacccccttcggcgtgcgcccctcgcttctccctcctggccccgccccctcgccgttgcccggccccgccccctggccgctcgcgccccctcggtctcgcgttccctcccgttcccccgcacctgccccctcgcatctccgtcctggccccgcccctctcatttccattcatggccacgccccttgcatctccttccctggccccgcccctcgcttctcttttcctggccccgccccttgcatctccttccaggccctttcccctcacctctccccggctcggccccttgcctctcgcttcccttcctctccctagcacctgacccctcgcttctccccccaggccccgcccccttgcctttcacctccatccctgtggtcctttctcttccccacctttcctccccaaacctgaccccgcccatctctctggccccaccccctcgctcctctctgctcccgcctcctaactttctgtccccgccccctcgcttctccctgcgtccagctccctcgcttctctctggtcccgcctcctcacttctttcctagcctgggccctcacttcttcctggtcccgcctcctcacttctttcctagcatcggccctcacttcttcctggtcccgcccccttgcttctctcctttttttctcctccgccgtttttaccccctccctccttctcctcgcttcccatcctctccgcccacctgccccctcgcttttccctcctggccttgcct

SEQ ID NO: 126405 - DNA, 1045 bp, Homo sapiens
ccagactggagtgcagtggtgtgatcttggctcactgcaacctccacctcctgggttcaagcgattctcctgcctcagcctcccgagtagctgtgactacaggcatgagccactgcgcctggctaattttttttttttttttgtattttttgtaaagacagggtctccatatgtggcccaagctggtctggagctcctaagctcaagctatcctcccacctcgacctcccaaagtgctgggattttgggtgtgagacaccacacccagcttatatggctattttctcccacaaagtattcagagatcttctggagttcatctgttaatcacagttaaaggaagggaccatttcggaaaactcctattttggacgcggagtggtgatactttgatctagttgtctcatccaatgctgaaacaaatcctatataaagaagtttaaaatggtctgctggtgaggctggtgcctggactggagcctgtctgaatgttgaggagggtgtggtgaccttgttggagtacttgatgttgctagattggctaatgagagtgattaggaactaggtgaatcacggtcttgaaaactgaccctaaacaggggacagaaatgcccacttttgtgggcattttcaagctccaaaggagtagggccaagaatttatagcatatgtcaacgtttccaagctcagaggaaactaactggtgggttctatggttggtttaaaagccttgagttggccaggtgcagtggctcacgcctgtaatcccaacactttgagaggctgaggcgggtggatcaccaaggtcaggagtttgagaccagcctgaccaacatggagaaaccccgtctctactaaaaatacaaaattagccaggcatggtggcacgtgcctgtaatcccagctactcaggaggctgaggctggagaatcgcttgaacccgggagacggaggttgcggtgagctgagatcacaccatttcactccagcctaggcaacaagagcaaaactccatttaaaaaatagaaaagccttgggtcaaagg

SEQ ID NO: 126406 - DNA, 1050 bp, Homo sapiens
gtggattatgggccaggcacagtggctcacacctgtaatctcagcactttgggaggctgaggagggcgggtcacttgaggccaggtgttcaagaccagcctggccaacatggtgaaagtccatctctactaaaaatacaaaaattagctgggcctggtggtgcacacttgtaatcccagctactcaggaggctgaggcaggaggatcacctgagtccaggaagtggaggttgcagtgagctgagatggtgccactgtactccagtctgggcaacagagtgagactctgtctcaaaaaaaagaaattatattataatcaactttcacttatcaaatttggttttcatagctctctagaacagttctcatcctgcctccatattgcctttttggaatagtccaggccagttcttctatagaatggcacacaccctggctttaactgtttatttcctccttgtgttgcttgactagttcctttatcctttatttcttgtaaactgaaaattagatctgaatcttgattggatttagagtaaatatgtttggcatagagacttcattggtaggttgaccatattcccaggtttctccaggatagccctgtgacctgttgtgttggcataattattatttatttttgctctcagaagtgttctggtttggatggtacgttaagtcactatttataagtgacgatgtgtacttcatgtggactgccatcaggaggcccatccagttagattgatccactatttataacatggtgattacgtggtgattgccagatttcttcaacgtaaaggcatctttttctctttgtagttaataagcaatctgtgggatgataatttgagactaggaatatcctgtacccatggtttaagagtccattgacgaccctgaacagaataaattccacattagttgttacaatgctagatttattcagatggttaagttttgacaatgagatagatttttttttttttttttgagacagaatctcactgtgtcgcccaggctggagtgcagtagcgcgatgtcggct

SEQ ID NO: 126407 - DNA, 1024 bp, Homo sapiens
gaggccaaggcgggtggttcacttgaggtcaggagttcaagaccagcctggccaacatggtgaaaccccgtctctactaaaaacacaaaaattagccaggcatggtggcagacgcctgtaatcccagctacttgggaggctgaggcaggagaattacttgaacccgggaagcagaggttgtggtgacctgagattgtgccactgcactctagccagggcaacagagcaagactcggtctcaaaaaaaaaaaaaaaaaagagtaagagaggcctgtcgtggtgaacactctgccaaggaggtgggcggtgggcagtgcatcctccagggactgactgagtcttgtttcagggccatgactgctgcccaatgctctttaactacgatgaccgcggctgcctgaccttcgtctccaagttagatattccaaaacagagcatccaacgcaacatgtctgccatggaacgcttccgcaacatggacaagagagccacaactgaggaccgcaacacggccttggagacgctgcaccagaatagcatcacgtaggtgccgtctgtagagaggtggtcaggtgacaaggtgccttcctgcccctcgctgtttccttactgggttcctacaaaagctctatgcccctcaggcccagacattctttcagggacaagtgcagcaagaagtctgtatcttcccgaccgccaggctctcatttccagctcgtggtagggagggagtcgccaccacctggtcattctgtccttcaaggtgcagattacaaggcagcagccagcaggagcagtgcagaccttgttgcaatctgaggtggtggggcctcagggcagctgcttcctagggtaccctttctcagctactcgagaacaaaaggagacattcctgaatgctgcgttcccacagtagtgcacacataacagaaagcgaagttacagcctgttggaaaaggtaactgtagctgtcgtttcaagtaatggatacaaataagaagattatttaattaaaggaacagaa

SEQ ID NO: 126408 - DNA, 1210 bp, Homo sapiens
gtaagttctagacatctcaaaggagaaagaaaaatattgtctgagcaatggatgattgtcttgaaagcttccagataattaggctaagacaagttgtttcatttatctgttcccctgcttagcttggtcggaatctagtggtgtgtctgctgctaacatttatgatgattcacttcagactcaaggagggctgttggcttatctgcactggctgtcttggaggctgatttgagaggttttgtttggagctatggaattcagtcatgcttcatcatgcctctggtttatttaaaaacaaacaaaaatactgttttcgccatggctgtggtcctacccacaacctgctcccagcatttgagtgctgtgtgggctgggtcattcctgcttccccaggtcacgctaaccaaggcaagttcttaacttctccccttgccagttttgtctttcctggacatctggtaataatatgctttggggtattttctgagccagattgttgcagcctaatgttcatggataagttcataatcaggagttaaaagataattcatttcctggtggagcgtggtggcttatgcctgtaatcccagcattttgggagactgaggcaggaggatcacttgagcccaggagttcaagaccagcttgggcaacataatgagacccgcatcccagctctatttaaaaaataaagaagaagataattcatttccttaagctgcccttacactattagtcaggaatgtttgtgttcacttccactacataccttacgatctcttttgctttgctttttttcagtcaagtctctatttatgaggtggacaagcaagattgtcgcaaattttgcactactggcatcgatggagccatgacaatttgggatttcaaggtattttctacctaacagaacaaattttgtttgtgttaaaacttttttttttttttttaagagataggctccttctctgtcacccaggttggagtaagtggcacaatcatggctcactgcagccaccaactccttgcctccagcagccctcccacctcagcctcccaagctgctgggacagcaggcatgcaccaccatgctccgtgaatatttttacaaaactcttatgagaagaatgtttctcatttcttgaaacaaaatgttaaatctagtatacagtttaatgtcctaatgtaagacattaaactggaaatctct

SEQ ID NO: 126409 - DNA, 1053 bp, Homo sapiens
agtggggaaaaggcacacctggcctggaggagccagcagggggagccccggcctggagtgtctctgcggggtgagtcctgggagatcctgtttcaggtggggcagggccaggttcagggtggggacaggcagaaccttccctgaggaagagggagtggtgtcatacctacctcggggtagacactcctcagtgacatcagtgctcttcccaccttttccaagaccctcgagtcttccatccagggcctccggataatgtgaagctgagtgagcctccgccatccagcatgacaaactgtggccgaccgcagctgtgccgtggcacgatggcgaggaagccagccccaaggaaacactgaaaacacatatcacgccaatgccgtgtggttttgtttgaatataaaattggtgaaagtgttggtttttttaaggcagtaatttttttgtttgtttttttgcgatttcattccattcttgaccaaagcttctctttaagtagtttattatggaaaattgtcacactaacttaaaagacagggtgagggagatatgtaaattgtccactagaaaattaaataaaagaactgaatgtggttttggttttgtttccttgtagtatttcaatttttagtagaaaaatatgagcgaattcttcattcgattcagttttttttaggcaaaatcttagatccttggtttcttaaattgtaccattctatacaaccttgaaccaaaaagcaccatttagtgaggggtgagagagaaccgtttctgaacattgcaatacttctgcaaagtaggttgtgtcggtctgttttgtgttgcaataaaggaatacctgaggctgggtaatttgtttaagaaaaaagatttatttggcacacggttctgccggttggacaagaagcatggtgcctgcgtctgcttttggggaagcctcaggaaggttttactcatggcagaaggcgaaggggaagcaggcgtgtcccatggcgggagaggatgcaagagagagtggggaggaccaggctccttgaaacaaccaggtcatag

SEQ ID NO: 126410 - DNA, 1052 bp, Homo sapiens
tacattttatttatttattttaatagagaaagggtctcgcaatgctgtccatgctggcctccaactcctggcctcaagcgatcctcccgcctgggcctctcaaaatgctaggattctatgtgtgagccaccgcgcccggccgggatgggtggtggtagcctccgggctgcattggcagaggaggcagggggaggtctgactccccaggcttgcactcctgatcccttcactgcccgcgggtgcagcccggccccgccccgccctaggcggcctggctgctctcccagcgcctccggaaagggaggggctgctcggatctgccctggccgcggagccctgcagctgagggggtgcgttccgggaccccgccagccaggcccgccccgtacgggacccctcggacctggcccgggggaggcgggtgggagcagcgggagcggccaggagggcaggggcggggcggcaggagacgccagctcatttcccggcggctgcaacccggaaggctccggggatggaggggaagtgactgggtgtggggccccgccggcccgaagtaacggggctacaccgaccgaccgcggggcaaggctggggatgggggccggggagcaggggcggaaggcacgaggcggaagcttggggccgggggctggggacgccccgagggcgcccggtgcgctgggagcccgcgtttccacagtctggccctgcggccacccccgcgccccctccaatcccagggctccctctcctttccgtgagcccctcgtccccgcgccccctcctctccatgtgcccccactcatccccgtgcccctattgggcggcgccccacatctatgcgtcctcacttccaggcgccccccggtcccctccttgcaccccctctcatccctccagtcccgctcactcccaggcggcgccccacatctacgcgcccccccacctccaggtggctcccctgacccccacctccgggcgcccccacggccctcacctcccgcgccccggccgcggactctgggcagtcgacgcgccgaaccggctct

SEQ ID NO: 126411 - DNA, 1027 bp, Homo sapiens
ggcgacagaatgagactacatctcaaaaataaaaaagaaaaagaaagaaaaatgtgttgctgttttcttaggaccaaatgggtgtatgtgaccaaagaatgttaattttctttttcttttttttttttttttttttgagatggagtcttgctctgtcctccaggctggagtgcagtggcgcaatctcggctcactgcaagctccgccttccgggttcacgccattctcttgcctcagcctcccgagtagctgggactacaggcgcccgccaccacgcccggcttaattttttgtatttttagtagagacggggtttcaccgttttagccaggatggtctcgatctcctgacctcgtgatccacccacctcggcctcccaaagtgctgggagtataggcgtgagccaccacacctggccagaatgctaattttcaagttcctgttagtgttattctgttctattaatatttggtcccacccacttgttgaattgagtgcccttcagaagaattaaaccaattagcaacaaatgacaatttctccacagctctgctagcattgaattttgtgtgtttttgttttgtttggatgactaaccggtgctttaatggtaccttacgattgttttcatgtgtgtttcttgacttcactctgcgtggttggtaagacttcaagagcagagctggagagggaaggataggggtaggaagggctctgacccagcataggaagttgagtaaccgcttagcacggtgcaaattagcctgctggctgctctatccaagaactgcctgagctgggtggggacttcccagagcgcctgtaatgctgagatctttcctccaggcaactcctccttggtttagcctctgatacagccaaacctctggattcagggaaacctaaggaagccaggcaagaagggtcccgcagcctgtgcctagtctagccccagcctcatctggattaagatgggagggaaatattggctgagggcacccagccagtatgaagacagctagaatgt

SEQ ID NO: 126412 - DNA, 1050 bp, Homo sapiens
agcctttcagacctaaagttctagggttctggcacgtgtgttgggagggggtggggggttgctttgttttaacccctgcccttctcccacccctcagcaaaagacgatgccacattgtcaggaaaacgaatgcagtcactctccctgaataagtaactgcgacccgtgggaggagatgccggggacctgggccgcgctgccaggacctctgctgtgtctcgcccaccctgtgccctggcgccgctgcaacagcccctcatggccaggagccccccatggcctggggcctcctcttcatcttggcacagaaattgtttgggggatggggggggggactgggggaggggtagctgctatctttgagacagaaagatgcaggacagcatttcatatgtaaccatttgaatgtttttgctgtttttagaattcagagcccttgctggggggtgcctgggagatggggtaagaagagctttcatttgtctggtagatagatagcatgtaagggggtggttgtcccaggaggcagctgctgacaggtttgctacacacagccccggactgtgttgcctgggtgctcattcagagaggggctatcatctgggagcctgtgcccctgggtcctcgagggtcatggcttgtccctggtcagtcctgtctgactgacctcagggcctcacctctctgcccttccctgcccggttcctactcacctggctagggccagtgcccattttcagccctacccattgatcatttcaagaaacctctgtttactgtgtggcacccaggcaaaacatgctccacaaattcaacttgtatatttggcagattaaacttgacattatcgtaatctttgttttggcaatccatcctttggcttccgtgctcgagccgtttttacccagctgggtacggtgccacgttcaggcacgtgcacccggcaaggttcagggcacatacctacctggggcatgacatctgtcaggtggcaccgagcaggatgcggggatggaccctagataccacagcctgccccctcccctcctt

SEQ ID NO: 126413 - DNA, 1050 bp, Homo sapiens
tgtcttggcctcccagagtgctgggattacaggcctgagccaccatgcccagcccttccttccttgtaggatgtggtccccactgctttcatcctcctggtcatcttctctggaacactcttggcctggtcccccttctctccatggccgccagagcctgatcatgaagccctcaggcatcttcccctccctgctgtagctggacattgtcccctttccctctgaggctttctggacatcgcagatgttttctccctgggcctctccctcctgctcacttgcttggtgaacgtccaccaagcagggggttcatggaggcagggactcacagccagggcaccccttccacctcggccctaggccgaatccttggcctttattctgactcccgtccagtttggcaaacagtggtaggaaagatgtccccatgacaccattttatccacacagagaagagattgagaagcagaaggcaaaagagcgttacatgaaaatgcacttggccgggaagacagagcaagccaaggctgacctggcccggctggccatcatccggaaacagcgggaggaggctgcccggaagaaggaagaggaaaggaaaggtaagggctgggctgcgcacgcagggacaggccccaactctggtcctgggccagccacaaagcactgaactcgtgtccctgtccgcgaggtgacaatgaggtgaggagtgactgctgcctaggaggtcgttcaggagagggccaccctccctgtgcctgccactccctcggggaccaggagggtccagcgacatcatggggtcggatgtaggttgaagtctcagcagagcaccgtccacagtaggtggacagtcactcctgctcccaacagcgggaggtcacaggaaaccatgcccctagtacagaccttgcctgaggctcacaggtcccactaaggtctctggtgccttgggaacccaggagagatgcctgaggtcaccgctgtccatctgcagggcttgggagggtgagctggatacacagcagtgcagactggcttgacatccag

SEQ ID NO: 126414 - DNA, 1090 bp, Homo sapiens
gtagcttattcttgggttacaagtccagtccatcagctaaggtgggtgggaattggaattagtcatgacagcacacacttggcccaccctgccctggggattccagcccagcgctttttgcaagaagaatcaggcatgggattccatggaaaactgcttttggaagccgagcttgaagtaggggagtagtgctgtgtgagtgcttgcaagtcggggtagggcgcacctctcatctaccacctacttcctggttgacttgggcaagttattcgaccccgagcagccgttctgtgggctcttcccaggctgatgaagatgctccagagagctatacccactgtgagacttgggctgagcactacgtgggctggggtggagcaggagtttgtcctcatccagatgggctgttgagagatggcaggagtggccctcaggggctccacaggacctgaactccaacaaccagcttcttgccctgttctagcaaaagcgcaaaggcgttgaagggctcatcgacatcgagaaccccaaccgggtggcacagacaaccaaaaaggtcacacaactggatctggacgggccaaaggagctttcgaggagagaacggtaacatcactggctgggccttgtgtcacggggaatacaggccagcagttggcctgtgggatgctaaggtccccagctggctgggagctgtggctgtttatttctgtctcattccccaatggccctccagtagcctttaaaaagccacacagaatttgttttcaccaattgatacatgatatcaggggaaataggacaacaggctcagacctgagcataacacttgaggtaatggtgcaggatacagagggttgccctccattcccctcttccagagcaccacaccctggggagacttcccttaccccactgatctgaccattcctgacctgcatccatctgtaatgtcgtggccatggggactggaagggggctgcgagcctgtgccggccagaaggcagtccagcccagcgcagctcagccagctgtcccaggcctctgcaagtcctgtgtgaaaatgaagctgtaaatatcttcctcaaga

SEQ ID NO: 126415 - DNA, 1124 bp, Homo sapiens
gttctggggagctggtgcaggaggtcacctgtgtgggtgggtcggggggatgacttgccatggagtgggagtggagtgcggagaggactcgcctgggaatgccagcatgatttggcagctgcatgtggcaggtgggagctgagtaggatggtggttttcagcctggtggctgagtccttctgaccccaggaaacaagcttctcaccctggctgctgaggtggctgcgttaggaaggggagcagggccttctgtggctgtgtgaggggcttcctggactatgggaatggcctctaagctgtggtgctaagtgcataggctgcctgtgtctggcccaggtcccattccctgggggccagggtcacagtaggacccttgtcatccttggttccagccttccagaggcttgatttctcaagatccacagtctggggggtgatagggtcacagtcttggggatttgttttgcatttttgattctgcaggttgtccatttctgaaacaggaagaagaggagcaaaaagaaggtggagatggggctgcaggtgaccccaaaaaggagaagaaatctctagactcagatgagagtgaggatgaagaagatgactaccaggtactgagttcttttgagggcctagagcctggactcattcattcaacaaacaaacgttgagtgaccgtttagtactagtcccaaaggtagatgcagacaacgtccttgctcttgagggtttacactacgggagatacaacaaagaagtaaacagacagtgtcatttcaagtaatgagaagtgttactaacaaaacagactgtgattgaggggacttggaaaagtgttgtggtggtgaagcaacttataaactgagatctgaaaaaacaagatgcagccagctatgtgaaaattggcgtgcagagcaattgagaaactggattagcaagtgcaaaggtcctgtggtgggaataagcttggcatgttcaaggaccagaagggggccagtgtagctgtgagttagtgggtaaggagcggagtggtccagatgcaggaggagaattggcaagggcacctcctgtgtagctgttgaaggggttggcatttcttttcttttcttttctttttttttttt

SEQ ID NO: 126416 - DNA, 1021 bp, Homo sapiens
gtctcaaaaaaaaaaaaaaaaaagtgcccctggctgtgacagaacatcgtgtaaaaagcccttatagtgacggcagggatgtaagtggtacatgtttctgtggttgcatctgagtccactatgcttggattgtaagggaccaggggatgtagcaagtcattgcagtgcaccgtccgccatgttctcccctccggtcttctgtgtaggagccagcatttagtacacagtttggtgatgcatcagatggtcacgagttgcttcctgcgtgcctttgaacacatgagggtggcggaggtgtcggtttgggtggtgctgggtgaggggtaggtgaggcctccgatgagagtactccaagcaggacacagccctctgggggtcagagcagtcaaggcagctgcttccgctcacctaaactgcgggtctctgcaggaagaaagggaggccacaaaggccgggcgaggcagtatacaagccctgaggagatcgacgcgcagctgcaggctgagaagcagaaggccagggtgagtacgtgcctgtccaggccacgccagtggcccagggtggcgctttgccaatttggttcatagagaggccaggcaaggactacccattcgcagggacaagccagcacgtgggggtcgggcgggcagtgagccccaggtgtgagtctcagaacaaccaatgacagtcagggcgtgggcatcctctgcctggatgggttagaaagaactgtggctgctctgcagcagctgctttagtggggccctgttcttggtcttgtgcacctactttcaggaggatctccctcctgcaggacctgtccattcacagctcgagctcccagcacccctgcttgtctgctgcagccacacaggatgatttgccacactgcacatgacatatgccctgccttcccacacccccagcatcagcatgctctccatccctggagacgttgtttagcctctcctcctctgtgactcatgcctcacctccagccagagctgatttagtagttccc

SEQ ID NO: 126417 - DNA, 1042 bp, Homo sapiens
cgcaatgcctaaaggaggtgaggggcgggcgccggtggcccgcaggcctggaggggcggcccaggtccggcttccgctgtcccctcagcccgtgcgcgtctctgagagcagcgcagagggaggctgtccgcaccggctgagagccaggcctgggcctcgacgcccaattgtcccgatggggaaactgaggactgtggtgtcccagagtcactccgtcagtggtctgaggagtttcggaagctctgggtcctcgccggcctagaaagccggatctaggatgcgcttctccgggtctaggggttctggaatttatcccactctttggctggctaggaactgagtcaccgcgtcccgcgcttgtgccgggcccgcctgcctctcgcgtaaaacgtgggctttttctggcttcggttcagccaggcctgcctaggaggacttaaggagatgcccatgagccttccagacctggtttcgactcccccgttcggtagcggctcggtgtgttcctttgagccagtcgctccacctcctgtgtctccgttttctcatttgccaatgggaataacgattgtacctacctcttagtactgttgggaggcttcaactaggtaatccacgtggagtgcgcagtacagtgccaggcagtcgttaaaagtgcccagtgaagcagtaactattcttatttttaaggctttgccagctcttgatcttgtaagtaggttcatgactgcccagtccattgtagcccgtcctctatcttctagcccgttctctatcctgtttccccctttagaatcgatagtccccagtttgaatcccagctatgtcacgtctaattctgtggccctgaacaagttaacctcttcctcatctgaaacactgggctaatccttagcttgttgaattggggccggggtggtaaaattatagcgctcataaagtgcctggccacctcctggcacagaacaaatatatttgtgttggtagctcatgtgttatattggttaatgcactcaacccacagaaacatctgcctgtagcg

SEQ ID NO: 126418 - DNA, 1003 bp, Homo sapiens
gagaccagaattcacctatttttagcttcagcgtaggggagactagtgcgaagaccactgatttgggagtcaggagccctccagagtcaggttttgcaaattctcagctgtgtgaccctgattctaccttatagagtttgattcctcctctatatggttgttttagagagttcatgagaggaggctctgtgggcggggggggggtgggtctttgtaaagtgtcagtacagaagggagtgactgaatgaatttgagagagatgaatctgttatgctgaaaggtaaatacttaacctgggttctctctggcagcaaggaaatgctgtgtggtttgaaaaacgctttgctatttagattgggatcggcctcttgtatgggaactacctgactttatgtaatatgttgtttggtgtgaaagagaccttggcaatcagccaatccactgccctcattttacagaagaaacaggaccagagagggaaggtgacctgaaagtcacagaataattttttagagctgaacaagaatccaagcctgcaactgcagagacgagagatctttctgctgtctatactcttggaaagcacatcctaaggtactttgattttacagtcatctttccctttttattttatgttttgttttgttttgtttgttattgagacatggtctcactccgtcacttaggctggagtgcagtagtgtgaacatggctaactgaagactttcaacctcctgggctcaagtgatcctcttgcctcagccttccgtgtagctcagaccacaggcacccaccaccatgctcagttaatttttttgatttttttttttttttggtagagatagggtttcacctcattgctcagactggtctcaaattcctgggctcaagtgatcctcccatctcagcctcccaaggtgctggccaagaccagaattacaggcatgagccaccgtgcctgaccttccatctttgcctttttaaatactcacccccatggctc

SEQ ID NO: 126419 - DNA, 1020 bp, Homo sapiens
cttctaaggggcaaaggcttaacttttgttctgtgttcccaacatccagtatagggttaagcttttagttgaagttagctaatgacaacagcaaatgtctcttaggcacacattatacaccaggcatgatagatacaattctaatgaagtctttgcaatgaccacataaggtagcttccattatccccattttacagatgaggaaacagaggcttaggaaggttaagtacctttctgaagatcacagcgggtaagtagcagagccaggatttgaacacagtctgggtgctgagccctgtcccatagctgtgaccctatgctgactcaaggaagtcagcctgtaccgaaataatggctggcaaaggcctttggggatttgagactcagaaaccaattcatttttttcccccagatctttgcagattatcctgtggaaggaaaatgcctaaagtcaaaagaagccggaaagcacccccagatggctgggagttgattgagccaacactggatgaattagatcaaaagatgagagaaggtgagtaggggagttcctgtctgggtgggctgggtccaagggtcacaggcttagatgcccccaggggacaggcataaatgcaaatataaaaagagagtggtctactaacactgacatgttgtgtttgcttatgaacttggggaaatactgtaagtgcccgaaaataagataacattaatgaaaaggtcctcagaaaaggtgtttttttttgtttttgtttttgccaactcgaatataaaaggttatgaaatatagatcaaatagtctacctatagttatttactattttggttagatatatatttaaaatcatacaaaatatatttacttggaagtgctattccttttcagtatcatcgattagtctttgccgcatctgttttctgtcacttccttgtaaatggcgtgtgatcctgctttgtgaacccgtgtcctatgctgtctttggaaattttatctgaagccacaagcatctgttggcctta

SEQ ID NO: 126420 - DNA, 1049 bp, Homo sapiens
gactgaaagggacaggaactcactggttgtccttccctgatgtcaccctgccaccaccttgggattagggctccccaccaccatttcctaagtgaggaaaggggttcagtaatttgcccaaaagtggagttgagattgaccccagacctaacaaacacacagccacacgctgcctcacatggattcctgaatacagggacccactcccacgagggagagccagcaggacatccagggacaaaacgacattccagcccaaccaaataacataagatcccttgcagtcgactaaggcagaattttgagctgaaaacaacaccaagcttgagtgtcagacattaccacttccagcttgcttttgggcacgcggcagatgcagttcgtcccgaagttggtgtcccgtgtctgaatgcaccgcaggcagcacaagttctcatatccttgctttttccattttgcaatcaggtttttgtctgcatagccttctttaatacaatattcatagagttctgtcaaaaagatggggaaagagcatcaggccatggtctaaaaaccttccccacccttgatcaaaaaaagcattcaggccgggtgcagtggctcacacctgtaatcccagcactttgggaggccgaggcaggcggatcacctgaggtcaggagttcaggaccagcccggccaacatggtaaaaccccgtctctactaaaaatacaaaaattactcgggcgtggtagcagctgtaatcccagctacttaggaggctgaggcaggagaatcacttgaacccaggaggcggaggttgtagtgacctgaggtcgtgccactggactccagcctgggtgacagcgaaactccatctcaaaaaaaaaaaggcattcagtattgcaacgggacagtccttggaggaggaacaaaaaaaaaaagtacttaggccaggcaaggtgcctcacacctgtaatcccagcacttttggaagccaacgccagaggatcatttgagttaagaaaccagcctgggccaagggcccatctccacaaaaaatttaaaa

SEQ ID NO: 126421 - DNA, 1037 bp, Homo sapiens
tacaggtgtgaggcaccttgcctggcctaagtactttttttttttgttcctcctccaaggactgtcccgttgcaatactgaatgcctttttttttttgagatggagtttcgctgtcacccaggctggagtccagtggcacgacctcaggtcactacaacctccgcctcctgggttcaagtgattctcctgcctcagcctcctaagtagctgggattacagctgctaccacgcccgagtaatttttgtatttttagtagagacggggttttaccatgttggccgggctggtcctgaactcctgacctcaggtgatccgcctgcctcggcctcccaaagtgctgggattacaggtgtgagccactgcacccggcctgaatgctttttttgatcaagggtggggaaggtttttagaccatggcctgatgctctttccccatctttttgacagaactctatgaatattgtattaaagaaggctatgcagacaaaaacctgattgcaaaatggaaaaagcaaggatatgagaacttgtgctgcctgcggtgcattcagacacgggacaccaacttcgggacgaactgcatctgccgcgtgcccaaaagcaagctggaagtggtaatgtctgacactcaagcttggtgttgttttcagctcaaaattctgccttagtcgactgcaagggatcttatgttatttggttgggctggaatgtcgttttgtccctggatgtcctgctggctctccctcgtgggagtgggtccctgtattcaggaatccatgtgaggcagcgtgtggctgtgtgtttgttaggtctggggtcaatctcaactccacttttgggcaaattactgaacccctttcctcacttaggaaatggtggtggggagccctaatcccaaggtggtggcagggtgacatcagggaaggacaaccagtgagttcctgtccctttcagtcctcacagtgatactttaacattaccatcactatctttcccgcccccccaagacggagtcttgctttgtcgcccaggctg

SEQ ID NO: 126422 - DNA, 1753 bp, Homo sapiens
tttctggctggccaagtgttgggccgcaccaggcctgggggacaagacccttctttctggggggctctgggccagaagggtgtgactcaagtgcatagtctcctgccctcttcccccaccagagtgtaccagcccagaggcccccctgaagtccccaaacagtagcagagccacgtctgctcatcgcagggtctgtcatgctcacttagcagaataacgagactcattcacaccgatttctttttcttgattggcaaacgtgtgttggatttgcagaacatattataaatagacatacagatgtaacctcggtgtcaacagcagctggttctaccttcatgagggagccaaattttccctgtccagagctgtcaaggaagggtttctgaggtgtgtccctatatggcatggtggcaggtccttcgtgggagggttgccacatatgtgagtgtgcaggggcgagcgtggcgcagtggcatcgtctcactgtcctcctccgttgcagggccgcatcatcgagtgcacacactgtggctgtcgtggctgctctggctgaggctggcgcgctccaccctggactctggacttcgcaggttcctgcctgtcacgccacccccttcctgggagcagcgagcagtgccccaggcccgagttggagcacggtctctatggggaaggcttcgctgtctatcagctgtgatttgtaaaaataaaatctttaaatctctcgagccccacgtctcttctttcagagcatcggcctatggaacccggcggggcggcccaggccccagggaccagatgccccagcccccttgtggtgtgtgaggtgacacacaaaggtagctggagctggaagtcccgtgaaggtgacacgcaaaggtggctggagctgcacttggacctgctgggagcacaggcaccttgggcctagtgtgtgtcctcaccaacacctgtgacacgctgcggctgttcctcagggcctggctcttcccccaggcaggaggtgacaccagctcacttgtcctggggctcccacagagcactgggggccgagcacattgttccagctgtgctcccatcacctgcccccaagggcacatccgtcatcagcctccttgccggtgtcctggtccccctggggcttggtccggaacttctgccaggggtgcggggtttcctctgcgggcatcactgtcagccactgcttgtaataggctcggaagccgtcaatcttctccaggtaggtgttcttcccttggtactagaattagaaaagtgaggctagaatcactcctgttacctacagctaatcccaaacctcggcagctggctcaggcctcagggaagctggtggctgccattttcccttccaggtggctgcagaggacagggcagaaaagctgtgaacacgcactatgggactagcttacttcagagaaacaggtccccgctgggtaccctggggcaggcccagagccatctgcccaatggcgttcttcccaaataggcaccactgtgctcctccatccgcagttgccaccccaggcccccaagccagaatcactgggtcccaccagctctgcctccacagcctgccgagcccctccccatcaaagccacctccctctgaccattatctcaacactgccaagataggctccatgagatatggggaaaaaagcaaagacacaccagacacaaactgagagctggtaggggaatataccaaaaaagccaaaaagtgctatcc

SEQ ID NO: 126423 - DNA, 1560 bp, Homo sapiens
atgcaacatccgtacacaattttttttttctatttttttgagacagagtctcgctctgtcgcccaggctagagtgtggtggtgcgatcttggctcaccgtaacctctgcctccttggttcaagagattctcctgcctcagcttcctgagtagctggaattataggtgtaccatcatgcctgcccaatttttttgtatttttagtagagatagggttttgccatgttggccaggctggtcccaaactactggcttcaagtgatccacctaccttggcctcccaaagtgctgggattatagacgtgagccaccacacctggcccacatacaattattacaggctggtctcgaactcctgacctcgtgatccgcctgccttggcttcccaaagtgctaggattgagccaccgcaccccaccccacatacaattattaaaagagcacacccggaggggtaacaagatggtaactgagatggtggagctccataagctgaagcttgctaaactaaagcaagaatgtcttcttgtggtttggagaccaagggaataaagcaagatcttatccacagactccaggcatatcttgaagaacatgctgaagaggaggcaaatgaagatgtactaggagatgaaacagaagaagaaaaaaaccccttgtcaaataggaagaaccccctgaaaaaaactgttgatgtggcagcagagaagaaagtggtgaaaattacatctgaaataccacaggctgagagaatgcagaagagggccgaacaattcagtgtacctgtgagcttggagagtaagaaagctgctcaggcagctaggtttgggatttcttcagttccaacaaaagtctgtcatctgaacacacctatggttaacttggataagccgaaggaaagagctcaaagatttggtttgaatgtctcttcaatttccagaaagtctgaagatgataagaaactgaaaaagaggaaggagcgatttgggattgtcacaagttcagctggaactggaaccacagaggatacagaggcaaagaagaggaaaagagcagagcgctttggcattgcctgatgaaaggttcttgatactttctgttctccagtgttttccacttctctcattcttcttggtcacatatatactaaatgcagtcttgccttgcaatgagggagcaggtaccccaggtaaaactgtgaactgccgcggcagtttgacttattgctgtttcagctttaaggttgttgtgtttttgtttttgattatattgcttgttttttgttttttttttttttttttttgagacggagtctcgctgttgcccaggctggagtgcagtggtgtgatctcggctcactgcaggctctgccccaccggggttcacaccattctcctgcctcagcctcccgagtagctgggactacaggcacccgccaccttgcccagctaattttttgtatttttagtagagacggggtttcaccgtgttagccaggatggtctcgatctcctgacctcgtgatccgcccgcctcggcctcccaaagtgctgggattaca

SEQ ID NO: 126424 - DNA, 1035 bp, Homo sapiens
atgtgggccaggtgtggtggctcacgtctataatcccagcactttgggaggccaaggtaggtggatcacttgaagccagtagtttgggaccagcctggccaacatggcaaaaccctatctctactaaaaatacaaaaaaattgggcaggcatgatggtacacctataattccagctactcaggaagctgaggcaggagaatctcttgaaccaaggaggcagaggttacggtgagccaagatcgcaccaccacactctagcctgggcgacagagcgagactctgtctcaaaaaaatagaaaaaaaaaattgtgtacggatgttgcatattaaaagcagtcctctgtttctgcacttaatgtgcttccccctggactagcatctcagaggcactgcctcttccttgaagcctgaccctcctcagaggccctgattgtctgtacgtctgtgagatcattccttccctctgcctcatgttaaggtatctgtgaattcgccctcctggaggaaggtgtgagctaggggccgttaatttattcctgtgtgtcaggcactttggctcaacgcctgtaatcccagcactttgggaggccgaggtgggtggatcacctgaagtcaagagttcgagaccagcctggccaacatggtgaaaccccgtctctactaaaaatacaaaaattagccaagcgtggtggcaggcacctgtaatcccagctacttgggaggctgaggcaagagaattgcttgaacctgggaggcagagattgcagtgagccaagatcgcgtcattgcactccagcccaggcaactagagcgaaaccccatctcaaaaaaaaaaaaattatttctgtgatctcgtactccagccttcctttccccacccactcttaactccttgaaaggatcttatatacaggaggctctcaaagcactgggtaatgactgttctcaatgtatgtgtctcattttgtagggcgtgactaacttaagcagcttcttccttgcttggttgggctttgcaaatttttgctacttta

SEQ ID NO: 126425 - DNA, 1050 bp, Homo sapiens
cgggttcacgctgttgtcctgcctcagcctcccgagtagctgggactataggcgccagccaccatgcgcggctaattttttgtatttttagaagagacaggatttcaccgtgacagccaggatggtctccgtgccagccaggatggtctcgatctcctgaccttgtgatccgcccacctcggccttccaaagtgctgggattaccagcgtgatccactgcgcccggccatgagtaactattaaaatgtaaaatgtctgtcagtgtagtacctcaaatcatgttgccttctgtgagggggacctctgcccctttccaggacgtgatgccttcaggtggctccaggagttaggaagtgaaggtacctcagcttcttcaggccgtgtcccccaggctcagggtggcctctctgctgacaccctgtccctatcttgccggcagggggcatgtgtccgtttcgccacatcagtggtgagaagacagttgtgtgcaaacactggctgcgtggcctatgcaagaaaggggaccagtgtgagttcctgcatgagtatgacatgaccaagatgcccgagtgctacttctactccaagttcggtaaggcgcctggagccctggaggctctgctgagaaccagggtgcagaggggtccgctggctgctcagtgcccacactgtctctgcctgcttttcccatctttctattctcagaggagaactctggcagaacctgccagcctcagccagcttttaggggacagtgtggctattttctgctcatctctttttttttttttttttttttaaagacatagggtctcgctatgtttcacatactggtcttgaactcctgggctcgagtgatctgcctgcctcagcctcccaaagtgctgggattacaggcgtgagccaccacgcctggccccgcgcatcactttggagtgcttcagtgtttggagctctttcaatcactcggatttgaggctaacgagggtgacccggaagcagcgagttgtgcagctggctgcattatgtccgtggttggtttctgtccac

SEQ ID NO: 126426 - DNA, 1050 bp, Homo sapiens
tacagggggacccatgtggctggggggtggcagaggctgagcctgcggaggggcctggggaaggagtttgcatttcctctggattttgagcacagttgtaaacatggattggagaaggtgagcctggaagcgggcaactactcaggaaggcggttcttggtgctggtggtccctggggtccgctgctttggagagggccaggtccacaagtgcttcccctacccttgtcccagctcttagatgtgaagagccaatcagaatggaacttcctggtctcaatgggtgcatttccatcacagctccgctgcacaggaagctggggctcagaaacactcttccctggctctcagggctcgtcaggccaaaactggacaccagaacctcttttccttggatgaagccaaggtgggcctggccccggccttcccagtggtctcacgtctgagtttccctgcaggggagtgcagcaacaaggaatgtcccttcctgcacatcgaccccgagtccaagatcaaggactgtccttggtatgaccgtggcttctgcaagcacggtaggtgccagggtgggctgggccccgggcaagaagccagtcctcccttctctgcccacgaccctggaggctgccagctggtctacctgtcccagcaaaacctgacattctgcagctagcggctttctcacactcctcatctcccttgcctctcccaagaatgctgggtgggtggtggtccacccgcttttttgataaggaggccagtgttgggaggtgaggtccctgccccgtctcccatgaatgggggacagccagcatttgaaaccatgctccagctctctaactggtagaggggacatctaagtgaccggacacttggctctgcaggtcccctctgcaggcaccggcacacacggagagtcatctgtgtgaattacctcgtgggattctgcccggaggggccctcgtgtaaattcatgcagtgagtagccagctgctccgccctctaccccagctcccggcccaggccctgctgccctccgtatcttccctgg

SEQ ID NO: 126427 - DNA, 1079 bp, Homo sapiens
agcctctcaatgccaagggcaccctgagtttggttatgggagtcgggagttgagccaagaggaagggctggcgtcaaggcagggcgggcatcaggcagggttcccaacaggcccatcaagcccaaccacctcctgagcccaatgcctcacctcctaccctgctgggctctggactggctgccaaagccccaccagccccgctcagtgctagaggctgaacagccaggagaggatgcggaggatgtagctgcgtggaggcgccaatcacattgaactcttgatggggaaagccgggaattccaggtgtaggtgcagccgtgccaacctgggggttttctagctcgggttctgcacttacgggccagagccaggagcccacctggtggggaggaggccctgctgtggaatccctaccccaggagccctggccctcctcctggtggggctccctagaggagggtcctctcagcccgagaacgcagctcagtgtgtcaggctccaactgtttttctgtgacttgctcgccgtgtaggctgctaaacatctggctgaaccaagcgttcatcctgacctgaagccagaacctcagaaaccaaagtaaggcctgatcatgccctcgccccactgccccagagacctcctcttgtctctttgatgttttgttttctattttatttttcgtttttgtgtgtctgcatggtgtttttcgggcagtggcttctgccatcatcaccacatgtttctctgctgcccactgtcctgaggtgggccgtcgtggaagccctgcttcctgccgtttgcgggacgagtcccgccctcttttttcctgtccccatcggtagtctgcgtgcacgtgttttccacagtaaaaccgtgttgtgtaactctttccagcaaagtaacaatccgccattacaaaggtcgtcctccttgatccagttaacgagtcagaactcttctcccaatcagcagagaaccccgcaggtcatcggggtcatgcagagtcaaaacagcagcgcgggcaaccggggaccccggccactggagcaggtcacctgttacaaggtgagtccctgggc

SEQ ID NO: 126428 - DNA, 2062 bp, Homo sapiens
aacattcatttttgctgattgtaagcataaagttacagtctagttaccatccactgtggtgggctagagactgtcctatttcctaccacactgcactgaggcacggtaaaggatggtgagaacgcctgcctagtgaatggacggggcctgcaggcaggtgagggaagcccccaagaggccgggaacaaaatagaaacactgatccagggaagggtgagcccttggagccgctggctgtcctgggggcatccttggatcctgcagggcacacccgagaaaacaggacactgggttacagcacccctgtccccatcccctcccccagtacataaaatgggactcaggaagggtgagcttcaagaaacctcctcgaaaactgtcctgttcactcctggctctgtgggaagcggggaaaggggaggaaaatctcttgatagtttgacgttattaatgggcccttatgtgagtctaggcctgtattcatgtccttggttaaggctggaaagttacaaactaagttttctaatctaaaatcgccccaggattggtgtgtccctggcacgtggcaggagtaacccccagtactctttgaagagtatgttctcaacccaaggcgcacacaattcctacagctggagttctgaagaatgagtccagattaaaaatcacaaaacaggctgggtgtggtggtgcacgcctgtagtcccagctactggggaggcttagatgggaggattgcttgggcccaggaggtcaagcctgcagtgagctatgactgcaccactgcactccagcctgggcaacagactgagactctttgtctccaaaaaaataaaagagcatggaagtggggcactgtgtagagcagacttagctgttatcttgccaccctccaggcctgttaagcggggccacttctgtgcagcaagcgcccttaagtcctggagccttagaaaggtagggctgaccgcccctgtccacagcctgtcaccccattaatgtcagagacacttcatgtaagtcctggattccccagagtcagctgtggggtccgacagacatgccagatgccgtgagcagggtgtgtggtccctcccccagccatcatgttagccctacagcccatcggcagcctctccatacagagtcacacctgcagatcagacaaagttgaaaacacagggacagctgggtgcggtggctcacgcctgtaatcccagcactttgggaggccgaggggagcaggtcacaaggtcaggagttcgagaccatcctggccaacatagaagaaagaaaacaggaattgcagagccagggaatagagctggcaagagtgttgggtgccaactgggcagagcccctcagggcagcagggactcaggggtgggtgtcagtacagagtcagtgcccccagctgcctcctgacccttttgttcagtgcttgaggctgccgttttaggagtcatagagtaaagagaagctatggaagggcctggataatcaggactgggatgaggcagggtcagggctggatttgtcatgtggctctgcaggctccccttacccaagtctaagcatcgtcccatctctctgatcctgtaatcaaaacctgtccccaaggtagcttaggtgtgtcacagccacgagggaaaacgttgggtacagcccaccctctgtccccagcagtggctccccaagggaggggaggctgggacacttctgatgctgttccctcccatctcctgccagggaaccccagaccttggctcagaggtaagtgactggcctgtggtgcagaagggcttggtccccagacggggtggcggagctcaggtgccacgggcttctctttgtcctgctacccacttgggagtccctccctgggcaggccatgtgtccaggtgggagagttgtgggcctgaaagagcaggtcgctagcaggtcgccttctggcggccttgttctcccttgcatctgcggagttgctggctagtttctgcaccactgcactttccatcctgagctccctcaccctctaatttgaaagaaactctgtaccact

SEQ ID NO: 126429 - DNA, 1290 bp, Homo sapiens
gtgtggcgagaaaggacactacgccaacagatgcaccaaagggcacttggcctttctcagtggacagtgacagcagctggagccagctccgagcagcccgggggccccgctgttgggagtgtgcatttaactgtttcatgcgcttgttggcgcgactgtggctcgagctggcccgcagacacgtgggtttcatcactctgaggggccacgtctgttagtttcctatcattttgccttagtattttttgaaaaagggacatgtgtcctgtgggtccctgcagtcgacatcatgtttggctgggcatcgatgcctcctttctgggactcccggcacaactcccctcatccagggagggaggcagctgctggggaggggcttggctaggtagttctgtgtggcggtggtcattcccctcattaaacaccagttcttggtgacgccaggggctggtaggtcattcaaagctgtggccagctcacgcctgcttcctccctccctgccctgctgaatcctaaagctgtgcctatatctgtgatttgaatgagggagccctttggggcaaattcaggtgcccccattgcctcaggctggccctggtcccaggtggcagcggttgaggaggggtacagggctctcaagcctgaggttttcttctctgggcttaattttctcttggggtacgtgcctgacagtgtttaaggtgtccgttgaactggagttgcagacttttaaatagatgaccccttcagatcatctgtgcctacctcctgcccatcaggcgtctacactgtcactcagacacctgtggcatgtggaggagactgccctgtcctgagcctggaaaatgtgaaactgtctcctgcaacctgctgggcatgtgggcctggctgtgttcaattgcaagaacaatttttatgaaatggattaaagcttgttttttaagccatgtctcattaattaagggtctcatgccaacccttttacactggctgcaatcacggcgtagctttcttgtccctttcaacaaatgtcagcctcacaaagggaagtgcagctgcccagaaggcctgcaagcagctggtcaagtctgggagtctgatctgtggagccagcaggcaggtcctccacctcagctcagatgtctggtggcacctatttctggggcacagtatcccacccccaatgaggctctgatgaagaggaagcagggaggggccgccatagcccctcacttttccccatcacccccaacccactaagcctcctgttagagaagccgcctcagccgg

SEQ ID NO: 126430 - DNA, 2956 bp, Homo sapiens
ataggagggccagtcctgaccccacgttgtgtgtgtgactttggtcacgtggcccaacctctctgagtctatcccccctcccctcctttaaggtaaagacatgaagtgcttgttgtgaagattaaataagctaataatgtcaagtaaatgttagctttgcagtaatctttcctgtccgccacgttactgcttttttcgagacccttttctggagttactcccagcaagctgttactcagacgtcctgttggttaataaagctgtccctgcagcagttctgctattgtatagactcagtcttaaaatagtgggcttgatgtgacatatttcttcataatattgtgtatgtgcagcctctgtgtaattgcattatgcacctttattgcatagttgaagcagtggcaggaaaggatgccatatgtgttactgggagattattcagtgggtattttttctcactcttccgtttcagtaccagtgaaggacaagaaacttctggaggtcaaactgggggagctgccaagctggatcttgatgcgggacttcagtcctagtggcattttcggagcgtttcaaagaggtcagagccttgtggatgtctgtaaatgaaagcaaatctctgggtcttcagatctcttttttgccatgaattaatttgggcaatgaaggccttgttgtctgaaagcagtaagttatgtagaggatgacagggagggatgctaggccttggacttctgtggttgattggccctttcaaaggctggctctgagatattacagccaagaacatgtttcctgttgcttggaatcagtatgtctgcctctgtcttagagaaatcctaagacttctttaagaggaaaatgaattggaaccgtagtgggcattagtctataatatgatgctctcctccctgccagaacttcaggacaaatatttgaaatggcctatcttggcctggtgtggtggcttatgcctgtaatcccggcacttcgggaggccaaggctggaggattgcttgagccgagtttagaccagcctaggcaatatggagagaccccatctctataaaaaaaaccacacaagaaaaattagctggctgtggtggtgcatgcctgtagtcccagctactcaggaggctataagctcacagccaaaggggagaggtggaatccaggtaggcctagttcaggagctggtatgtgcttatagttcaggctatggggatgagagaccttactggcatttgtgcttgtcatctttatcagccagtgaatgcagggcgaggggcttaaacagccagagcaggactaggtccctgaatgtcagccagactcaactgtgtgctcaacttcactcaaatgtgaagcccagcagggcagtgagcgcctcttgcgtttgcaggttactaccggtactacaacaagtacatcaatgtgaagaaggggagcatctcggggattaccatggtgctggcatgctacgtgctctttagctactccttttcctacaagcatctcagtgagtgcctctgcggcgtcttgcctttagttcccatgagagggtggtggtgactgatttcattagatacagcagcccaccttcttctgaggctgagggacctttagttaaagttccttatgtttccacctaaaagaattggagggacctatcagagtacagtatgtgggatattgtttgaaatgagaaaattgtgacaaagagaacacaggaaaatcaagatgaagccagggtaaagagagtacttagaagcattctttaaaatacagcacactgtgaaaatttggctcgattttcctagtagccaatgcagaaagagaaatgagttgagtgggataatctggtaccccagaaaagcatggctgttccggctctgaggcttgagaggagcttgtctggtgggagattggcgggaggtgtcggtggcagcctctgactaggctgtttctgacagtgtagtgtacaccccctacccccacctcactcccattctgtggcaccagggcggtcctgcctctgaaggacgggttctctggggctgtttgtctgagcgtgtgttccctctgttccttctggaaagaaagtggttggccaggtggcaggttggctcctgaggtgtctttgtgccccccgggtctgctgattctgcagagacaccggcaggcgggtcatgggtcatctctgaagggaattctcaggaaggctttgtgtgatctcagcctgcttcctgccatgctgtgccttcactgtaaccttttaagatacttaccatcttgccttcctgacttcagagcacgagcggctccgcaaataccactgaagaggacacactctgcacccccccaccccacgaccttggcccgagcccctccgtgaggaacacaatctcaatcgttgctgaatcctttcatatcctaataggaattaacctccaaataaaacatgactggtacgtgtgctgattgcctgcctgtctgccgtagccattatcccatgttccaggggctcctgtggcacaaggtggggggaggtcgtctttccaggccgttgaccggtgaaggcctttgtggacttcccagaccaccactctggtcgtgtcccagctccctggagggcagggtgtcatccagaccttcccgaagcagcagtgccgaagtccgtcccttgccatgagtgctgtgggcaggtgcatttgcagacattctggcctttagttggctggccctttatggtgtaacacaaaggcttgcgtacctgagagcgccagatcccaccccggctgtcctgtggctccaggcagggatggcccgcatcctgtgtttctgcatcaccctggggcatcaagggctacagggtgaggtgacccggcactgtctggagagacctcaggcagcactcacgcccaggctgcagggattgtggccctccggctgaggc

SEQ ID NO: 126431 - DNA, 1046 bp, Homo sapiens
cagaactttgggaggccgaggcggggggatcacgtgaggaaaggagttcaaggccagcctggccaacatggtgaaaccctgtctctactaaaaatacaaaaattagcttgctgtgctggtgcacgcttgtagtcccagcgcggcctcttcccaccttttaaggtagagagcccaggctgaggcgcccctctctctaactgcaggaccctcggatttttgctgtccaggcacctcgcccttcgcttcatggccttctagtagttccagggtgttcgcagttgtgacctgcttcccgtgagcctctgctctacgcccctggatggggcgtgcattccctacccagcagccctcgcgcggtccggcacagcggacaccaggactccaaaatggcgtcagttggtgagtgtccggccccaggtaaggctgtttggactccgtggtggaagcaggagccagggtccagggtccagagccacactgggagagaaggaagctgcggagctgcctgccctttgctcaggcacttcgccacgacctcacttgaggcgcgccagaccccgctccgcctgcccaggcgcgccttcctgctgcccagggcctgcgccaaccgggttaggcgtggagggtgaaggcatctggggcacgcgcttctgggcctgggaatgcgccgccttgggccactgttcctctttccgctaagaaatagccgcttccctctcccgctgcgacccagttgctttgcacttgaatgttaggcgcagcttttgcccttttttcccaaggcttaagctcagatgaagctccaggaggagctcaggactaggactgtacctgataccatgtaaggttcgatgcatatatgttgaatcagagaggcgaggtgacctgttcaaggtcacaactcgtgcgagggctgagctggtattcaaacctgaggattcgtggtaaatgaactttattctctaggacggccttatgactagcaggcttttccgagacacccatgtgtaaatcgctacattcatcccgctgtgcacactgatgat

SEQ ID NO: 126432 - DNA, 1034 bp, Homo sapiens
gagtgtgagaggatccagaaattagagggtcttgacagccaggcagaagaatttggcctcggcgcagtaggggccattatggattcctgagcataagaggaacatgatggcaatgagaaccgggcaaagatgttctcacttaaacctctttttctcctcccttagcccttcctgttctccaagttccttcccttcccctgaaggacagccaggagctgacagcttcacttctctcaactgggtcccaggtgagctggtgcccctttgccctcagagaggacccatcctgaaccttcaccaagagttctgtttctttagccagtgactaggcccatcttgggttggtaccttcattcctttggcctttttcctttctgcctagtccttccccatcctctttgaggcacagttcctccccctgtttcttttcttaatgagcccagttcttcccctcactccaaatttggacatagggaatgagaatttagtggagatctcctgtttcagaagttggtgaaaattgaagaggtggctgatgtggctgtatccttcatcctggaggaatgggggcatttggaccagtcccagaagtccctttatagggatgacaggaaggagaactatgggagtattacttccatgggtaaggattatttcatctgcatggattaggacatgtttattttgttatcttgtaaagagtatttctggctcatcttataatggcatttatgttttatgtgctatgactttgcttttttttattttttgtaaaagaataaatcagccttcattttttttttcttattcagtttattctgatcatttccatcttaataagagtatgattaaacactgatagtacttggggggactgtttttgcaatccagcagatgctaactttttactgctttaaaataagagtgggttggctgtggtggctcacacctgtgatcctagcactttgggaggccgaggtgggagaatcacttgagtcctttggactttaacaaatttttggtagttactatac

SEQ ID NO: 126433 - DNA, 1354 bp, Homo sapiens
actgtgttgcccaggttggagtgcagtggtgcaatcttggctcactgccacgtatgccttctgtattcaagcaattctcctgcctcagcctcccgaatagctgggattacagacccgcaccaccacgctggctaatttttgtatttttagtagagaagaagttgcaccatgttgatcaggctggtcttgaactcctgacctcaagtgatcttcccgcctcagcctcccaaagtgctgggattacaggccactgcgcctggccccatttttctgttacttatttagggtggttaatcattatcaactaatttttattgaatatccatagtgtgtaagatcctttgcaaagtcctgacgatataaaatgatgaaatgctttaacttattacagtaatttctcttaatcttaccttgcagtgatggtcattgtcctccagagcagtgatggaggaaataccagcccaggaagcagcagggtcaccaagggtccagtttcagtctttggagacccagtctgagtgtctgtccccagagcctcagtttgtgcaggacaccgacatggaacagggactcactgggggtaaggcagagaaagcacttccgtctgggagagtgggagtgcggaggggctcccgagggggctcctgggcctggtttgagagaggccaagaactggaataagaacatggtccctagagggaggaatgaaagagggggcagatgtgactcagttcagtcctagtctgagcccctttattaaggatagctcatctttctcaaataagcagagtgatggctgcttactcgctgtggtggtttttccttcaggcaaccttcacttcatcccagttctcacatccagaataatttctaagatatgctgcttttgccacatctcacagtcctttcctggctctcacttcctcttaggttcaggacctttctttcccctgttcccttcacttagtttttctttgctttgtcacctgccatccattctgttgtaactgcagtgttttgtgactagactaaatttggtcaaggaagcaaccatttaattccttggttgaacacaatgcctgtatgaatgtatatatactgtattttgactacgcagtcacactttgctgtatcgtataggtaggttggtctttttcttcctttgttttataagagctgtgtcttagattgcctgtggttaactctagtgcctgaaataacttgtgtgtcacccacacagatcaagtgccacaatgtgtagagtgctgtgggggattgtgggactgtggaaaagatttcgaggaaacagatgaccctttcttgttcttgggggccttacacactggttgagaca

SEQ ID NO: 126434 - DNA, 1785 bp, Homo sapiens
aacgctgatcaagtgtctagaacagtgcctggaaagggtcagaagtctgctaaataaccctagcccaggacaagtccccacaagtctttatgctttgctttgcccatctgcaaaacaggtatagtcttactcttctgtaagaggactgtcatgtgatgaagataaagtgaaatacaagctttcctaagaaaatcctgtatcacaggtcaaaacacgcataaggcatgcaagtactgagacgaagcagagtagacacacccaatacctgaaaaatgttcattggttttactagagtattgaggagggtcctgctgacaccccttgggctggagaggcctcctctgaaagggagccctgggaaagggctgctctcactcttcactcctttctcctccctcagctccacctgttcctcaggtgcctgctcttccccgtgagggaagcccaggagaccaggcagctgcgctcttgacagccaggtaccaggtgagctgaggaaccctctgcttttcctcagggactattgctactgatggagtgtggcctctctctcatcccatctgtagaccttgcctggaatttttttcaatagcagactccagtttgggaattgatcctcttcggagacctggacttcacataaaccaacttcccatctccccagtgccatgagcaaactctgttttctctttgtccatggttgtgtgatgggtgcttattagatgtttaagggttatgggctttattccgtaggttctaatctgttctccctcctcctcaacgtaagtacacagtggataccctctctatgatcttcattctctggccatggtgctacagtgttctcattcctcagagcagccaggatgtgttatttcaggagtttgtgacattcgaggatgtggctgtgcaccttactcgagaggaatggggatacctggaccctgttcagagggacctctacagagaagtgatgttagagaattatgggaacgtggtctcactgggtaaggacttccttattattcggtttatctatttgaatttctttactttcttgtttcttcctaagtataaggtctctgagaaggtctgtagagtgtggcttagattccaggacttagaacctctgaatccttatctttcacatcgtcttctccgggaggggtaattaacgtttgtttgggggtgccaagaagagacattctcctccttatccccagttcatgtttatggccattgtggggcatcttttcccttttagcaaagggaaactttcttgtgctttgcttgatttctcaccgttcttttcttttccatttttgtaggagagaccccagggtggcctcccaacctccaaccagacactttcctctttgttatctcagtgtccctgtattagagaattgaagaatttcccatttttctaggaaaaagaaatgccgtttatttaaaaagacaggctaaattccttcttgttgagtagtccctcaccccttaagatccccagatgtatctccaagcaggcagaacttgagatgtcatttgaaggcatgactcactgtgagtacatttcagtgagtcacccagaatggtaatcccacgtaaccacacccagggcagcagaaatctcagatgtttaccccatgctgaggtggggtcaatgcttaactcatgtctctcccttgtcattttgaaaggtacagtgggaagctgggattagccaagctgtagtgctgctgggaagcatcagtggggtttgtcggcagctcccttggtgtgagc

SEQ ID NO: 126435 - DNA, 2141 bp, Homo sapiens
tttagatggagtttcactcttgttgcccaggctggagtgcagtggtgcaatctcaactcactacaacctctgccttccaggttcaagcgattctcctgcctcagcctcccaagtagctgggattacaggcatgggccaccacgcccgcctaattttgtatttttagtagagacggggtttcaccatgctggtcaggctgatctcgaactcttgacctcaagtgatccaccttccttggcctcccaaagtgctggaattacaggcatgagccaccgcacccagcctcctttttctttagtttcttgcttgcttctgcactcttctttttgtgtgtgtaaatactgaatcatgcattttcttttcttttttttttttccgttggctttgtctatgctggtggcatccagggcattgctttgtctccctgattatgctcaggattcaaggtcttcttatttgtggggaggcaggctgcccactgggacggtttttagtgtgttttccattcctggctctttaatctttgtaggcatacttctccgccttcccaccacccggattcatagtgtgaattcctgcccggccctgagtcatacccaggcaagtgctttctctggagaaacacttgccgtccttacagcaggaatctccaagagatggcccaagtatcggcttcccatcgatattgctcgtccctgctcggaaactccttttccacgattgtgagatattaaaattgactgatggaatagaagctccccaggatgccaccactgtgtaaaatcgcagctcctcaaattacctctgtttaatttcaaatgttagggtccaaggaagccctctgttgcaaccagatatgttttgaacccagttcattcagaaaccatggttggtggtcatcatctacttgtattgtgaaaaaccagaaattccaaattcagctcttcagttatggtcttttcatattattttagaatgtgaaacttatgctgtgtgcccctccttttatgtggcgaacacaacctgccccgtatggtgcctaactctcctgtgaaccctgggcttccctcatgtttaacattctggtttcctccttccttgaagtccctgtggccctcttcaaggtcctaccttcctaccctttattctttgtggttctgtacagattgatgcaattatattgcctttcctgattaagtgttccttactctgtccttgatggaggggagaagggagggcaaagaagttaaatttatttcagggcatcaaattgaatatctacttaataactttgtaaactgtaaagtgacatacatataattgtaaagtactgttaattttatctaataattacagagtttccaacagttaacctgtctactttttggagtaaagaaactttgtagcagtttaatgcagtctaatagcatagtatgctatagactgaactttatcccatttcctctcttatctctgcactgcacactcgacatgcagtcgacatgcatacacacttttacacatacaagagacacgcacagtgcaagaaagccttctactcatcttgcttttgtgatcaagttagcagcatctccttagcagttatttttacaatccttgggaaatcattttcatatttttgggttcagcagacttcatctgaaaattaacccatttatgcctagtgttccattattggaacactaagcttgcgggaattatttatgtcccgctgctcaaggtcatcgccaaggtctgatttttaacaaaaattgcaacctccagcataactgggttaagtttatacatttattaatttaactttttagggttgtaagactttttttttttttgagacggagtcttgctctgttgcccaggctggagtgcagtggcaccatctctgctcaccgcaagctccacctcccggcttcatgccattctcctgcctcagcctcccaagtagctgggactacagatgctcgccaccatgcctggctaatcttttcgtatttttagtagagatggggttttgccatcttagccaggatggtctcgatctcctgacctcgtgatccgcctgtctcggcctcccaaagtgctgggattacaggttgtgagccactgcgcctggcctccag

SEQ ID NO: 126436 - DNA, 5970 bp, Homo sapiens
tctgggctggacacatttaaaaactgccctttgatactaatagtattaaaattctgtctccttggaagcagactgcctgttgctttagctttaaaagagatttatatccaagcattgcattatgcaagccatagaaagactgttttatgtgaagatgcactgattgcacttccctctctatattttattgtagttagttgtttagagctgtctctgtgtagagtgtgaggtccttgagggaagggaccttcttggcctcttatcccctgcatactttgcatagaggaggcacttcataaatgtttgttgaataaatgctacactcctaatgggtaagaatgtgtcatattactctttgttttcttatgtgtactgaaacaaattgtttcttgagattggtccttagaatatttattcagttttcactgattctcttgctacaggttagctaaccatgcagcaggtgcttgagtttcacctttctccagtccagcagaattacattttgatgacctccattttgatacttgtagaccagatctaatccgaagattaatctttaggtaacagatggagagtgataatgataacttctgtgaagacaaacccatgcacacattctgttgtctgaataatatttaaatgaatccttctgctcccaagtcatcaacttgccccttaacacacatccctctagagcacaaatctgagctccttgtagatctttgccctcttcactctccagaccttcctaattaatgtcttctcagaatcgaccttctgtctctcttaatcattagttaaaagaaaaagtggcagatgtaggacctggggatacattgccacatcccatttccttctctatgagcaggatttccaatttccaagcctgatgggatctcccagctggaacaggatctacaggtctttgatctggaaactaagactagagaagtcttaagagatgactgctcaggtgagtaaggcagaatcagatagaattagtagggaagtaaagttcaattgttgagccaagttgtagctgctttggcactcagaatgaagagctctgtgtgtgtcctagcatggagagttccttccttttcccttcagttaggttgaccctttccatttgtttagtatccgtgcacatgtcgtactagaccccaatcaagttgcttatctaaaattctttcagctgtttccctattatttccttactctgctgaacatgtccgctgttttacctcactgctcctgtttatgcccttaacttctgctgttgagattttgtgcctgtttttcagagtaaataaacttttcttgtccttgtagatactacattgtttagttttctcatctgagttttcttttcctaagcacagggtacagattacatttgcattttctatttatatattgtatcagatggagagaccagagaagagaacaagctgttgattcctaagcagaaaatttcggaagaagtgcattcatacaaagtgagagtaggaagactcaaacacgatattacccaagttcctgagactagagaagtgtataagtctgaggacagattagaaagacttcaggaaattctaaggaaatttctgtacctggagagagagtttaggcaaataacaatcagcaaggaaaccttcaccagtgagaagaacaatgaatgtcatgaacccgaaaaaagcttcagtctggactctactattgatgcagatcagagagttcttagaatacagaataccgatgacaatgataagtatgacatgagcttcaaccagaattcagcctctggtaaacatgaacacttaaatctaacagaggattttcagagtagtgaatgtaaggaaagcttaatggatctctcccaccttaataaatgggagagcatccctaacactgagaaatcctataaatgtgatgtatgtgggaaaattttccatcagagctcagcccttactagacatcagagaatccatactagagagaagccctacaaatgtaaagaatgtgaaaagtctttcagtcagagctcaagtcttagtcgacataaaagaatacacactagagaaaaaccttacaaatgtgaagcatctgataaatcctgtgaagcgtctgataaatcctgtagtccaagctcaggcataattcagcataagaaaattcacaccagagccaaatcttacaaatgtagcagttgtgaaagagtcttcagtcgtagtgtccaccttactcaacatcagaaaattcacaaagagatgccctgtaagtgtactgtatgtggcagtgacttctgccatacttcatacctacttgaacatcagagggtccatcatgaagagaaagcctatgagtatgatgaatatgggttggcctatattaaacaacaaggaattcatttcagagaaaagccctatacgtgtagtgaatgtggaaaagacttcagattgaattcacatcttattcagcatcaaagaattcacacaggagagaaagcacatgaatgtaatgaatgtggaaaagctttcagtcaaacctcatgccttattcagcatcacaaaatgcataggaaagagaaatcgtatgaatgtaatgagtatgagggcagtttcagtcatagctcagatcttatcctgcaacaagaagtcctcaccagacagaaagcctttgattgtgatgtatgggaaaagaactccagtcagagagcacatctagttcaacatcagagcattcataccaaagagaactcatgaatgtaatgaagatgggaagatatttatcaaattcaggcttcattcagcatctgagagttcacaccagggagaaatcatgtatgtactgcatgtggtaaagccttcagtcatagctcagccattgctcagcatcagataattcacaccagagagaaaccctctgaatgtgacgaatgaagaaaaggtattagtgttaaactcttaatcgactcctgcaaatctataccagtgagaaatcttacaaatgtattgaatgtggcaaatttttcatgctattagtattttcataccttagtcacatttggagaattcacatgggaataaaattccattgctgcaatgaatgtgaaaaagccatcagtcaaagaaactaccttgtttagtatcaaattcacgccatgcaaaaagattataaatgtaataagcatgtatgtgtgtgaggagattcagtcataacccaacgctcattcaacatcaaagaatttatacctaagagaacttatttgggtgtagtaaatggcagatctttcaataggagtttaactagtctttgtcatatcagaatatccatagtagacaagaatttgatgtaacgcaaatggaaaaactcgacaccacatttcaggctttacccaacatcgaaataatggagagaaaattgttgattatttgtttatgaaattgttaatacatagtcccaatctttttcattgcacaaaaatctagggttgacttggtaaatgcagtgacattttctcatggagttcctttatttaatatgtattctaagtaggtacgtttatttttacttttttattataattttgatattaaaaagaacagagatggggtcttgctttgttgcccaggctggtcttgaactcctggcctcaagcgatcctcccacctgtcctcccaaagtgctggggttacaggcgtgtgtcactgtgctgggcctattttatttatagaactcatttaagctgtttttattttaatatgccctataaacatttttatattttttgaaattggttcttagtgttcacaacttccataagatactgctaatgcaccagtattaaaacacatcgacgtaagtagctcatttagctttttctgctgttcttggcccaagttctttccaaaaccaactcttaggcctgctctttactagggatcttatgtcgtattgctttacagccacaacacttggattcctgttgattaacttctccattctcttaagcacctttagaagatttagaagtttcctagttttaagtgtttcaccagcaagtattccatacctacttgatgttgctggtctggtgtcttatttcctaaagtgaagcatctttttttaaaaaagaatttgattgacaatatatccagtccaatataagtatgaaggattctctctcctgagattgtagcaggcagccaaacattttcaaatgatgcccaaggttttagctgtcttgtgtgcatccacagtctgcgaagaagacatgataaggacatcagggagccaacaagactcctaatagcctcactacattcatccagtgcctattctgcatgcctaagcttagagttcttttatatacctctacggccagcaaaatgctcaggtctgctcttggtagggtaaacataaagaagatacacaggccgggcatggtggctcacacctgtaatcccagcactttgggaggctgaggcggatggatcacgaggtcaggcagtcgagaccatcctggccaacatggtgaaaccccgtctctactaaaaatacaaaagttagccgggtgtggtggcacgcgcctgtaatcccagctactcaggaggctgaggcaggagaactgcttgaacctgggaggcggaggttgcagtgagccgagattgcaccactgcactccagcctgggcgacagagcaggactctctctcaaaaaaacacaaaaaaacaaaaacaaaaaaccatacacacacacacacacacacaaatcagcatcataagggaatgtagccttccaacagagatgatgctgttcgtatgttaatctcagagacagtatttcaagagagtggcaggtctgttcctggtaaaattttaaccattaggattgcagataaatgtttgaattctgctcctctctcatcaatccaggacagtatttgaagtgtgagggctttgtgtatagttgtttatccattaccacatttttgtattttaatagtctacaggctatataaaagaacatggctttttgactgataaaagtgattacagatgttggctcaagttcagggccaccatcatatacctaacaagagttcatgattctttaggtaatgtcaaaacattttgtatttttccatcttaagctttataacattttgtgagtaagacaaatgttatttaaaattcttgttgtcagtccagcaattgaggctttcatagttcagtgttataatattcagtagggaccctcaacaaatatataaaaatatgttgctcactctataatcctcctatggctaacctctaggatagttctgccactatattttacttctttgccatcagcaagagtaggatttcatcaaggcaaggtaggaatctaaatgaaattgatatataaatgaattgatctaaatgtaaaagcaaatgaaaaatgcatgtgttttttcctgtcaaacatgtatacccttatgtatagagaccagtagtcacgtatggtgactgaaacaggattatgtaatccctaaaaagcagaatatgtaaaaatcacatgtatgcgtttggtttaggaatgtgcttttgtacttccacttgaataaaggtgtgtttggtattctgagaatttgtttcaaacaaaatctgaaggtctcagacagaagcgtttgggaatgttggaatcacatctctggctgcaactcctttcctccctggaacttgcttcacagcaagaatggatcactttcctttgcattgataacaaagcttgcttttccacagacctctggaacaaaagctgaatgtttgggacttaaaggggatttgattgggaagttgttggtatataaaataagactaaatagttcgaggtttcagtagaactaggaataactttttgtttgtttgtttgttttttgagacagtctcgttctgtcacccaggctggagtgcagtagcg

SEQ ID NO: 126437 - DNA, 1084 bp, Homo sapiens
tctgagtttatcaggaaaccccttatcacgaacaatttgtctccttaatcttttttcttccttttctgcttcaatacatctcatgcctctggcaaacccatactcctggccggctaggtggttggctcttggccccttctctaaggcttttcttgcccgttccccctgcctatttataggtggtgcaaaagtaattgcggttttgccatttaaaaaattgcaaaacagcaattacttttgcaccaacctaatacacgctccaggccaagctgggagatgttggggtgcacacagggagaggaggacaggctggcctgtgggtgaagagcgcgggccccgcagggtcaacccggccagtggtcacgaaaggaggtggagtggggggaggcgacatagggcaggaagaggggaggacaaacggggttcacatggggaccgtggcgatgacacggaagggacagccagttagagtctaggcccacttaggcgatgaagggcaggtgaagaaatcccgttccatcttcctgcagtcctcccttggggagtccacatcctatccttctctggaccggggcggctcctggagggaccgcgatcgaaatgaggcctccgagccgcccagagactccgaagtgcgcgcagcggaccacgcggtttccatgcgccccctagggtgggtgggctagctgtgcgccccagtgcggagaacggaggaggggtcggccccgtagcggctggaaacgcagttggcggcggggcccagcttgcggggcttctgatcgcaggggcggggcccgccgccggtttctaagggcctggcagagttcctgcagtcacggtcaggggtctttgctttcgtccatcccctcctggagaaagaacgcagcttctaacgccttctcggttgggcacccttcttgggaaagctccgcctaccattgcccttgtacctgccctctctctccctttcctgaagtgactgcccgtctctagcatcgtgttgtgaatgtgtcgagattttggcgctgcagcagcatcggagattggatccagcccacggagaggtccccagactccatttgtc

SEQ ID NO: 126438 - DNA, 1041 bp, Homo sapiens
tgtctccacttgcagtttttaaaagagttgcttccatttgactttttctgtctgctgtaccagcatatgagtttcaggagggtaagctcccagtgtgtcttgttttctattttatttgttgtttctgcctgcctcttgtgtgtgtatatgtgtgtgtttgtgtgttgcatgtatgtttcctttagtattggaagagtaggccctggtgactcacccagttataacccattatatattattctctgattgtagtgttattctccagtgagatcctaagttatttgtgggtataaaagcaaaatcttagacattttctgtttagtctctgtacctaatagttgcttagcaaatgattactatgttgaattgacctgacttttgggatctgtgttcagtcttttgaaaatgccttgtaaaaggtaattactgtgttctccagtggaatattccttgatgtagagacagaactgggatgggctgacctttcatgtgtctcttgttctcaaaagggtcattgatgcagtcattctcagtctcctcggagggagtctgaagatgcttaaagagcatccagagatggcggaagctcctcagcagcagttgggtattcctgtggtgaaactggagaaagagttgccatggggcagaggaagggaggaccctagtccagagacttttcggctgaggtttcggcagttccgctaccaggaggcagctggaccccaggaagctcttagggagctccaggagctctgtcgtcggtggctgaggcccgagttgcacaccaaggagcagatcctggagctgctggtgctggagcagttcctcactatcctgccccgcgagttctacgcctggatccgggagcatggcccagagagtggcaaggccctggccgccatggtggaggacctgacagaaagagcactggaggccaaggcggtgggtgaggaggggatccaggtctggcgcccttggcgtgggcagggaatgttaaagaatccaaagatttgaggaagcagtaggagtggacgaggtgtg

SEQ ID NO: 126439 - DNA, 1520 bp, Homo sapiens
tgacaccgtcttgctcacaagcccccgtccttctgtagttcagcctcccgtgcacactctcgtcaccctgacttcctgtcttcagaatcctaagagaattttttcctactcaactcaggagcttaaaagtggacccagaaatgccttgtttttgtgagtacttctcagtgagagagtcctcctgatttttcttgctctttttaatttattatttttgagacagggtcagtcaacagcctaggctggagtgcagtggcacaatcctagcttactgcagccttgagctcctggctcagttgatcctcccacctcagcctcctgagtagctgagaccacaggcatgcatgcctggctaatttttttattttttgtagagatggagtctcgccatgttgcccaggcttcctggctctctttaaagcaactatttctcactggcctgttcactgcagggtctaggctttgcattttttattttcagctttttcaattaggaatttttttttctagtagtgagtatattgtgttaaaatcctcagcaggataatatttgggcttggtgatggcaggtagaggggacccttgtcaaatggcgtggacagataaaagttgctcagggcctgatgcatgagtttagcttccttttcacttcctcactaatgtcctggggaagagctcagctgatttttccttcctctcccctgaagctggaatggttcttttcttggttctctttttagattttagttcaactcccttcataacagccttgcccaggcctcattctaatcggtgttgggaactgttcttaggttccatgccacaggcagggagagcaggaggaaacagcactttgcagaggcgcttgggagccaggcatccagctggggccagtggaggtcaagcctgaatgggggatgccccctggggaaggagttcaaggtccagacccaggtaccgaggagcagctcagtcaggaccctggagatgagacacgggccttccaggagcaaggtgagtaagacgcagatagtggggatgtcaggtcataggaaacagtgctgtgcagccaactctcttcagaaacccagcaatggagcaactaagttacccacgaggtgtaattgtgaattttcttggctacttcctccaccttaggaaatagatgaagtgaaattgtttcttctccctttaccctctggtgtctggaggggatatctgggatcatgctttcttattatttctcttttctttccctcagatcccttctagaaactaccaagaaatattcagctgacttgcaggaatactttttcagtaggcagataaaccatatcccccaaagtaatatgtagctttctttctttctttctttcttttttgagatggggtctcactctgtcacccaggttggagtgcagtggcgcgatctcagctcactgcaacctttgcctcctgggttgaagcaattctcctgcttcagcctcccaagtagctgggcctacaggcatgtgccacca

SEQ ID NO: 126440 - DNA, 1261 bp, Homo sapiens
gaagcctgcttcattcattcagccagcagttagcaagcatcttccctgagtcagtcccctgccaggctcctaggagacccagatgaatgaacctggttaggcagagggagcatgtgggcaggacaggggactgagcaggcacctggaaggtctggagagctgtgtgctgccctgtgctacagcaggtgtagaatcgtttggggaaggcgcaggacatctggatgaatggaaacagcatttccaacaaagtcacatgtaaataggtacagaataataaagtgctagttaggtgcacagtgctgaagaggcccagagtaagagaataatcgtggtgagtgtcttagaggaaattattgagctacattttgtaagaagtaaaggtctagattagcagcaagataagtgggcgggcactggaatttggcagactattctgtaaaaagacatggaggtggaaataaggaaaaagaagtaaggaaagcctgagttgaggttgttggtcaaaggaaaaaagagaaggaaccatgaatgggacccctgtgaagcagagttctaacatgtaaatgtcctgcggctaccacagaatcaatctttatctcctcctgtcctgtaggcggtgggagcaaggaaaaggaggcaaaacccccacaggaagacctgaaaggggcgctggtggcactgacatcagagaggtttggggaagcctctctccagggccctgggctcggaagggtctgtgagcaggagcctggtggccctgcaggcagtgcgcctgggcttcctcctccccagcacggtgccatccccctgcctgacgaagtcaaaacccacagctccttctggaagcctttccagtgccctgagtgtgggaaaggattcagtcggagctccaatctcgtcaggcaccagcgaacccacgaagagaagtcttatggctgtgtggagtgtgggaagggctttaccctgagagaatacctgatgaagcaccagagaacccacctgggaaagaggccctacgtgtgcagcgagtgctggaaaaccttcagccagagacaccacctggaggtgcaccagcgcagccacactggggagaagccctacaagtgcggggactgctggaagagcttcagccgcaggcagcacctgcaggtgcaccggaggacgcacaccggggagaagccctacacctgcgagtgtggcaagagcttcagcaggaatgccaatctggcggtgcaccggcgtgcccacactggcgagaagc

SEQ ID NO: 126441 - DNA, 1350 bp, Homo sapiens
caggctataacattctatcctcatctgtaaaacttccccgtccattattccttgcactataacaactgtcaacacaccaactattaggaagttagtattttgctattgatcactgaataaacatcagagtattttaaaaaacagttctctagaaagaactgttataattaaaatgagtctgaaagatgaactctagtattaatgccctatatttgatggcactttatagttcataaaattaatttcaccccattctcattggacccatttcccaagtatttattgaggccctgtaacaaacatgtcaggaactcttctgggtgcttgagacacatccatgaataaaatagggggagaagctgttgacctcgtagagcttatgtctcgtggatgtacctgatcttcagaacccgtggatattcctgcaaatcctctgggcctgtattcattgctttgtcagcatcttgccctgaaatgcatttgtcacctacctcttgttactaaatggtctctgccctccagacccttgtcatccaaggcactaggggtcctggacacccactggggatgatgagctggtagcgacctgttttgcatgagtgccaagtcaggaaaaataaagatatttgtaggcattaaaaaaaaatacatttctttaaaaatgagaagatgcaatatttgtaaactgttgaagcttccttattgtgccatcacttaagggtttcatttctgtttaaagttctggaagctgcataactagcgtggactgactgctgtgtcattgtgctgtgcctttgaaccctggctgagtgagtgagtttgtcctttgttgatagtgtcctataattgcaaaatgtggtttgtcttctgatgcctcttaataccagattcttttactgagatttttttttttcattttccattgtaaataaggtaaatggtaatgactaacacaaagctgtattactcagcccactttgaaacgtggttttatcacctgttcttgttaggcagcatggtgtctaattttggcttagcaaatgacgctccttggtcttcctggctcattagctgtgcccacgaggctgcactgactgggtcgtaaatgtatctgagatgtccacacggggctgctgctgctcctctgtaatactgaggtccacatgcaaaatcagctttttttcccccgtaattatcagagcagctaggcagggctgacagccaggcagactcagtgggaggcttctggcctgagtgtggccttccccagagggtggttttccaaaggcaggtggggactggggaggcctcggggggctgcttgtcattacctgaatcacagatgctctt

SEQ ID NO: 126442 - DNA, 1048 bp, Homo sapiens
tatctgaaaatacaagaaaaacataatatcatttacaatcactccaacaaaaatgaaatactttagctgtaaatccaacaaaacatgcacaggatctctatgctgaaaactacaaattgctaaaagcaatcagagaaaatctaaggaaatggagaggcatactatgttcatgaattgaaagaccaaacatagtgaagataaagactttccctaaattgatctatacatttaattcaattcttgttaaaataacagcatgtttatttatagacactgagagactcattctgaatttttatggaaaagcagaggaccaggaagagctaaaacaaatctaaaaaaatacatccataaaagtgggaagaatcactctacatgatgctaagagttactgtacaggtattagagtcaccagtttgttgttgatggaggaataaacacagtgatcaatgggacagaatagcaaatgaaagatgcaaagaaacatgcccaattaatttttaacaatatgcccacatttccaaaaatggctttggaacaactggacaactacaagccacaaaaaatgaacgttgatctaaatctcataccttatacaaaaaataacacaaaatagatagtagagttacatttagtaaagcattaaactttatgacttttagaaaaattggcaatataggaaggagggctaggcaaagaactttcagacttgacaccaaaagcacaatccataaaaaaatattaatacattggcctcctcaaaataaaaaaagttttccctgataaagaccctctcagagaaaaacactcgtgactgtaggatagtagcagggagccatacggagatggaatgggtctgcatcttgatcatgctggtcattgcacaaatctacaaatgtgataaatttgcatagaactacccacacactcaagaccagcctggccaataaggtgaaacctcgtctctactaaaaatacaaaaattagtagggcgtggtggtgcaacttgtagtcccagctactcgggaggtggaggcagaagaatcac

SEQ ID NO: 126443 - DNA, 1057 bp, Homo sapiens
cacacctggctaatttttgtatttttagtagagatggggttttgccatgttatccaggctggtctcgaactcctgacctcaggttatctatctgccttggcctcccaaagtgctgggatgacaggcatgagccgctgcgctcagcctctcagttctttatacagtgagatgataagtgtagctacctgctaagattgttatgtggtcaagtgaaaatgcttaaatacccggtacctagaaagcactcagtaaacattggctcttactgttatagttatgagagggttcttgaacagtgataagaggcaagtcgcgttttagctagctttaaaggttaagtaggatttgaaaaggcagagaggactgcggggggaagtcccaggcatggagtgtgatgtgaggaaaggatggcagtcaaaatacaaggcatatataggaaatactgatgagagggcttttgttgcatagggaaggtttatggggggattgatgggaaaagaagcttgagggaaaattgggaccaggcactggaaagtattaactgcaaggctgtagagttttagaaagaataatctgaaaggtggattgtgggagagaagggagaaaatgaaggcagggaaccaaagaaaggaagctggacttcatggaactagattaaaaaaaataagtatggcctgtaatcccagctactcaggaggctgaggcaggagaattacttgaacccgagaggcggatgttgcagtgagctgagatcatgccattgcactccagcctgggcgatagagcaagactccgtttcaatatatatgtatatataatttttgtgctgttatatgtacatgatccctttttcaccaaaattaagaatatgtttagtgagagccataaaactaaaaatgcttttgctagtttaaaactcggtttaacccatcatgataaagcagtttaatggtctgtttctaaaacttcaatttgatgcttagttttgatggctgtagaggtgaaaagaataaattcagaaagatttgtagcttcagatggaagaatcacagtgtca

SEQ ID NO: 126444 - DNA, 1013 bp, Homo sapiens
ctacaacctccacctcctgggttcaagcgtttctcctgcctcagctttccgagtagctgggattacaggcgcctgccaccatgccctgctgacttttgtatttttagtagagacggggtttcaccatgttggccaggctggtcttgaactcctgaccgcaggcgattggcctgcctcggcctcccaaagtgctgagattacaggcgtgagccaccacccccggcctcaggagcgttctgatagtgcctcgatgtgctgcctcctataaagtgttagcagcacagatcactttttgtaaaggtacgtactaatgactttttttttatacttcaggaatagtaaagaaacacatcataaaacctcccaggacataaaggtgagcacagaccctgtttggatcaagtcagttcctggagcctgaatgatgactgctgaatcacgggaagccacgggtctgtccccacaggctgcacaggagaaggatggtatcgtaatagtgaaggtggaagaggaagatgaggaagaccacatgtgggggcaggattccaccctacaggacacgcctcctccagacccagagatattccgccaacgcttcaggcgcttctgttaccagaacacttttgggccccgagaggctctcagtcggctgaaggaactttgtcatcagtggctgcggccagaaataaacaccaaggaacagatcctggagcttctggtgctagagcagtttctttccatcctgcccaaggagctccaggtctggctgcaggaataccgccccgatagtggagaggaggccgtgacccttctagaagacttggagcttgatttatcaggacaacaggtaaaaagaggtgaaacctattatgtgtgagcagggcacagacgttgaaactggagccaggagaagtattggcaggctttaggttattaggtggttactctgtcttaaaaatgttctggctttcttcctgcatccactggcatactcatggtctgtttttaaatat

SEQ ID NO: 126445 - DNA, 1015 bp, Homo sapiens
gtcctctccttttagcatctttctaccacaaactcccctccacccccaggttctggccacccttttcttcccagcgtcctgtagctttgcagccacctctcttcctgactccaggtttgagcaatgggattgtccctgagtttggggggaaatgactgtttgtctcgtgttattttaggcaatggtgaagatcgaggacatggctgtgtccctcattctggaggaatggggatgtcagaatctggctcggaggaatctcagtagggacaacaggcaggagaattatgggagcgcatttccccagggtaagacggatgcaggcttactgtctgataagatggttttgtctctctgtgtgttagctgtgggatctctgatgtgttcaattgagtgttgaggagttagagactacctatccccttttgtagaccagatggaaagtgagaatgtttgtgttcatttaactccagaagcatggtactgtgaccctgattccaggtgggttttttattgctaagtagtttttgctctttaaaatcagaaataattgagttccaagtcctcacctcttcagccactcagttgcctgggaggcagttctgctccgttcccatggattacaatttaggtgcctctgtcgggggaatatctttcctagcagagatgaccaggcgaactgatcatccgtctaatcccaacccattgtcccggtaccacattcccgaaactaccaagcatccttctgttggctttctgtcttcttccatcctgtgtgattagtgtgattccaatacactgctttgtgtaattccacgaacttgcacctggactgtccttgtgatgaggattcccagcttccaaacttaatggtgattttctatgaagagctctgggtcctggatgtgtagtaagaacgaggaagttcaagaggcatcagccagataagacaaggtgacactgttggcagacatttccatttgtctctgctggatcttaacccctcaggacagtgctg

SEQ ID NO: 126446 - DNA, 1122 bp, Homo sapiens
caaaagcattaattgttcactggcaattactaaatgtattttgttgctctgagaaactcagcagtgtactgagatgtggctggctgtgccatcgtcatagtgcacagtgacttttctgtttcttatcactaaagactgaggtgaggttatgaaactttcattggtcccatcgttgtgcgcagggtgcaactggctacctagaagctgatggcaggagactgtttcacacacaggagattgtgagctgtgtaagtagtcatcgccactcaagtaggacaagggtcctacccaaggctaggaccgccctgcggaaacagaaacatagactgagaacaaacctcaagactatcagtgtgacctccccataacaagagaaccccatatatagtttgagactttcccttgagaaacttatactaaaactattactcatcagtcattcactgatcagcagctaaagtccatgagaccaaatggttttatatggaaccaacgaagtgggagctaaaactgcacagtggtcattctttggcctctccttggctttatgacttaaaccaactacaacttccctatagcttctaagcagtttcatcagcattacttgggaaaacgtgttgcaagtcaaccagtcactaggatatttctacccatgcaacggaagaaaaacccattactccagaagagtatatctaagtaactaaaatggaggcagaaaatgttttaaggattttcttcaaagaataagccacagcaatggttttgtagaaaactcctgtgcttttgagcaaggacttttgccctctagaaagcaactgaggccaggtgcggtggctcacgcctgtaatcccagcactttgggaggccgaggtgagcggatcacctgaggtcaggagttttgagaccagcctggccaacatggtaaaatcccgtctctactaaaattataaaaattagccgggcatgatggtgggcacctgtaatcccagctacttgggaggctgaggcaggagaatcacttgaacccaggaggcagaggttgcagtgagccaagattgcacactgcactccagcctgggtgactagcaaaactccatctcaaaaaaaaaaaaaagaaagaaa

SEQ ID NO: 126447 - DNA, 1954 bp, Homo sapiens
ttttaaatgaaggttaaatgtgacctgtgccctcacatttaattccgtttcatggagacatcttcctgactttgttggatagctgccactagggttgcttcgatcttcagccacatgctgtccttgaagcagctatttgaagatgtgttttctgaggaaaacaggctacaactgtttattaaaaccacttgcagtgcattcgtttatcagatgctcagtgcaaagtgtaattgggtcatggtcaaaaacgcttgcaacatctaattggcgttcaagatagtcattcaaaagttcttggcccgctgaagtctgttaacagttgaaacattctacagttaaccattagcatgctagttgtcctaatggaaatttttgaagagtttttcaatatataccctacccttgccaggaagagaagtaaaatcctcaggttgtggggtatttgtttctactccagcctggcaggcaaggctaaaacctgagattatcgatctatgagacatcttgatatgtaaagcacttaatattaaaggcataaaagtgaaactgctaaatatgtatagagaggttgacgtgtgatacgtgggacagttcacatagacatcagagaatttattccagaaaggagcctcctgaatgtgatgaatacggcaaagcctttaatcacatctcagcccttagcatcggaaagcttatactgtaaataaacttgatgaatattatatgtgaggaaaactttcatgtatagcactcattgcttcagacagaaaatgaattccgtcggtatgttccaatcgtgatgaatttgagaaacattgcaagagggagctcaatcttggccgggcgccgtggctcacgcctgtaatcgcagcactttgggaggccgaggcaggcggatcacgaggtcagtagttcgagaccagcctggccaacatggtgaaaccttgtctctactaaaaatacaaaaaaaaattagctgggcacagtggcgcacgcctgtagtcccagctactcgggaggctgaggcaggagaatggcttgaacctgcgaggcggaggttgcagtgagctaagatcatgccactggcactccagccttgagtgacagagcgaggctctgtatcaaaaaaaaaagttgcgggggggtgctcaatcttaactgcagaggatctacagatgaaaaaaaatgtggggaaatgctttaaaaaaatagcaaaatgtgcaacttcttacaaaaattgttaacgttaggtacttctatatattttatatgaccataatgtccgtgtgtgttttgtaccttcagtcccttgttattgttccgtatattacctgtaagcagatactgtattttattttagcctatttgacagaacacatcactcagaaaaagtgaagtttcagagcaaacagtgaagaaatcagtgtgattgtagacaaaaagtcggttcacagaacggagcagcggggagaggaagggaaaagcttcatagtttggtgcttatcacatcaagagattggtaaatttctgaggaaagacaggctaatggggcactgaaatggaacaactcctttaaacgtgcagccttttgaatttttcctcaaaaccaagaagttgacctctgagctgtcaggtgaccactgtgtgcaaaggggatggattctcttgtcagtagacggtcttctccatgaagcgagagtaggaagtgtactggaatggccaagtgggactgcttcagctgaccaggttcttttaaaccgtagtcatgctttcccactaactcttaaatccttatgcttagaaaattgaggataaggctgggcacagtggctcaggcctgtaatcccagcactttgggagaccaaggcgggtggatcacaaggtcaggagatcgagaccatcctggctaacatggcgaaaccccgtctctactaaaaatacaaaaaaatagctg

SEQ ID NO: 126448 - DNA, 1049 bp, Homo sapiens
gagaagagcatccggttgctttttaaagcttttagcctgccctagcaaggacaaagcatgttagattagagatgcttctgctgatcgcaggggttcttatttgaaaacatctatgatgggggtggggtgggaggagacaggttgtggttatgcaggaaaatcttgtcctaaaaatatatgagtttgggggtaaggggtgggatagccaagcaaaatcagtaattattttaaaatgaacatatgtatttttattaacttttagttaaatacagattttacaacgaggtcagcataagcctaaatctatatagagggctaactcaggcattgtcttgtttatttgtagactggattaaaaacaacctgtcctgttttgtcagttcccagcttcttcgtttagaataaattagaccaaaagaagaaacgtgcttgtctctgtatacccgcagaatgaagttactgttgttaaaactggattttttcattttactaggttccgaagagtccagatgcttggtagatgttcaatacgtgattttttttttaattgaatgtgttcatttaaaatcctccttaacatttctagaaagacttctttcaataaataatggaatcttagaggaaaagtggttttttaaaagctagggaactcctccactaaaagtaaccattggaaacctcgaatgagggctaaagttttaatcataagagaaaaggcagcataatgaaatgtgtacacatacatagtcagtggtccattttaggaagccagtggcgtctgataaagaaatgttaagagtagtgaggttgaggaaggaaattgtggggatttgaaatattctctttatgttgtttctcttctgagtcatggtaaaacaataaattatcatctctaggtggcagtgcttgtgctggtttgttttttgttctttgtttttctcatccttggttgcataaatacacattgggggtgaagaaaaaaaagtattccaaagttaaaagactggagctgcaacccacaaacaaaattctcatgcaaaactatctgt

SEQ ID NO: 126449 - DNA, 1010 bp, Homo sapiens
ttcctgattgtctctaggtctcaactcctccaaacgaacagaaaccggtgtgggagaagatatcctcctcaggaactgcaaaggaatccccgagcagcatgcagccacagcccttggagaccagtcacaaatacgagtcttgggggcccctgtacatccaagagtctggtgaggagcaggagttcgctcaagatccaagaaaggtccgaggtgaggaccacccattagactcctattcagtgccccaggcccctgtggttggagaagcagaataattagtaattcttggttgtgaggtgatttcatagattgacttgattagttgggctgactgggtggaaatagtcccctttcctcccccaagtaaggctgtcttaacctgggccctagcatgggaatggatcactcttaaaggatcagtttctctttgaagtctgagtattacaaataattttttttaaagggtcaattgaaatgagtttaaaaaagaaactgttaacagaggtgtagagacttcaaatgaaccaataaggaatagtgttgcaccagacaacagtgaaaagctgttactccctgtgagcctaaagggacagagggggaccctcttaccagaatcaggtaagagctatagtcatggaggagggggtcacttgatagaagttgtggctgtaggccctgctgtgggatgaggagaaaacggaataaataccccaactgcaccctcctcctgcccttaaatctcctgcttttgttccccaatgacaaactcagttggcagccagagggcaggaaagacaagacagtgcagcccttagggtcagcttcctggggcacagggcgggtcagagaatggatctgagaagggcaaatgggaaataattggcaacctcctttctgaagctatggaaagaggtggggcatttttcacaagtcaaagctgtattaggtgactactcctgagctcaaatctccatatattatggtttatagaataatctcaggccataaat

SEQ ID NO: 126450 - DNA, 1046 bp, Homo sapiens
ttggtggaccggccctatgactgtaagtgtggaaaagcttttgggcagagctcagaccttcttaaacatcagagaatgcacacagaagaggcgccatatcagtgcaaagattgtggcaaggctttcagcgggaaaggcagcctcattcgtcactatcggatccacactggggagaagccttatcagtgtaacgaatgtgggaagagcttcagtcagcatgcgggcctcagctcccaccagagactccacaccggagagaagccatataagtgtaaggagtgtgggaaagccttcaaccacagctccaacttcaataaacaccacagaatccacaccggggaaaagccctactggtgtcatcactgtggaaagaccttctgtagcaagtccaatctttccaaacatcagcgagtccacactggagagggagaagcaccgtaactttcaagcgctcctgttgttgtcgttgttttaaactttagaatctgaaaaccagaaagaagtcttgtcattgcagcagcatcgattccggtgatagagtttgtatcactcaacatcaggggatgcctgaggagtgcgagctccacagcaacatggcaggcaggaggtcctcagaaggtgtcaggaggttccacactcgccagttcactggagcagagtcccttcgccacacttagggtcccagtaagccatgccagcattaccttttgcgtagttaaacagacgtgtatccagtctagttaaggaagaaacattaagattgtttaatttttaacatatattcaagaattttaatttgtaaagaattgagccacattgaacacaattgaatgagattcagaataaacttataacatcttgtaatgcctcaggactattattataacaaatgatgtgttggttattgaatacttacagatggagaaaactattcctactggtttagcttttagaaaatttggatttgggggtcaggcacggtggcttacgcctgtaatcccagcaccttggaagcctgaggcggtcgatcacctcaggtcaggagt

SEQ ID NO: 126451 - DNA, 1079 bp, Homo sapiens
cttgcagtggctgaacacctgatagcacagcacagcgccatcaagatgctgcacagccgcgtcaagctcatcttggagtacgtcaaggcctctgaagcgggtaggacaggggcttccctggcattcttcctctccctcctggggaagtgacagcatccaaactaatgtagtctctttttgtgcctttaggagaggtcccctttaatcatgagatcctgcgggaggcctatgctctgtgtcactgtctcccggtgctcagcacagacaagttcaagacagatttttatgatgtgagtgtaaaacccggatggggaggcggggcttatgctgtcactttcacgtgcaggactggggactgttgttccccgggcatgccacgagggatcccgaggaactggtcctttctgttccctcccagcaatgcaacgacgtggggctcatggcctacctcggcaccatcaccaaaacgtgcaacaccatgaaccagtttgtgaacaagttcaatgtcctctacgaccgacaaggcatcggcaggagaatgcgcgggctctttttctgatgagggtacttgaagggctgatggacaggggtcaggcaactatcccaaaggggagggcactacacttccttgagagaaaccgctgtcattaataaaaggggagcagcccctgagcacccctgctggtggctctgtcctctgttaggcaccacactggttggtcaacttggatgttcatcgaggctcattctggccttgctcagaagcccttctgatgctcttcagtgagggaggcactaccatttgaagtgaccccatgtcagtcacatggactggtctttagcaaagtccaaggctgcctgcttccacctaagtggtctctgttctacactttaatgtcaccctctacatcatcttacctagcccacccaaccttataaacatgataattgactactttcctgagctaaattaacttgtttttcacatacgcaaaaaagaagggatagtaagcagatttttattagaaagaagtccaagccttgatcctgtgggcactgtgaattaccaggagggagag

SEQ ID NO: 126452 - DNA, 2248 bp, Homo sapiens
caaaatttaaagtttaaaacacctgctcccaggcattctggatgataatctctatcgctattttcccatgagcctccagtgttctttccggtttttactcccttttaaatattctgtaaacagttctctttaaataaaatatatgttttgccatgtcatgcgctcagaggaggggtctggatcctctcttaatgacagacggatttgtcttacaaaggccattttcccgaaaaaaataggaaataacttggaggatactggtgggggctatacgtttggtgaaatccatcagtgatattcaagccaagcaaataatcacccactaatttgtgttttccacttaaaattcttggaggggaccatgttaaatggggagccctggtacagaaaacaacatgggctcatattcactcccttccccatctccctcttctgcttccccatgaaccttcccccacaggcgttacatagccatgtgccgcgagaagcagcccatggtgccagagtctctggctgactacatcacagcagcatacgtggagatgaggcgagaggcttgggctagtaaggatgccacctatacttctgcccggaccctgctggctatcctgcgcctttccactgctctggtaagtgcccaaattgctggagggccatctgttttgacccttaaaggggtagctccttaccgtgctctcattgccgcctccccacctcccgctccagccctgccggggctaaagtgctgacagtgcagatagtggtcctctccgtgctaccgcactgtgggtacttgctgctccagcagggcacgcacagcgtccgtggagggaaaggccttttccccacttcttaaccttcactgagagggtggttggggtctgtttcactccatgtgtcctagatcctgtgctacagaccttcctttctgtcctcccgtcttggacctcagtcctgggggctccaaagtgctgttcgtgcaggtagtgtgattacccaacctactgctgagctagcacttcccgagcccccgggacacgttctctctgccaattgtcttcttggctgagctccccaagctccatctgtcatgctggggagcccagtggcgttcaaaagggtctggtctccctcacaggacagctgaactccgggactggccagtgttgagaggcggagacttgggcaattgctggacgctgccctgggcattgcacttgtctcggtctgacagtgccggcccaacactgcggatgctggggggaggggggattccactcctgttttgtgagtaggcgacccatgggctgcccagccttaaagccagaacaagggtgtcccctgacctcgttccactgccctcctcccgttcccatctttcccccctaccttccccttaggcacgtctgagaatggtggatgtggtggagaaagaagatgtgaatgaagccatcaggctaatggagatgtcaaaggactctcttctaggagacaaggggcagacagctaggtgagtggtttagtgaaggacaaagctgtgtcactttgtcttctgtggccatgtgtctgaggttggcctcaattctaacactggccaccattgttctctgttgatgtcgagcattcctgtttgtatcctgaccttacacacccactcatttccttcaggactcagagaccagcagatgtgatatttgccaccgtccgtgaactggtctcagggggccgaagtgtccggttctctgaggcagagcagcgctgtgtatctcgtggcttcacacccgcccagttccaggcggctctggatgaatatgaggagctcaatgtctggcaggtcaatgcttcccggacacggatcacttttgtctgattccagcctgcttgcaaccctggggtcctcttgttccctgctggcctgccccttgggaaggggcagtgatgcctttgaggggaaggaggagcccctctttctcccatgctgcacttactccttttgctaataaaagtgtttgtagattgtcatcttctagcctgggcctgacttccattaaaacagggttttgtgcgttttttagattcctgttcgtttttatgctatttcatccactcagtaaattacctgagtaaagtgcatctccctgccaggcccccagtatagacactggggatgcggcaaggactaagcggtccctgctgtttggagatacttaagatggggctccactttttgagccccccgactccctta

SEQ ID NO: 126453 - DNA, 1314 bp, Homo sapiens
cttggccactttttgtatttttagtagagacagggtttactgtgttgggcaggctggtctcgaactcctgacctcgtgatctgcccgccttgttatcggcctccgaaagtgctgggattagaggagttagccactgcgcccggcctctactaaaaagttttaaaaattggttgggtgtggtagtgagtgcctatagtctcagttacttgggaggctgaggccggaggatggcttgagcccaggagccaaggtttcagtgagccacagttgtgttctgaagagaaccagtgggaggggaagggggacattgccagtgccccacagatcctcgggcatctcaagaaggcctggtggagggagtggaatgatcccagcgcaggcctcgcctccctggcccgtttgttgtcttttgcttgttctctttcttgttctttctctctcatggttccttatttcttctcttccaggccagtacacaacaggccggggctcctcaggagtggggcttacggcagctgtgctgagagactccgtgagtggagaactgaccttagagggtggggccctggtgctggctgaccagggtgtgtgctgcattgatgagttcgacaagatggctgaggccgaccgcacagccatccacgaggtcatggagcagcagaccatctccattgccaaggccggcattctcaccacactcaatgcccgctgctccatcctggctgccgccaaccctgcctacgggcgctacaaccctcgccgcagcctggagcagaacatacagctacctgctgcactgctctcccggtttgacctcctctggctgattcaggaccggcccgaccgagacaatgacctacggtgaatgaagctcaacacccaaagagaggtcccctgtaatgatctgtgtagggaggaggagaggtgaatcagaaaacaaattccacgctcctggaaaccccagagcctcccctttgcagcaggggctggtccatggttctcagggaaatggtgggttggggctgaaatgctgatgaggatttcccgggaaagcttgtccctcctacactgtgaggaagtggcagagccaaaggagggacacctaagaggacatgggtgcgtagccctaaaaagggtgttccttctaaccttccctctgtccaggttggcccagcacatcacctatgtgcaccagcacagccggcagcccccctcccagtttgaacctctggacatgaagctcatgaggtaggagagctgggtgcgggtgggcaaacgttggcgtgggccgtgcgagcctcctgaaaaagtgct

SEQ ID NO: 126454 - DNA, 3634 bp, Homo sapiens
gggcggaggaatcccgagctgtgaagcggctggaatccgggcccatgtgcttctttgtttactaagagcggaagcgatggcgggagcgggggtggggtgcggtggcggggtgcggtggcggaggtcccggtgaaatcaggggctaaggggacccaaagaaggcgggggatcataggggtggaaagaaagctgagaaccttgagaccggagtgtgaggggccaacggggaagggcgctagaattttaaactaaagtagggaccggaattcccctggggagatgttggatggccctgtgcactgccacgggctctttattcttcgctggttagaaacagacttgtgaaaaagagttatgcccactttggggagacttcggtaggtttatttaaatgctcatattattaattagttcataggtcgtgttttaagcgaaaatgggtatctaagatttgtcttaaagtttgtgtcttacggttttacatttcatgttacagaaaaggttaagaagttcttacaagagttctaccaggatgatgaactcgggaagaagcagttcaagtatgggaaccagttggtaagtctaagattgggtaaagggaatggggagcggggtgcttaaggagccataagcagcagcttggcttgttttattaaagacataacaattagagggtttgagggctgaaaagcgagtatcgctctgtgtggcgctgcgttctcccctgtggatgcccagagcctgtgctgagttctcagtgatgcattttcacatatgaacactggtgagcaaagtgaatgtggctctgaggtgtttctgtctcttccccacttgaggttcggctggctcatcgggaacaggtggctctgtatgtggacctggacgacgtagccgaggatgaccccgagttggtggactcaatttgtgagaatgccaggcgctacgcgaagctctttgctgatgccgtacaagagctgctgcctcagtacaaggagagggaagtgagtggttagagaacaatggcaaacaaagggcgaggcgtttaagcttctgtagagaggctgctcagatactgatgttttctgagcaggcagaaaggaggggcacttctgcctggtgttctctgtgctctcctttccccatcctgttgctcttttttttttttttttttgttcttctcctttaggtggtaaataaagatgtcctggacgtttacattgagcatcggctaatgatggagcagcggagtcgggaccctgggatggtccgaagcccccagaaccagtaccctgctgaactcatgcgcagattgtgagtggtctctgtcgggaaagatgtagggattggttctccaggatcttgtttgtgactgttttctccccttagtgagctgtattttcaaggccctagcagcaacaagcctcgtgtgatccgggaagtgcgggctgactctgtggggaagttggtaactgtgcgtggaatcgtcactcgtgtctctgaagtcaaacccaagatggtggtggccacttacacttgtgaccagtgtggggcagagacctaccagccggtacgtgtggagcaagaagcaggaaagcacttacccattagttgttttgtagagattaatttgatcctgtgatgcctattgttttatttggttgtaaaagttgcctgtgtgttcgcctttcattcttgggtatgtagtggtctttctacctattttctgggtgtttgttgttgacccagagtaagttcagagggttcttgacacttacaagatgtctgccatgaagagaaaatgtgattcaaaggaccgacccaatggggctcttttccttctgagttcctttggtgtttctgttctcacatcctagatccagtctcccactttcatgcctctgatcatgtgcccaagccaggagtgccaaaccaaccgctcaggagggcggctgtatctgcagacacggggctccagattcatcaaattccaggagatgaagatgcaagaacatgtgagtttggggtacgtggccctgggcaggtggatcgggagtccacttgaatcctgtagtcacttgtggaatggcaggaagaaagaagaacaaaagagggaagtgcaggagggaggtggaactagaatttcctgggagccttgggaaggggaaaggaggtctcagcacccctgctgtgggcttgtctgtggctgggtagcctgggagcctttgagtgggatgcctagggagggaaggttgggtccttgtccatttctcctagtcttatgtgcctttccctcccctagagtgatcaggtgcctgtgggaaatatccctcgtagtatcacggtgctggtagaaggagagaacacaaggattgcccagcctggagaccacgtcagcgtcactggtattttcttgccaatcctgcgcactgggttccgacaggtggtacaggtaaggaagagtttgacatgaggaatggatcatccccttttccctcacctactcattctacccacacagagaaaagagcagcaaaaccccaaacaaaacagaacccagggatttgtcaagaaattgttagggaatccagtgatgggcaagttgaagggattacatctgtatcctggcattttcctgcccaagggtttactctcagaaacctacctggaagcccatcggattgtgaagatgaacaagagtgaggatgatgagtctggggctggagagctcaccagggaggagctgaggcaaattgcaggtgaggggcaggggagagagaggaaattccgtttacatcctagctcccttttcccccagaaaataaaacaaccttaacttctctacagaggaggatttctacgaaaagctggcagcttcaatcgccccagaaatatacgggcatgaagatgtgaagaaggcactgctgctcctgctagtcgggggtgtggaccagtctcctcgaggcatgaaaatccggggtaagaagaaacaagggagaggctcagggtggatgaagtcatttaggaggaaaaaaggatgacaagtgtccctgtaggtcacagtatgagtggacatcttgccttcgtggacacagggagggcttagaaatagtgctgggtgttaggggtaggcagaactcaaaattgctctgttgttggccaagcactgggagaagagtcattccagggctgccttcccttcctccaggcaacatcaacatctgtctgatgggggatcctggtgtggccaagtctcagctcctgtcatacattgatcgactggcgcctcgcagtaagtagttgggctttgcgggaggtgaatatagtgacagacaggaccacagtgtttattcaaaaagtaggggtgcatgtttgctcacgcctgtaatcccaatgctctgagaggctgaggcaggagaatcatttgaggcgaggattttgagaccgcttccatgtctactaaaaagttttgtttttgtttttgttttttttgagatagaggcttgctctttcgcccaggccggagtgcagtggcgctatctcggttcactgcaagctccacctcctggggtcacgccattctcctgcctcagcctcccgagtagctgggactacaggcgcccgccaccacgcctgg

SEQ ID NO: 126455 - DNA, 1019 bp, Homo sapiens
gagcgggtcccccttggaggacagaatgaagaattgggaaatcatggccgttctggagagtagacaagaagacggcgaaagtcgggcctgccccgccctgcggccccggaacaaaagaacgcgtgtgcgctggccctttaagagcgattctcctccgcccgcgccagctcggaccgcgggaaacccggcgcctgcactaccccgcccggagattcccttccgacgcccgcaccgcctccccgtcactcattctaggcccgcacggtgattggcttgcggctagcgggaggtgaagaaggccgccttgtccgattggcccgcacgcagtggcgccggtcacgtggggggcgacgtttcgcgccaatttcggttggccggccacagtccaccgcgcggagattctcagcttccccaggagcaagacctctgagcccgccaagcgcggccgcacggccctcggcagcgatggcactgaaggactacgcgctagagaagggtacgggtctacgagcccgggagggcgtcctgcgcggggagcctcccggggaacacctgttggtgtgagctggggtcttgggggaccggggtcggcgggttctggggtgcgcgaggccagaggcagggtcgagctgcggcctggctaaggcccacggggcctgggaagcgtgcggggggccatcgatgttgaagaaaagctagtaatcccacctggtaaaggtgttagggtcgtggggttgggggcttgggggcgcgctaacccggctgggggctgcacagggaaaagtcgcgcccaggacctcaggagagtcttaagggctctgggctcccgtgcccgctttccttcgcgcttttgggcattcccaggttcccgcgccctccccaggcgcgcgtaggccccgggggcgggcaggccggggccgctgcgcgccgggattggccgtttgaggccgccctccgagcggaagtggagccgggcggaagtggcgcgaggaggctggagggagtgtcgtgtaaacagt

SEQ ID NO: 126456 - DNA, 1077 bp, Homo sapiens
cccacgtgaccggcgccactgcgtgcgggccaatcggacaaggcggccttcttcacctcccgctagccgcaagccaatcaccgtgcgggcctagaatgagtgacggggaggcggtgcgggcgtcggaagggaatctccgggcggggtagtgcaggcgccgggtttcccgcggtccgagctggcgcgggcggaggagaatcgctcttaaagggccagcgcacacgcgttcttttgttccggggccgcagggcggggcaggcccgactttcgccgtcttcttgtctactctccagaacggccatgatttcccaattcttcattctgtcctccaagggggacccgctcatctacaaagactgtatcctagacccttggggctgggaaggggcggaggggccgggcgggaggggcgcccagggccagcctgtgtcgcaggatccttcactgagtccttccacccgccagtccgcggggacagtggcggccgggatgtggccgagctcttctaccggaagctgacgggactgccaggagacgagtccccggttgtcatggtaaccagtggcgggaggcgggtgaggagcggggtcccgtcgggccgggtgggcgccagctccctcccaggactggttcattggtagattccacttggggggtgcattccgccaaataaagctaacgtgaggcccggcgcggtggctcacgcctgtaatcccagcactttgggagaccgaggcgggcggatcacctgaggtcaggagttcgaaatcagcctggccaacatggtgaaactccgcctctactaaaaatacaaaaaaaaaaaaaacatagctgggcgtggtggcgggcgcctgtaatcccatctactcgggaagctgaggcttgagaatcgcttgaatccaagaggcagaggttgcagtgagccgagatccggacaccgcactccagcctgggagacagagcgagactccctctcggggtaggtgggggtggggaaaaaaaaaaaaagagtcaatgggcgccagcaacacaccaggcccagctccctgcgtgactccatcctcagcaactcggggt

SEQ ID NO: 126457 - DNA, 1035 bp, Homo sapiens
ggctcaagagcttccttcctagcggctctggtgaggcatctgcaggcaggaccaagggttggggttagggcgggttccttggtgtcttaaaccatggcattgctgagctctcctgatggtctctcctccgacagagatgcgcattggcttgacggaagagttttgtgtggggaagtcagagctgagaggtgaggagaaagtgggtctttctccccttggagtaggtcattgccagagttcatggagagaagtcagacagagcctcccctctccttgctcctctcccaaaacaggagtcaggagagaagtctctctctctctctttccaggttatgggccaggaatccgggtcgatgaagtctcgtttcacagctctgtgaatctggacgaatttgagtctcatcgaatcctccgcttgcaaccacctcagggcgaggtcagggttggggtggcctcataaattccgtccaccatggggaagggggcagtggggtcgtgagaccaaactaaccttgttgctctctggtctctcagctgactgtgatgcggtaccaactctccgatgacctcccctcaccgctccccttccggctcttcccctctgtgcagtgggaccgaggctcaggccggtgagacaatttcctgggttctagaactaccttggaacccaagccaagacctgtatgttcccaagactcactgcagagtgggggtggtggtagtggtgatggagtgcaaattggaaaaaggcttgggttgcggccggtggctcacacctgtaatcctagcactttgggaggctgaggcgggaggatcacttgagcccaggagttccagaccagcctgggcaacatagtgagaccccatctctctgaaaaaaaaaaaaaggaaaaagctttggctaatggagttgggctgggcttcagcccttttccctcttgggagtacagcccacacccacacagccccacatggaggtccctggtggggaatggtgagatgccagtagaagatggcctgagtcgtggtgtttta

SEQ ID NO: 126458 - DNA, 1018 bp, Homo sapiens
gggtggtcaggtgagtgtgtgcacccaccacggggagattcctggggagagagtgagctcagcatgacgggtctgcctcaagaaggtgccaagcccagcaccttccctttccaaactccagcctgtctcaggagctgagcagcccagagcagaaggctgagctggcagagggagcccttcgctgggacctgcctcgggtgcaaggaggctctcaactctcaggccttttccaggtattcgctgtggacccccagcccctctcctcccacattcacttgcagcccccaccccaccctcccgaagcagctgctgcctggttcccccagcgtggtcagcttcttgccctccttcctctccctgcctctgcccctcacagatggacgtcccagggcccccaggacctcccagccatgggctctccacctcggcctctcctctggggctgggccctgccagtctctccttcgagcttccccggcacacgtgctctggcctccaggtccgattcctcaggctggccttcaggccatgcggcaatgccaacccccacaagtgggtgcgacacctaagccacagcgacgcctatgtcattcggatctgaggctccccaaacgaggacacgacggccaaggtggcagtttgtcccacgggaggacagtcgtttcttttccagcctcctggccttcggactctgaatctgggcaggaagagtcctcagtcccaagaccaggagggggcaatgggcccagcctttctgtggtatctgatgcaggaaggactgcagtggatcagaacttacaaaccaaacttttattctgagaaactggctgtacaatatctaaaaagaaagtgacatgaaggaagcaatctacaacttccttccgcttagcgagcatgcatgtgtgtacgtgcacgtgtgtacatgtctgcatgtgtgggaatccgggggctggcaggtggagcatcacggagcaggctgaggggagccggagttgggctgggagccattggcttttgg

SEQ ID NO: 126459 - DNA, 1017 bp, Homo sapiens
gtgtcaccagccctccctctacctggcttttttccccagccctccctctacctggctttttttctgttctgcagaaacactgtgctcctgttctggcaaagctgcgcccaccgcctgacaatcaggacgcctatcgggcagaattcgggtcccttgggcccctcctctgctcccaggtggtcaaggctcgggcccaggctgctctgcaggctcagcaggtcaacaggaccactctgaccatcacgcaggtccgtggccgggtggggaggaggaataggaggaagcagaggagaacccctgtgtgggacaggcacttgcacacagccacatgtgccctcagtcagtagtctcagggcaaccaggccctgagtgaggatgccccagccctagtgagagccactgaggaagagcgaggggagcccaggcctctcccttcagactcctcttcttagtagatggtgccacttccccctttcctcttctccccgcagccccggcccacgctgaccctctcgcaggccccacagcctggccctcgcacccctggcttgctgaaggttcctggctccatcgcacttcctgtccagacactggtgtctgcacgagcggctgccccaccacagccttcccctcctccaaccaagtttattgtaatgtcatcgtcctccagcgccccatccacccagcaggtatgcagagctgtgggacagggagcatctggagggcctgggttacctcagagcaccctggggaggcccaggagtagagcacagtcccctctgggccccaagtcaagagctggaagaggcgcccaccagggtcctgcagggctgtagctgccctgcatgaacaaggtctccagccatagctgtctacagggtgaactacaggaacaacttgttcaggcagggagcgagtgaagcgtcctcgccaggcctctggggggcagggagggcacagggcaagcggcctgcctttcctttctatccaggtcctgtccctcagcacctcggcccc

SEQ ID NO: 126460 - DNA, 1475 bp, Homo sapiens
cctccggggtaccactcagacccgcccccgccacccgagcgcggggagcaggaaaactctagcggcagccgagacgctgctcacccggcgctcggcgccatcttggccccgccccctcgtgggagcaggtcctggcagagcctaagagcaagtcactgccccttccccgtaccagaataagtcctctaggctcgcagaatgaaattatattttaaaagtttgtttctacatctatatataaggagcactccctcttggtgtaattactgcaatttattccttcactacccggctgccaggaccttcaagaggcgccacaaaacggaggcagggaaacccgtagcaacgaggccccacccttgttgggctgatcctgcgcatgcgccgaccttcctcggctggatttaaggttgccgctagccgcctgggaatttaagggacccacactaccttcccgaagttgaaggcaagcggtgattgtttgtagacggcgctttgtcatgggacctgtgcggttgggaatattgcttttcctttttttggccgtgcacgaggcttgggctgggatgttgaaggaggaggacgatgacacagaacgcttgcccagcaaatgcgaaggtatttgaagggggtagcccctataggcatcgcccggccacacctccttcttctaggccggacatcctagcctgtattgggtgggtcacccgacctccttgaaggcttgagggaggttctggtggagcttggctgaatttggatggggtcaaggaagcgaacgtgtagtgccacctcaaactgcatccagagagagcctgcatttttttggctggcttggaaccccccgcccgccaatggattgtgggaattgtagttcagggaccatcggcccgggactgccaacttttagagcatcttcagtgagtgtttacctcatgtcaccagaccttaatctgcagaggctgcaggagccgggtgtgaggctcaggccttgtggacatccgctgccctaccctagcatagacgctcccaaattacaggccccacaccccgctgagggggtttgagggtgagtaattcagcctttgaagctcataaacaaaaggaagccacacaactaggagagtgtccccatccggtgagactttgcagacggtgcgtactatatggatttttcagcaagcagcgccttccatagctgcactagcgtggggcccagttgagaaagggggctggccctgatgccctagtttgctgccctcctgactttacgtttcttccctggattccttttctcttcgcttcaccccctcaactgtattccagtatcatgaaaggcagtcatgacagtctcatgacttggtcctcatctctgtctcctttcacctccgtgtgccgctcttctcccctgacctgtcaatctttttaaacagacttaatcacctaattgtatcagtccttgctttaacacctct

SEQ ID NO: 126461 - DNA, 1033 bp, Homo sapiens
tctttgacccttgcctttgagcccccaggaggggaagggatcatggagagccctctaaagcctgcactctccctgctccacagctttcagggtgtgtttatgagtgactccacccaagcttgtagctgttctctcccatctaacctcaggcaagatcctggtgaaacagcatgacatggcttctggggtggagggtgggggtggaggtcctgctcctagagatgaactctatccagccccttaattggcaggtgtatgtgctgacagtactgaaagctttcctctttaactgatcccacccccacccaaaagtcagcagtggcactggagctgtgggctttggggaagtcacttagctccttaaggtctgtttttagacccttccaaggaagaggccagaacggacattctctgcgatctatatacattgcctgtatccaggaggctacacaccagcaaaccgtgaaggagaatgggacactgggtcatggcctggagttgctgataatttaggtgggatagatacttggtctacttaagctcaatgtaacccagagcccaccatatagttttataggtgctcaattttctatatcgctattaaacttttttctttttttctaaaaactagctgggcccaaagtttcaaacaacagccgggcacacatagctagctggtcgatgaggcagcacccagaatggccgctgtcttgttaagctcaagctccagcctgagcaacatagtgaaaccccaattctacacacacacacacacacaaagaagactgcagggctggtggtgcagcgcctgtagtcccagttactgcagaggtggagatgggaggatcacttgagtccaaaaggtcaagaccagcctggaggctgggcgcagtgactcacacctgtaatcctagcactttgggaggccgaggcaggcggatcacctgagtgtaggagttcgagagcagcctggccaacatggagaaacctcgtctctaccaaaaatacaaaaattagccgggcggctgggcgc

SEQ ID NO: 126462 - DNA, 2990 bp, Homo sapiens
tacctcggcctcccaaagtgctgggattacaggtgtgagccacagcaccccgtcctgtttttttgtttgtttgtttttttttaagatagagtctcgccgtcactcaggctggagtgcagtggtaacgatcacatctcattgtagccttgaactcctgggcccaagcaatcctcccgcctcagcatcccaagtaactagaactacaggcaagcaccaccacgcccagccattaaaaaaaaaaaaaaaatgtgtggagacaggggccttgctatgttgcccaggctggtctcaaactcctggcctccagcattcctcctgccttggcctcccagagtgctgagattacaggcatgagctcctgtgcttggctggaagaagttattttaaaggaggaatcagtatatcttgctaatgactagaaataggtaatagaggaaatatttctgtagccagaactctaaagcctggaagagtgatgatgccttaagaaacatgtccctgcgtggtggctcacgcctttaatcccagcactttgggaggctgaggtgggtggatcacttgaggttgggagttcgagagcaccctagccaacatggtgaaacctcatctctacaaaaaattagcctggcatggaagcacatgcatgtaatcccagcttcttgggaggttgaggcaggagaattgcttgaacccaggaggcagaggttgcagtgagccaagattgcaccactgtactccagcctgggtgatagagtgagactctgtctcaaaaaacaaacaaacaaacaggaaatcaaaaaaagaagtggattgggaaggaggtggataaggataaggtgaaatttgatggcccaactttagacattgagtttgatataaaatagcagttaatatatattgctagttcagcaaaaggaactaaatctagtggaggcccatatcaaggaagagggaagaggaagttgagacagtcaccagaaaagaggaagcccaagccactgtcccatcacttactctaggggtcaacagagggaggtattcaaggacaaagggaatgtttatgtttgagattctgcaaacagggcagcaagtgtgaagacagaaaaagatggagccattaacaggtaagtggtgggcaggcattcattttggagaatgtggctttatcaaataggcagggacatgggagaaatccagttttatggggttagaaaagcatggtcaataaagagatggatggccaggcacggtggctcacgtctgtaatcccagcattttgggaggctgaggcgggcagatcatttgaggtcaagagtttgagaccagctgattaatatggtaaaaccccgtctctactaaaaatataaaaaattagctagatgtggtggtgctggtacgtgcctgtaatctcagctatttgggaggctgaggcaggagaatcacttgaacccgagaggccgagattgcaccactgcactacagcctgggtgacagaacgagattccgtctcaaaaaagaaaaaaaaaaaaaagatggataagttactgctcatccggggaaggccagtattatgggaaacaggatggcatccggagggtgacaacattatagggggagatttcaggttgtttttttccaaagctgagggtactggcaagccaagggggagagggtctaagtgtgagaaccaaggggactgtgcctggaattccttcctgagcctgtgccgtaatgcccgcccctctccctcctccgtctgcatgcagtcatctggggacctggagaatgatgagcaggcagccagtgccatctctgagctggtcagcacagcctgcggtttccggctgcaccgcggcatgaatgtgcccttcaagcgcctgtctggtgagcccctgcccctgcccttggtggtggtactgggagcggggggctacttccaggggcttctcggcttctcttcttccagcctcctaccatctcctggggtctctggtctggccactttcctccctttgggactccctggtatcagaattgtgaatgagaaggcaagagaaaggagatctagcagaggccactcatcttcaaatctctgagcctggaactatagaacttctttggctttgatcccagccaatgtgcgtgtggccccgccccatggagtctgttgcacccactaactctgtgctcccttccctctcctggggcgggggaaggtgtgtctctcctccagtggtctttggagaacacacactgctggtgacggtgtcaggacagagggtgtttgtggtgaagaggcagaaccgaggtcgggagcccattgatgtctgagcctgccggagggcgagggtcggagaagcggattgggtcctgggcctctgtgatgaggcaggcacacctgtcggtcttggcttgctgctagaactagggccttctgctcgcccacctcccacccctacctggacgggcccaggcttggggactctgagctgtgttaaggagaacaagggcaaggagacctccctttgtgctccctcactccctaataaacatgagtctgatgttctccagcccagggacatgtgtgtttagtgttggaatggttacaccccatgtctgtcttccaccttctggggagaaagtcatgcaccttagcccaagttgggtgcggcagggccacctctgtgtgctataaaactgggaagcagaaaaagctggaggggaagggagtcaccctgagccctggcgacctctgctcttcccatcagtacacaaactagtcatccttctccctcctgaacaggcatttaatagtcttatttcagttggaagcaatagttggaaaataagttacaggaacagaccaaaaaaaaaaaaattaaagtgcttcaggctgcaaacgtaaacataaggggcaggaggctacctggccctgtccccaacccctgagacaggaaggtcactgtcaggggcccttagccatcaccacc

SEQ ID NO: 126463 - DNA, 1049 bp, Homo sapiens
gagccatcacgccccctgtggcctctcctgttggccgccccctctacctgcccccggacaaggctgtgttgtctctggacaagattgccaagcgcgagtgcaaggtcctggtggtggaacccgtcaagtagcaccgtgccagctctgttccctcttacactccagagacccaacgcccccagaggggatccctgctcccgggctgtgcctcccctgggatgcctcccagacgggggtgaagaggcctggcagagctgcctgtcttgtgtctgctgatgagggatgggggaagaagctgtgaagtgggcgggcatggctgggactaagccaccagtattccccgagttcctgtggggggggctggccccacccctaggccagggcaagggttcccagagctcccttgtccccggccctttaccctggttctgagtttacaaagtctcttcctcattcccgttgagttctttcccacctctgacattccctccctccctcccgcagggctgagattagagggtggtgatggctaagggcccctgacagtgaccttcctgtctcaggggttggggacagggccaggtagcctcctgccccttatgtttacgtttgcagcctgaagcactttaatttttttttttttggtctgttcctgtaacttattttccaactattgcttccaactgaaataagactattaaatgcctgttcaggagggagaaggatgactagtttgtgtactgatgggaagagcagaggtcgccagggctcagggtgactcccttcccctccagctttttctgcttcccagttttatagcacacagaggtggccctgccgcacccaacttgggctaaggtgcatgactttctccccagaaggtggaagacagacatggggtgtaaccattccaacactaaacacacatgtccctgggctggagaacatcagactcatgtttattagggagtgagggagcacaaagggaggtctccttgcccttgttctccttaacacagctcagagtccccaagcctgggcccgtccag

SEQ ID NO: 126464 - DNA, 1131 bp, Homo sapiens
cagggtggagtttgccaaacagagaagcaaggcacagacactcattgttttcttctctccttctatctgtctgtctctgtctctctttgtcactcttcccgcacccctcttcctggctgctttctgcttctgtgtacttctgatttttctgttttttcctgttatcctctctccccatctgcctgttttgtttttttttctctctgtctcactgtctcccatcatgatctctccccccatgtctgctgtcggatctctctccttccttctctccctgccttcctgtcactcatggtctttctcccttccccaacccggcatccacctgtgtctccctccctttcctctctctttctgtttttatctcaatttcttttcctccctctgtctccctctgcttctccctcccatcctgctctgtccctcttcttccttgcagatgaggatgccagcggctctggagggggacagcagtatgcagatgactggatggctggggctgtggctcccccagcccggcctcctcggcctccataccctcctagaagggatggttctgggggcaaaggaggaggtggcagtgcccgctacaaccagggccggagcaggagtgggggggcatctattggttttcacacccaaaccatcctcattctctccctctcagccctggccctgcttggacctcgataacgggggaggggtgccctagcatcagaagggttcatggccctttcccctcctcccccctcagctgggcctggggaggagtcgaagggggctgcagagagggtagagaagggactttgcaggtgaatggctggggccccaaatccaggagattttcatcagaggtgggtgggtgttcacaatatttattttttcatttggtaatgggaggggggcctgggggtatttatttaggagggagtgtggtttccttagaaggtatagtctctagccctctaaggctggggctggtgatcagccccaacagagaaaatgaggagtttagagttgcagctggggaaggggtttgaaggaagttggaagtggggaggggtgggggcatctggtctcagaaatggaccagctggatgcagggcaggggactgagggtgcttgagtagg

SEQ ID NO: 126465 - DNA, 1568 bp, Homo sapiens
cacgtatatatatatacacacacacacacatatatatatatacacacacacatatatatatatacaaaaattagccggcatggtggcaggcgcctgtagtctcagctactccggaggctgaggcagaagaatcgcttgaacccaggaggcagaggttgcagtgacccgagatcgcgccactgcactccatccagcctgggcgacagagtgagactatgtctcaaaaaaaaaaaaaatcctaaaatcctaaaatttaaatttaaattttaaaaaagtctgggatggaggagggtcctgagtaaggctgggggtgaaatggagaggggctttaaagccaaattggggggatacatgagagggagctcatgtgagtttcccccaaacactttgctgcttctctaaggcccgagtgaggattttcaggaacatcctagttcagtatcaccactcatcccatcctttctctttctctccctcccttaagatggtctcctgatcctggctgataagctccagggccccttttcctttgagctgacggccgagtccattggggtgaagatctcggagggtttgatgtacctgcaggaaaacagtgcgaaggtgtccgcccaggtacaggggagagaagggtggaggtgaggcccggggcggggacggtgtgggtgtcagagaggcagtataggggatctgggaagagactctggggtcagagtggggacgcagtgtggtttccccccagggtgactgtgtgaggtctcttcccggtgccgcaggtgtttcaggagtgcggcccccccgacccggtgcctgcccgcaaccgtcgagccccgccgccccgggaagaggcgggccggctgtggtcgatggtgaccgaggaggagcggcccacgacggccgcaggcaccaacctgcaccggctggtgcgtgggatgaccaagagttgggggcgggggggcccggggccggggatggttgtgggggtcgcgctccagctcgccccgccccctctcgcccgcccaggtgtgggagctccgcgagcgtctggcccggatgcggggcttctgggcccggctgtccctgacggtgtgcggagactctcgcatggcagcggacgcctcgctggaggcggcgccctgctggaccggagccgggcggggccggtgagcctcgggggcgtcggggggcagcagggggcgggaccgcggccgggaggggcggggccgcgcgcgctagctggcgcttcggggctgctctgctcgcaggtacttgccgccagtggtcgggggctccccggccgagcaggtcaacaaccccgagctcaaggtggacgcctcgggccccgatgtcccgacacggcggcgtcggctacagctccgggcggccacggccagaatgaaaacggccgcactgggacacgacctggacgggcaggacgcgggtgagacccctgcatccctgagcctgagccccgcccactgccctgaagcctctcccctctcctggtagttcccgcccgtgcctctgctcttagcgttcattgattaattcactaattcattcaacga

SEQ ID NO: 126466 - DNA, 1091 bp, Homo sapiens
cacagctcctctcggtgcttaggaccccagcaaggctcctgtccccactccttactccatctgtgaagactccatcccctcccagcccgcccaccccccagactctgtctccagggccctgccctcccccattccctgtctgccccatctctgagagttactcagtttctgattcacttgtcttttctcttctctcccatctcctcctgcctctgcctgttcacttttctccccattctttggcctgacctgccttccacctgttccctgcatttgctgcagagttttttctggagatgctctcagtagcccagcactctctgacccagctcttctcccactcctacggccgcctgtatgcccagcacgccctcatattcaatggcctgttctctcggctgcgagacttctatggggaatctggtgaggggttggatgacaccctggcggatttctgggcacagctcctggagagagtgttcccgctgctgcacccacagtacagcttcccccctgactacctgctctgcctctcacgcttggcctcatctaccgatggctctctgcagccctttggggactcaccccgccgcctccgcctgcaggtgagggatcctgaggcctgagcttcaaccacttctgacctagtgacccctgaactgtgcaccactcacctccaaactggcgtgctccagtcacctctgacctggtgatcccccatcctgcattgaagccatttctgacctggtgatccctatcctgagctttactcaccactgcccgacccagtgccccttggtcttcttgaagcagatgcccccacccctgccacctcccattctgagccctagtttcacacaaacactcacctgcccttagcctccagccacctttgtgccaaccccttcctaatcgtaacaccttgacttcctctggttcaactaaacaggaattgtgcattcaatacgcaaaaggcattttcttttatagtatcacatttagttgtcatcataaccctgtgaggtagacagtcatgcccttattttacagatgagaaaactgaggctcccagagattaagcttttcagcca

SEQ ID NO: 126467 - DNA, 1054 bp, Homo sapiens
tggccctgggcgagccgttgggattgcgcttgcgcacagcgtgtcttgtacgttcccgcgcttttctggaatctttcgcccccggaagggcagcggcgggcgcctgtgtggaaggtggggtggccagagacacccgagggacctgaggtggggaccttccctgaaccctgctcggccagaagtcactcttccaggctctgacaggtttctccttgacccaagaataggccctctcgcgaccctcccggccctgacactaggagccttcccgggccgtgccccaatggcctccgccacagagctggagaatcctctccccaggcctccatagactgagagtccattctcttaagcgcttggaaggctctttatcctggagccgcttaccccaggggcagtcgtagatatttttaccttctggaaaaataggaaacgcgcacctgcctttcctccttttgcgtttccagccctattctcatggcgcctccacccccaaatccttaagagcctcctgttccattccaggtggaatcaggtgctagtcctctggaaacgaaagcctggggtcttcttgtattttttttcttatttctttctttattttttttatttcattttaaaaaacctgtaagttcccttgcagagggcggtttatacttccgaagcctccagagaggggtgcgtctgaagctgccctgctgtctgccttgcttggcttttttttttttttccatttaattttttttttttagagacagggcgttgctatgtggcccaggctgatcttgaattcctggacccaagcgatgctcccgcttcgccctcccaaagtactgggattataggcgggagcactgtgcaccacgcctcggcttttggagagcaattccaaacccactgcccagtttctggtgtctgtaatcccttggtgctttaggtccactctttgccttattttatttatttgtcattacttttttttttttttgagacagagtctcgctctgtttcccaggctggagtgcagtggtgcagtcatagctcgctgcagcct

SEQ ID NO: 126468 - DNA, 1086 bp, Homo sapiens
caccttatatgcagttgtacagcgtgttagtttttttttttttttttttttttgagacggagtcttgttctgtcgccaggctggagtgcagtgacgtgatcttggctcactgcaacctccacctcccgggttcacatgattctcctgcctcagcctcccgagtagctgggattacagatgcatgccaccacgcccaactaatttttgtatttttagcagagatggggtttcaccgtgttggccgggatggtctcgatcttttgacctcgtgatccgccggcctcggccttccaaagtgctgggattacaggtgtgagccaccatgcctggccttttatttcttttttttagcccattctcccccttttatttttaaaattttattaaacatagtcattttataatctatgataaattattatctaaagtctttgtgagtataattctgtcagtgccttgtttctttatatgttttactaggttttattgtgagccactcattttccctggagttcttatgtgttggaattctttggggcctaggccaaagctgggtttttaagaaaggaacctgcttttgctttgacagttgtctggggacactccagaatcacttttttttttttaagacagggtctcattctttctaggctggagtgcagtggtgctatcacggctccctgctggtttgacctccctcagtggcgaggtggtgatcttcccacctcagcccctctcatagctgggactataggcatgtgccaccatgcctgactaattattctgtttttggtagaccagcctgggcaacatgagtttcactttacttgggttactgctcccagcctgaatcgcttttaattatctgaatgattattctgggctgggtgtggtggctcatgcctgtaatcccagcactttgggaggctaaggtggatctcacttgaggtcaggagttcgagatcagcctggccaatatggtgaaaccctgtctctactaaaaatacaaaaattagccattagccaggcgtggtggcgcacacctgtaatcccagctacttgtgaggctgaagcaggagaattgct

SEQ ID NO: 126469 - DNA, 2168 bp, Homo sapiens
gttcaagcgattctcctgcctcagcctcccgagtagctgggattacaggcacccgccactatgcccagctcattttttgcatttttagtagagacggggtttcaccatgttggccaggctggtctcgaattcctgaccttgtgattcacccaccttggcctcccaaagtgctgggattacaggcatgaccgactgcacccggctggcctgcatcttctttaggccgttcttgttgtgcttcttggcaaagcacatattcctcaggaatttgggtccatccgcttaagagatttgtatctttgtgattggggtttcttgatgccatttctgtgcagttttcagcctggttgtgtgaggtgtggttcttggatttggccatgtctacaccataacctgtggctcccttcctttgggtttttagagagattgccttatagcagatacatggttggatgttggcagactgttgaccagggggtcttctcattccccacctaagctctttgcagaatgtttccttgctcatcttcaggtatatctgtaaatgatcaaagcatcctgttattttccttgtaagcacctcatatccttcattctttaggcattgtgacccctgagatgttcaagaagatgtccaactcagagatcatccagcacctaacagagcagtttaatgaggtggaagaagatgaccaggatcctcttacccctcttatttcaaaacacaatgcctattatccccttctttttgattctgtgaaatagggtagcttttagaaggaggaattcagtctcttgggggtaaaagagatctgaatatgcctctcaaattggggagaataccaggaaatgaggtataacagatatttttactggactgttgagttttgacatccaagcccctatgacttcatggacctggtaataactttcccatccttttcatacatccttttgtaggactcgggggactaccctctcatagctccaggtccatcctggaagaagttccagggcagcttctgtgaatttgtgaggacattggtctgtcagtgccagtacagcctcctctatgatggcttccctatggacgacctcatctccctgctcactggcctctcagactcacaagtccgcgccttccgtcacactagcaccctggctggtgagcattcatttttactctggacattctcctggggatttataggactttcctctgttctctgattcaggatcttctttcctacctgcatcttggctcttcacttcaaggccatgcctcttttatcctaaacttcaatccagtttctcactagtggagttttgagaaggggtagatcacagcaacaatttccaggtttaatatttttgtcagagctcaccactaggggtatgctgatggttaaaagaagaccacaagggttcgagggaaacagtccactccaggacaggccgtcttaggattttagggtcatcctgctctgacgtctcattttcattgcccttctttccttctattttttccttctactcatcctctctcctctgacctcagtaatgatttctttatctctttttcctttctcaaagctatgaaactgatgacctccctggtaaaagttgccctccaactgagtgtgcaccaagataacaatcagcgtcagtatgaggctgaaagaaacaaggggccagggcagagggcacctgagcggctggagagcctgttggagaaacgcaaagaggtgaggagtgttccctgcttcttccttccctttttcccaacttgcacccacttctgccacagacccccttatcaggccctgggcagtctttcaagatcatgaataatggagtctggcaatagtttcatagacccatcctgtaaggggtcattacatgctcatcttgtttctgggttgtgggctcaacaaataatgtgtaatttagagttctctctaattccacttttgctcagtttttttttttttgtcagcactcattgttaggagtgtttaagtgctgtacctgcctgtcatgcagggaattaagttttgacctacttgtcaagtgtgcagtgtgcaagtgagtgcaggagtactaaaagccaaccattgacaagggaggccaaattttcaaggaatggaaagaaaacaggcctcccagtg

SEQ ID NO: 126470 - DNA, 1057 bp, Homo sapiens
taactgaatcctttttgctacctagcttatttccccattttctttgaaactgttctttctaaaccaatgacttcctaattcctaaagccagtagccttttctcagtctccctttcccaaatattttacatatttgctttacctatttttgctattttagtgtaaaatatggacatataggtacttcagccctaaagacttaagtatgtcctgtcgaaaatgatatgttgttcttacataattgaagaggtggggcctgttgtcttaaaggatgttccctttctccttataattctgtttccttggtgtctattgttcatgtgatccaggatttttcaataatggcactatggacgttgcggggctgtcctgccatggtaggatgtttagcagatctctggcctttatctactagatagataccagtagtaccctgctcccccagcaagttgtggcagccaaaaaaatctttagacactgctaaatctcccctggggaacaaaattagcctcagttgagaaccactgatctaattcctttcttctcatttttgctagttccacttctattaaactgcaacttactaaaaatttgttttccaaattgttagaaacatatacgggcatcatacctcaaagatattgcagattcaattccagaccaccataataaagtgaatattgaagtacagtgagtcacacaatcaaaaaatcaaaatttttaattctcagtgcatatgaaagttgtgtttacactgtagtctgttaagtgtgcaagactattgtctaaaaagcagtgtatgtaccttaatttagaaatattttattgctaaaaaatgctaatgacaatctgaacctttagcgagttaaatctttttgttggtggagggtcttgcctccatgttgatggctgctgactgatcagggtagtggttgctgaaggttagggtggctgtagcaatttcttgaaataagacaacagtgaagtttgctgcatctactgactcttccttttacaaaaaatttctctgtaacatgaaatgctgtttgatgacattt

SEQ ID NO: 126471 - DNA, 1447 bp, Homo sapiens
ggctgaggcaggaggattgctcgagtccaggaggtggaggctgccgtgagccatggtcacaccactgtactccagcctgggtgccagagtgagaccctgtctcataaaaaaatatgtaacattaaagattactgatcacagataaccataacagataccataatgaaaaggtttgaaatattgtgagaattaccaaaatgtgccacagggacacaaagtgaggatatactattagaaaaatggcactgataggtatgctcaatgcagggttgtcacacacctttagtttgtttaaaaaaaatccacaatgtctgcaaatcaataaagtgcaataaagcgagatacacctgtataatgccagctagggcttctgaatagtccgaataaccacatgcagaggggttattatttttactaaacacaaacctctgaggcattagttgactatacagcttcttccagaattagaaggtttaaaagagagcataggattacgggggttcacactatcctataataaacaggaagtaggtggaagttgtagtttttctgtatcttcagggccttatgcttgttagggtacaagaaagattaacccgtttctccctgtcctccagctccaagagcatcaagaggagattgaggggatgatgaatgccctcttcaggggtgtctttgttcatcggtacaggtgagctaatgggcctctctcattgaagcagctggcctttggttatggaatctgaggaagtgaataaggttttcccccctccaacccttagttatttggttagtcccagaattaatgcagctggagcaaaaattcttgacaacaaatgtttcaaattggtgaggtttagtttatcaccacctacaaaggatcttgtaagtgcttctgggagaaaataagagaataaagcattgctgagtattttcctgctctggctttgccccagatctgccccaactcctcatctttctggggttggagacttgaggataagagcagagaatagaaaggcggggcttttctgagggatgcctgctgcctggtgagccttctcctggcccagcctgctgtctcactgtgcgaagggcaggggagttttatactgtttaatgacctgatcaaattaagttaaaaagaatatatgtaggccgggcgtggtggctcacgcctgtaatcccagcactttgggaggccaaggcaggcagatcacctgaggtcaggagttcacaaccagcctgaccaacatggagaaactccatctctactgaaaatacaaaattagccgggtgtggtggcgcatccctgtaatcccagctgctcaggaggctgaggcaggagaatcgcttgaacccaggaggtggaggttgcggtgagctgagatgacgccattgcactccagcctaggcaacaagagtgaaactccatctcaaaaaaaga

SEQ ID NO: 126472 - DNA, 1021 bp, Homo sapiens
gagccctttcctcgtgtccattccaccagactcttctaccctgagtgcgagataagaatgatgggtggaagagagcaacgccagagcccaggcgcccagaggactttcttccagcttctgctgtccttctttgtggagagcgaggtgacatacacagagagaagtctggctgttgtgcataggacctacaagtgggctggggttggtggctcacgcctgtaagcccagcactttgggaggctgaggtgggaggatcctttgagcccaggagtttgagaccagcctgggcaacacagtgagaccctgtctctatcgaaaaaaaaaaaaagacaaatggagaaggatgggagtggacactgtaggaaggagagcgatatttaatcagtaaccacttcgtagggtatttttaacatgctatcattaactccccatgcacgttctcccctagctccatgaccacgctgcttacttagtagacagtctgtgggactgtgcaggggctcggctgaaggactgggagggtctgacaagcctgctgctggagaaggaccagagtacgtgtcacacggagccagggacagggaccttccaccccctagggtgaaactgggagggattgcttgcttcacttgtacaaggcagcaacggtggcatcgggtggggggagcttggagttggaaggtggctaatctttgattctatgtttttgatcctcctggcactccagacctgggtgatgtgcaggagagcacactgatagaaatccttgtgtccagtgcccggcaagcttcagaggggcacccgcctgtgggccgggtcactgggaggaaggtatggtgtgagggtagagtgggtaggtcagcaatactcagtcttgacaggcaatgtgcatccttatcccccaggctggggttagggtgctccttctaccctttaaagaatttcatttccagaaaaaagggccaggcgcagtggcttacgcctataatcccagcactttgggaggctgaggcaggcagat

SEQ ID NO: 126473 - DNA, 2373 bp, Homo sapiens
tttctttacacctcccccacccccaagtgactctcattccagggcttaacctctaaggagcgcaagacccaagccgatgacagggtgaagttgactgagcacctcatccccctgctgccccagctcctggccaaggtaccgctgcccctccactctgcatcacaccaagagaagtgaaaggaaatggcctctgtgggggtgggagtaggaattagcaatgtgtcagcttgtaaggaggcctccctgtcaatcatcacagttctcagctgatgcagagaaggtcactcccctgctccagcttctcagctgctttgacctccacatctactgcactgggcgcttggagaaggtagggagatagatttcctataccttgctgcttgcctgccagggccaaagggttctattgccagtatctttttttcctaagaacttgggttccagaaaaatcagcaagccttttcttaggcatcttatccttgaagtttaatgcttttaaccccgttccacttcccgccagaagagtgtcctcctcccatccccacagcacaccatcttctgccttttcttctcagcacctggagctgttcctgcagcaactccaggaggtggtggtgaagcatgcagagccagcggtgcttgaggctggggcgcatgccctctacctgctctgtaatcccgaattcactttcttcagccgggcggactttgcccgcagccagctagtagatttgctgactgaccgcttccagcaggagcttgaagagctgttacaggtaggagctggggctggacaatgggacaccccaaacaagggtgggaggggctgcaagacgggggatgtggactgatgagttctgggggaaatgctattgtggatcttctttccttctcagtcgtccttcctagatgaggatgaggtatataatctggcagccactctgaaacgcctctctgccttctacaagtgagtggctttcctcctcttccccatcccgtttttactggtgtctgtggagttggttccctctgttcttttccagtataacattcccctttctcccccaaagcactcatgacctgactcgctgggagctctatgagccatgttgccaactcctgcagaaggctgtggacacaggagaggttcctcaccaggtgagtggacaggctagagatgggttgggggctggggggctagattttaaggacctacgttctaggtggccactaggtgtgtcaagtctcagtgcgtggagtggacaaagcgaggaagatcaggtgggtgggggtcacctcttacattcctctcttagaaggtggactctacttccagggtcttcttggatttcctggaagccaaggataatattgagggattctagaagacgtagagtaaattagggagcggtgacatttctacttcgtgtagatgcctctgaagaatgtccagaatatcactcattttccactggaaaaggaattagctctccctttactcattttctctcctcttcactggtgtgtttctggctatctgtctctccctctcctaacccaaacctcatttttcaaaccctttgttgttacaggttatcctgccagccttgactcttgtctatttttccattctctggacactaacccacatttctaaatcagatgcttcccaggtgagtgtgggtcttagatgggataatgggaacagaggagtctgtgtcttcattcttccccttcaagccactgtgcccacagaagcagctgtcgagtttgagggacagaatggtggccttctgtgaactctgccagagttgcctctcagatgtggatactgagatccaggagcaggtgagtactgactcaagtgggagcaacaaggcgagtatccctgcccccattccaaggagaaattgacagtgtcatttctaccttgggaaacattctgtccttttaaacatcctttcttttccccctacaggcttttgtcttattaagtgatctacttctcatctttagccctcagatgattgttgggggccgtgatttccttaggccacttgtcttttttcctgaagctactctccagtctgagctagccagcttcctcatggaccacgtcttcatccagccgggagacctgggcagtggtgcagtgactctatacctggggctcagtaagggctggggcttgggtgtagctcagaaatatagggcaggaagcttaagtctgtgattcccttttgccttccatgtgagccaggtgattcccaggaggatcatttacagatagagcggctacaccagcggcgccgcctcctagccgggttctgcaagctgttgctttatggggtgctggagatggatgcagcctca

SEQ ID NO: 126474 - DNA, 1135 bp, Homo sapiens
actgctgggattataggcgtgagccaccatgcctggcctgtttcattatttgttttttattttatttatttatttatttatttattttttgagacggaatctcgctctgtcgcccaggctggagtgcagtggcgtgatctcggctcactacaaggtccggctcctgggttcacgccattctcctgcctcagcctcccgagtagctgggactacaggcacccaccaccacgcccggctaattttttgtatttttagtagagacggggtttcaccgtattagccaggatggtctcgatctcctgacctcgtgatccacccgtcttggcctcccaaagtgctgggattacaggtgtgagccactgcacccggccttattatttgtttaccgaaactctgatttattttgggctttgcacctgttgattagagatgaagtctagtctgaattattttatgcttcagttcatgtttcctacctaagggagtttgggagggagacatgattagggatgtgaaggaagaaaccaaatggtcttttccaccagtcagacattaccttccccactctttcccctcagttctacaatgactatggtgacattatcaaggaaacattaactagagcaaggcagattgaccgaagtcattgttcccgaatcctgctgctgagcctcaagcaggtgcgcccttctgccttgaggacatgccagccctgttgtccccaagtctctgtctaccctcagccactcagaatgtaagatccttcagagcagtaacttttcttgttttgactcttaactttacgtgataggttccttcattcttagtagacccttgggaagtattttttttttaactgactgggcaaccccatcaaaagtaacttatcaggacattggaacgccaacaaggaagtgatagggagttcctaattatttttcagtctgttctctctcagcctccttcagttactatagacgtttttatttaatgttatggagtagaggtgattggctttgtttgctgcaggggtatcgggagttccctagaaggaaggaaagagtaaaagtagtagatggtgtcccaaggcctttggaatttctgagtagagaagagaatgctggacttctctgtt

SEQ ID NO: 126475 - DNA, 1311 bp, Homo sapiens
agcatcacactgggggaaggatttcaatatgtgggtttagggggacacagatattcagtccattacaggctgcgtatcttctgctgttattcttctgttctcttctctgcagggaaggaaaaagaacagaatagaacagaacaggggagtcttgtgctcagaaggagaaaccaaacaatgataccttcaaaccagagactagagagcaaggcctctgttaaaatattatttcctaacatctcagaaaaaatccgttttctggtttccaaaacaaagtcatttaaggggctcagtcagcaggccaagaagcgctctgcagtcaggcctgatcctggtgcccacactgacttccctcccaggaggtgccataggggcctgctgtgcccatatttgttcttatgaggctgggaaaggaactggtttttttatttgcgaagtgacaggagtgtgtaaaggcctttttgacttttaacctcattctctctagcaagcaagtagctactcttccaccagtgagcgcgggctggacctcttagattctacagagctggatattgaggtgagtgtccccagagcaggagttatgtatccttcggaaatgctggcaggcaacccgtgcactcatcaaattgacaggccatagcctgggggtggccctctgggctgtctctggggctttgagggtaacccaggggaggatggtctgcccattggcccgttgctgtgtcctgtgtattcctttcatctttctcattataggatttctgacaggactctgggcccctccccagctccactccctacctcaagaatgtgaccatttggaaaaggcaaagagaaaaggagcaaaatgaagcattcccccaggcttcagccctgggctctgaggggaaagagttgggcattgtttttctaacctaacctttccctctggggtagagaagccgagagaccctgtcctccctaatgcactgtggcccagtccccttgcctttttcctgttctgtttggagtggagaagggcagcacctctgtgtttaatggaaatagcccatagtctcctggatttttggaacatctttctcagcctattttgtgtcctaatgattcgctcaataaacatgtttgaatccacacgttcccaaggtgtggcttgagatcgttaaactgatggaggtcaggttcttggtccgccttgtcccatggcccagcatatagatgtccccacaccctgcaggtgctttgtctacaggctctccaggaagtattgcttagtaactgagaggtggggtgaggcagtagagatgggga

SEQ ID NO: 126476 - DNA, 1038 bp, Homo sapiens
tggactggagggggccatggggcaccggaccctggtcctgccctgggtgctgctgaccttgtgtgtcactgcgggtgagtgccggcaccagagaggggcaggggctgcagggagggtgatgtaggacaacagcccaccgaccttgctgctgttccacagggaccccggaggtgtgggttcaagttcggatggaggccaccgagctctcgtccttcaccatccgttgtgggttcctggggtctggctccatctccctggtgactgtgagctgggggggccccaacggtgctggggggaccacgctggctgtgttgcacccagaacgtggcatccggcaatgggcccctgctcgccaggcccgctgggaaacccagagcagcatctctctcatcctggaaggctctggggccagcagcccctgcgccaacaccaccttctgctgcaagtttgcgtccttccctgagggctcctgggaggcctgtgggagcctcccgcccagctcagacccaggtggggccggggcgaggggtccaggagggcagggaggggctcgggaactggccacccatctgattcttgtctccgtgcccagggctctctgccccgccgactcctgcccccattctgcgggcagacctggccgggatcttgggggtctcaggagtcctcctctttggctgtgtctacctccttcatctgctgcgccgacataagcaccggtgagacctggtccctgtccacgtccccctgacactgggatggccacatgccctgcagagctctgaccatccttgctctctcccagccctgcccctaggctccagccgtcccgcaccagcccccaggcaccgagagcacgagcatgggtgaggaggggacctgctttggggatgaggtgacaggggcaggggcaggggggccagggctgggcccaagctgtgcagactcacttgaccctccttcccccgcgcaggcaccaagccaggcctcccaggctgctcttcacgtcccttatgccactatcaacaccagctgccg

SEQ ID NO: 126477 - DNA, 1028 bp, Homo sapiens
tcccgagaagctgggactacaggtgcatgccaccgtgcctggcaaattttttgtattttagtagagacagggtttcaccatgttgcccaggctggtcttgaactcctgaggtttggcattccacccacctcggcctcccaaagtgttaggattacaggcgtgagccaccatgcctggcctataatttttttatgtacacaaaattatcattacctggccatcctggaatgaggcagatcgatctggaaaggcttgcagaaagatacatatttgtagtttttcctgaaaatttaaatatttaaagttctgtgatatgacaggtaggctctttcaggctacagggagaagacactttagagaaaatgttagggagtaatagagtggctttttcgtttttttgcttctctgcttatagtattttgttttgggagggatgggatctggccttgattttgcagagacttcttgtgcccagcccgtagtatctacccaatcagacaaggagccaggaattactgcttctgctactgatactgataatgctaatgggtaagtttatttcagtgaggcaagttgaacacagaatggactacacattcatggtcagtcagtctatctatctgtctgtctatctggtcatttatcatatttctttttttttttttttttgagacggagtctcgctctgtcgcccaggctggagtacagtggcgtgatcttagctcactgcaacctctgcctcctgggttcaagcaattctcctgcctcagcctctcgagtagctgggattacaggcgcctgccaccacacccggctaatttttatactttttagtagagacggggttcaccatatcagccaggttggtctcgaactcctgaccttgtgatccacccgccttggcctcccaaagtgctgggattacaggcgtgagccaccaggcccagcccatttatcatatttctatagatttctctcagctcaggaaagatacctgtttgagttgggaaaaataggcaagtagatgg

SEQ ID NO: 126478 - DNA, 2163 bp, Homo sapiens
gaaggagccgtttctggtgccggccccgccgccgccgctcaaagatgagtcgggcggagggggcggccccacggtgccaccgcaccaagaggccgcctctggggagctccgcggcgggacggagcgtggtccgggtcgttgcgcgccatctgcggggtccccagccgctgcggtcggtcgggaaagccccggggccgcggccacctcctccagtggtccccaggcgcagcagcaccgagggggcggcccccaggcgcagtcgcatggggaggcccgcctgtcggatcccccggggcgagccgctcccccggacgtgggggaggagcgccggggagggggcgggacagagctgggtccccctgctcctcctcgaccccgcaatggctatcagccccaccggccacctggggggggcgggggcaagaggagaaatagctgtaatgtagggggaggcgggggaggcttcaaacatccggccttcaagaggcgcaggcgggtgaattcggactgtgactctgtgttaccctccaacttcctcctggggggcaatatctttgatcccctgaacctgaatagcctcctggatgaggaagtgagccgcactctcaacgcggagacccctaagtcatccccccttccggccaaagggcgagatccggtggagatcctcatccccaaagatattactgacccgctcagtctcaatacttgcactgatgagggccatgtagttcttgcttcgccactcaagactggtcggaagcggcatagacaccggggacagcaccaccagcagcagcaggcagccggagggagtgagagtcaccccgtgccgcccacagcccctctcacccccttactccacggggagggcgcctcacagcagccgcggcacaggggccagaaccgggatgccccccaaccctatgaactcaacacagccatcaactgcagggatgaagtggtgtctccccttccatctgctctgcagggtccctcaggctccctatcagcccctccagctgcctcagttatctctgcacccccatcttcctcctcccgacatcgcaaacgtcgcaggacttccagcaagtcggaggcaggggctaggggtggaggccagggttccaaggaaaagggccgagggagttggggaggccgccaccaccaccaccacccactgcctgcagcaggcttcaaaaagcaacagcgcaagttccagtatgggaattattgcaaatactatgggtaccgcaatccttcctgtgaggatgggcgccttcgggtgttgaagcctgagtggtttcggggccgggacgtcctagatctgggctgcaatgtgggccatctgaccctgagcattgcctgcaagtggggcccgtcccgcatggtgggcctggatatcgattcccggctcatccattctgcccgccaaaacatccgacactacctttccgaggagctgcgtctcccaccccagactttggaaggggacccgggggcagagggtgaggaagggaccaccaccgttcgaaagaggagctgcttcccagcctcgctgactgccagccggggtcccatcgctgccccccaagtgcccttggatggagcggacacatcagtcttccccaacaatgttgtcttcgtcacggtaagagggtccagaggctcttggaataggggccaggtgtgaagatgagattaaatgggaatgtagcagggaaggttatgacccagatcctcaaaagaggggtctgggttggcaagtgagagcctctgctgggcgtctctcccctcttataacctggaaaggtggggtgtctaccttggggcattgaccctggagtcctttgtcatgactgcaaggatctccaagatagaggaggactctctttttgctctgctcccggcttggcctataatccacactggtccaccttcccttcccttgaaggctgctgctcactagggaatttgatccaggtggaacttggtcctcagatttactgaaggagcctgagaatgggagtcagacatggaatgtcttctagggaggagattagggtagcgacagactaatactggcgtttctgccctttgatagccaccttgctcctatcagcggcttttgttttcctagacagtttgttgaagcgtgtcagg

SEQ ID NO: 126479 - DNA, 1033 bp, Homo sapiens
aattggcggagcggaacgctgcgctggagcaggagaatgggctgctgcgcgccctggccagcccggagcagctggctcagctgccctcctcgggggtcccacggcttgggccccctgcgcccaatgggccctccgtctgagcctcccttcccttacaatgtgcctttggggctgcccggccttgcgtcagccgcctgccccctcttcctatgcagctttaatgtccccgtgtccccggggtgggagttcaaggctcagtaatggcctggtcccccggcccctgccccatctcctcatcatccccagccttgatggaggagggagggcttcaggacggggcgtcagagggagccccctctgggagggaaccaacccccaccctccctcctgggaccccccagcagtagacggcttgggggagtcggaggctccccggcagacaccccacccccatcttgttcccttgaggtgcctcctctcctctgcccaggggagggagtgtggacagtatctggaagttctgggattcaggttgttattaaaataataataataattaaaaactctgaagaaacttgaatttggaggttgacatctcgttcgttgcttgtgttcagactcaggggtcgcgcctgccatttagggctcccctgagatcttttgcagactggggaggtttaaagcgtgggagacggaggaattgagacagaggctggagaagggagccagcggttcgggtcctgggaaggggcaagtgaggattgggggtgggggggcgtctgcccacgtgctgggcggggggctgggaaacaataaggtctttggtggttgcccaagatccacccctggcttcccagtgtgtcccctctgcgggctggatccgggtggctgcttgggggcggggcggggggccctgaatgggccccttgtctcggggctgggtgtgggccaggctccccgggcacacggtgcccttgccaggcctggccagccgccgtggctcccacccccggccagctgaggacgggccctg

SEQ ID NO: 126480 - DNA, 1528 bp, Homo sapiens
gggagctggggtgagggtgggggctcgaggcccaggagaggtctctctgagtggccgggccaggctggggagctgcttcagcctggttctcccaggccctggagtccgagctcttgggacaatacgggccccctgagtcagaatcccaggcgagaaatgcccaactctgggactcatctgcctctttctactctgagtgccttcttggatccagtcccctctgccctggtctctgtcatctcttgcctgtctctgggtctctgacggtttccccttcccccactctgctccccggagaggaagccccggaggtggcctgcccactggtttcacacacacacacacacacacacacacacacacacacacacacacacacactctctctctctctctctctctctctctccccctctttttccagtttgcaaactcagctctggagttcagcagcaacagcagcaggaaaaacctgcccctgctcccccctcccgccacctcccctctcctcttctcccctcacccagcaggcacccccggttcccgccaggccctcctgccatgtcggacccagacgtccccaggggctcggatgtccccgccatgtggcccccttgttccaggggtgcctgagccccttcaaggagccccaacccacccccaaccttggcccagccctgagccccagggaccatgagcgggggcaagaagaagagtagtttccaaatcaccagcgtcaccacggactatgagggccctgggagcccaggggcttcggatccccctaccccacagcccccaaccgggcccccgccccgcctgcccaatggggagcccagccccgatccggggggcaagggcaccccccggaatggctccccaccacctggggccccttcctcccgtttccgggtggtgaagctgccccacggcctgggagagccttatcgccgcggtcgctggacgtgtgtggatgtttatgagcgagacctggagccccacagcttcggcggactcctggagggaattcgaggggcctcagggggcgccgggggcagatctttggattccaggttggagctggccagcctcggcctgggcgcccccaccccaccgtcaggcctgtctcagggccccacctcctggctccgtccaccccccacctctcctggacctcaggcccgctccttcactgggggactgggccagctggtggtgcccagcaaagccaaggcagagaaacccccactgtcggcctcctcaccccagcagcgccccccagagcctgagaccggtgagagtgcgggcacatcccgggctgccacgcccctgccctctctgagggtggaagcggaggctgggggctcaggggccaggacccctccactgtcccggaggaaagctgtagacatgcggctgcggatggagttgggtgctccagaagagatggggcaggtaagacctgggttctagggctggcccatcagccctggcctaacctctatcttgagcctccttcctcctcctc

SEQ ID NO: 126481 - DNA, 1055 bp, Homo sapiens
aggccgcagcccagaaggtagcagtggggccagactggagccccccgggtgggattgaggggcggggactggaagaggaaaaccagggggcctcccaaatcctggaggaagaagaaggtgattggggccatcagcgagggagggaggcagagactaaaccattgctaaagggccagggagccagaatcggggtggaccaaggcccaggcccggggaaggactggaagtgggggaaggcaggcagtggagatagatggatgggtggtattttagatacccaactcagggtgtctcccatccttccttcagcgtccccaccctgccctcatgagatccccctacagcccaagataggggggagagtctgaccatctccccttttcccagtggggtgcaatgtacgcaagtaggccctgggcataactctgcctgtaggtgtgtccagttctgtgtagcagatttgtgtgtgtctggaggtctgtgggtgtgtctgtgggtgtttatgtctgtgtgcctgtctatccctaggtttctgtttacctatgccaatctctgcgtctggtcctctgtctgtagatgtgggtcggtggctccgtggtttgtgtgtctgaatgtgtacttgtgtagctgaggggttgcagtccgtttgtggggcctgtatgggtggtggatcgggatgtctttacacaagaagggaatctgtgttgacctggtctctccagagtgtgtatttggggctctgaacacctttgtcggggtctgtgtctgtctgtctgtgggtcctcgaagctgtgttgggttttctgtctgtgttttcctctctgaggacccgagtcatgtctcttctccgttttctctctttcattcatccctggcccccacccatcccacctttcttttttttccgttctcacccaccccgcccgccagtggatccgggacccagggagggccgccccccgggcctggtggcactgagcagggccccccagcccccacctcctgccccacgagatgaacctcctctaccgaaaaaccaagctggagtggaggca

SEQ ID NO: 126482 - DNA, 1023 bp, Homo sapiens
gcaatgctctgccaggcctcctctcagagatgagcttagttcacaggcagcccttccccccagcgctcccccttctgggctcaggaattgggattctccccctacaggtcttgatcccagggggatggtcattctcgccctatctggagatggaggggcttggaagctaaagctgcggttggggaggcccctctgaccagggaaaagggtttggatgcagcacatagacatgattctcagccccaagagatggtaccaatgggtggaaaggaaggggtgtgtgtgtgtttgtatgtatgttgggggagtgtgaaggagccccatcccagccgttacttgcaaaaggggcaattgtgtctcctggtccacccatactgcagcatgtgtggccagagggacagaatgacgcctccaacatgcaggcacacagctctccttgtcatcccagcagaggtcgaggacggtgcccgggcctggaatggcagtgccgagggtccaggcaaggtggagcgtgaggacaggggccctgggacatcggggatcccagtgagaagccagggggcagagggactgctggccaggatccaccatggagaccgaggagggagccgcaccgcgctgcccattccctgccagaccttccccgcctgccaccgcaatggaggtgacgcggcctgcacacacctgtgcacagcggggctggctgggggatctcccggggtctagctgcacctgtcctgacttcctctcacctgttcacgtctgtgcccagggccctaaatcctcataccacatctccacccctttttcccttctgatgaggcaggggcagcctggaccattcaagggcaggggactgggaactaggggaggggtacctgaggcccctgcactcctcactcctccttcttccacctcagacttcacgggaggctaccgcctggggcgctccgcctccacctccggagtccggcaggtcgtgctccacacaccccggccctgcagccagcccagggatgccct

SEQ ID NO: 126483 - DNA, 1044 bp, Homo sapiens
gtacaggattaaaaaaaaaaaaaaaagcgaattaaccccgattgacagcctagagatagtggctggaagggagccatggtccagagttcaggtgtagatactaatcttagcagggctttgaaatgttacccagaaggtaaaactcttacgaaatctaagagatgagagccaatgggttaccctggtagagagcttagctttttcaaacgtttgcacgtctaggtgagccatcctgaaggttaatcatttacacctttaagatccctgttgccatgactggatcctggtggtagcatccaggaaactctagattttgggggggctttggtgcatcatctgagtgctactcttggcattggtactgttcggtcatgccagagtgaatttacagccacaattctagcctagatttctggttatatagtaaagccccctccactcccctctgcactcctcctactcccaaattaagatattatttggttagatgcatgattaacatctgatatcaggcctggatctctgttttttaataagtttgtcaagggatttattttgacaattttttagtcttattttaagacactgttgtttttgttttgttttttaaaaaatgctttccagccaggcgctgtggctcacgcctgtaatcctagcactttgggaggccgaggcaggcagatcatgaggtcaagagatcgagaccatcctggccaacatggtgaaaccccatctctactaaaaatacaaaaattacctgggtgtggtggcgcgcacctgtactcccagctacttgggaggctgaggcaggagaatcacttgaacccgggaggtggaggttgcagtgagctgagattgcgccactgcacttcagcctggcgacagagcaagacactgtctcaaaaaaaaaaaaaaaaaaaaaagctttccctgtcttgatacctttaggagccagggagcgagcactattgttcttgcaagacagatgggagaacagaagcaaagagaggtttcgtaacttatccagtgccatatgggcattgc

SEQ ID NO: 126484 - DNA, 1090 bp, Homo sapiens
cagagctctgggctgggtgtcaagaatgcacttgacagctctttatttgtgacaagttcctgccctccttgtgccttactttccctgtcgggcttgctggtggttcttagttgaagcattttaatctccatgggaggaaaggtacagtatgttcttcaataattcagtacttttccatctgtctgggttggagaggtacacatgtaccttgcccctgttttagtcccatccctccatcccctcctctgtcacctttcatgttgacctctgctgggcagaggtggacagagtctctcactaaattacagatgtaggtgctgtttcataaggggtgcatgaaccacttgaaaagccccgaaggaagtgataaattactaaagggatgagaaaaagctcgacgtggggtggtgggcgggggggtggggatgagagaggtgagggcagagggagacatgtaaaaaagattgaggttgagcctaaagggaagggcggctggatgctatcaggagtctacctggctctaatcaacaggacagctgtttatcattgctgctgaggaggaacaaaggaaatgggttgaagcagaatttagatcaggaagagggttcctaaaattagtgaaattgaccctggagcagggtaataggagagccttcctcttagggactattaaaagttcctaacagggactcttcatggtgatgtttgcatccaagataagagctaaactggtttagttgtatcctgttcagaagcagaggagtgaaatcccagagcaaagaaacacgatctggggtgtatgaatctgaacacaattgttcaaaggcaaggatttcccaagtccaaatttggcacaaatgaaaaagaacttgggtgctgggtggaactggtttttttccattgttgacctggcagaactttcttatctgagcagctgagcaggtttgatgcttttatgaagcaagatagaagcaaaaatatgggccagcatgagggtgatgatcacagaaaaacaaaaggtgtggtatttgtggaaatagtactatgcctaatggaatcagagaggagacgggagggagggaaagagaga

SEQ ID NO: 126485 - DNA, 1050 bp, Homo sapiens
tcttctctacaaataattaaaaaattagccaggcatggtagcatgtacttgtttgtggtcccagctacttgggaggctgaggcaggagaatcacttgagcctaggtagttaaggctgtgttgagccaacattgccccactgcactccaccctgggcaacagcgagaccctgtctcaaaaaaaccaaaagatgttcaaggggatgctcaagataggcagaactttgctaagttgctcggttcccttcaaaaaagggaatcagtagagaaaaatgagcatagattttgactcctgtgtcttcccaaacatctcagctgagcgtggtccaaagttttatccctctctttacagcctaactattctttctcaaaggtatgtccccccagaccaagtcaaggggcccacttataccaaaggcagtgcctccacccctgtgcagggctccatcccagaagggaagccccttcggacacttctgggtgatcctgcaccgtctctctcagttgctgcctccacctcgagccaggtaactctcagatctgctcgtcatgtttcttttgagatttgggagacaggagtgtcagtttcctgaatcagattccccggacttagcagacaacagtgcaggagctgtgagttgggtctcggctctgctgttaacctgtatcttgtatttgtcacttctggacctcatatcttttggaagtcagaacctaacaggaagtggtatttaggaaagtcagaatatcagctccaaacctgagcattccatcaaagaaacacagaaggggctggaatatggtgtccaatacctgggaaggttgaggagtaacagccctgggggcagtattgggcagtattcctgtatatctcagggttaccttggctcatgtgctgtaaaatgtgtggttcttggagcaggtgtactgagaagatgaggatgatatgagctctgagaggggctaaggcagctcctgcccaggaatcttctaggttgagggcagttactcactgtcttctctctctacctgcctatctgagggcaacctgg

SEQ ID NO: 126486 - DNA, 1269 bp, Homo sapiens
gtgtcagccgcaataaacagaagccagaagccctctgggtggccctcaggtgtaactgtgtctgagagcacgtgcgtcgcggggttgttgggggggcctctgtttccggaattcaccgcccagtcgccagggggcgcccgcgggagcccggcgggggcacgcgccacgtggccgggagacgcacagggcgccagcgtcgccgcgaggcctctggggtgggttcgccaggagggcacgttcgcgccgcgccgcggagggaggctgagagggccgggccgggcggcggggacacggcggtaccgtcctgcgctcgggaacgcggaatgttgccctggtcgccgccgcggtggggcgcgggcccggaggaggcgcccgagggaccaggccttccggcgggcaaggaccagggcgagccctggagcgccggagcggacgcccccagggagctggggacacccccatgggacaggtgaggggctcggacggagccgtggggggacagcgactgggggcctccatgccttcaccacgcgctctacggaggcttctccattgtccctgctggagattgggtccctcggtctcccttgcaccaggcacccttgggctccaggggagggtgcgtgggggcggtgtggctgcagcctcagtccctgcccctccagcccacagcccccatcccgtagcccttcctggatctggagagagcagctgctgctgccccaccacctgccaggcccggccactgagcagccccccggagccccaggtaggacaggccctgctgcctctactacccctaagagcctctcactgactgtgagcctgttataatccccaagcgtccccccagatccccgttccccccaggtggcctgggaggtggccccctcgaggatgactccactagcgccctgggaccccaagtatgaagccaaagcaggacctcggccggtgtgggtgagttgggggcaaacctgtgggactggctggggtgctcagggagctgtgcggtggcctgaggctccagtgctctgtcctcctcaccctagggggccaactgtagctcaggagcctcgttctcaggccggacgctgtgtcacccctcattctggccgctgtatgaagcagcctcgggcaggggtctcaggcccgtggcccctgccacagggcactggaatggacagcaggcgcccccagatgcaggtacctcccttggtcccccgggggcgcaaggctgccccaactcctctgggaaccagtgcccag

SEQ ID NO: 126487 - DNA, 1019 bp, Homo sapiens
ccagactgtgccttttttttttttttttttgagacagagtctcgctctgtcacccaggctggagtgcagtggcgcaatctcggctcactgcaagctccgcctcccaggttcacgccattctcctgcctcagcctcccaagtagctgggaccacaggcgtccgccaccacacccggctaattttttgtatttttagtaaagacaggttttcaccatgttagccagggtggtctcaatctcttgaccttgtgatccacccgccttggcctcccaaattgctgggattacaggcgtgagccaccgtgccggtcccagactgtgcctttttaagatgagcaaaaggcacctttccctgtgggcaggcagcatttcatgcagggtgcagtgctgggcccgtgctggggaaaggggactcccgggcggccacaatccgctcaacatctgcagccctggttgcatgtcacaggaggtgtttgaacagggtttgtgccttgtgctgatcatttgaaaatggagggtgggttcgagtgtggagtgggcaggcgaggagatgaggaggacagacagggctgggcgggacctgacgtccggatgggccttcccggggaagctgagctgacgtccagatgggccctctcagggaggctcgcttagaccgtggaccagaatcatgtggagagaggagcagggaggtttctcccggggaatgacttgagccacccaggggagaggctgtgctgggcccagggtgactggccagctggagccaagggtgagggagtgagcacgaggccacagccctgagcatgttcctgacttttcccttgcccacctgttccagagctgggggacctccctctggtccgcctggatttctcctgtaaccgcgtctcccgaatcccagtctccttctgccgcctgaggcacctgcaggtcattctgctggacagcaaccctctgcagagtccacctgcccaggtgaggcgggtgcctggggggccacgaggacaggggtgtggc

SEQ ID NO: 126488 - DNA, 1028 bp, Homo sapiens
ccctctgtcactgaaggcatcattcccaccgtaacacgcatcatcttaacccttccctcaaatcttcattctccagtccccggccctccctcctcttccaaagcctcagctcttgtcccctgcacaggctaccagcagagctgcagagaccaggccctctgctctgcactcacatggaggccccttcccattcagtccgtttctgcaagaaacgcttggggcaggggagctgccctctggctgggttgtgtggggcctgactctgtgggtccccgcctctgtccccgctatcaggtccccgagggccagactgtgtccctctcattccgagtcttcgacctggagctgcaccccgcctgccgctacgatgctctggaggtcttcgctgggtctgggacttccggccagcggctcggacgcttttgtgggaccttccggcctgcgcccctagtcgcccccggcaaccaggtgaccctgaggatgacgacggatgagggcacaggaggacgaggcttcctgctctggtacagcgggcgggccacctcgggcactggtgagaactccctcacctccgccttccccccctccaggccccgccccggccgcagccccgcccccagccctaacctccgccccgcccaccccgcgccccagtgcctagggccccctacctccctgacccattttcctcactaaccgccccttcagtccctcctccccgtcttctctcccctcctcccgcacccacccatccctcttccagggccccccccaggcgcgaggcggaaatgggtcaccgacccgcgggtggaatgggcggcctggggttactgggacggtgagtaactgccggcccccgtccgcaatcgggctccctccgtcgggcgcgagggggcaccccagggctggggggactaggttcctccaaccccggggggcccctacacccagccctgggctcccgattgcggtcccatcaccccctcctggcggcagaagtctcccttgcaatgtttcaggcggggacc

SEQ ID NO: 126489 - DNA, 1071 bp, Homo sapiens
cacatcatcgcgcccccggaccaggtaccgaccctcctccccgggctgccctaggggacccaggcggcgccctccagcttgcagccagcagagatttattgaagatctgctgtgtcccgagcactgcgcttgcgctggtgggcacccaaaacagccccaacccctgcatgcacgcaaacaaaaatgtaaaaattacaactgagacaagtctcaggagagcgaggtacagggtcctggtataacacgcgggcctgtcacttgtgagtgcgccaggacttgaccttgccaaccacgacgaccgacacccctgcagggtcccatgggtgtgtgtggtcctccgtgctgtggtgtgaacgccttcaggaggggggcccagaggacgcgggaggtgggagtgggagctgctgcaggcacccagtaggagatgaggtgcaggcgcccaggggtgtcccgccgcgcagtccccgcctccgcccgccgccaggtcatcgcgctgaccttcgagaagtttgacctggagccggacacctactgccgctatgactcggtcagcgtgttcaacggagccgtgagcgacgactcccggaggctggggaagttctgcggcgacgcagtcccggggtgaggggcgggacctgggcgagtccgggagagagtcggcggaccgcacgcacgcggctgtttggaggggcggggttcagctaaagggacgggatctgaaccccagggctccaaaccggcgaggggagcaggttggaggccaggcaaagaggagatttggccccgggtctggggtccgcggatagagaggcgactggggctctgcgaagttgggacgaagttaaaaggccacctggccaggggtagtggctcatgcctgtaatcatagcactttgggaggctgaagcgggaggatcacctgagcttaggaattcgagaccagcctgggcaacatggcgcaaccttgtctgtaccaaaaatacaaaataattagctgggcatggtggcgtgcctgtagtcccagcaacttgcggggctgaggcaggaggattacttgaacccagaaggtca

SEQ ID NO: 126490 - DNA, 1051 bp, Homo sapiens
ggcaacagagcaaaactccatcttaaacaaacaaaaaagttcttccttggctacattcactcattgattcatctggtactcactggtgcctccttcctgccgatgacccctactgggtgctaggaccggaagcctgacagagctctgaacagttcaagtcaatgaggctgttatggggacagtgctccctcctacctgctgagcaggtcaccctccaccctcctccctcctagatgcacccacctgcccaaagcagtgccgccggacaggcaccttgcagagcaacttctgtgccagcagccttggtaagaatacccccaaccccattccagctcctcgaaccacctcctgcttctgtttccagtcctgccatctggaacctcccatctcctcatctctcactcccattctcccacagtggtgactgcgacagtgaagtccatggttcgggagccaggggagggccttgccgtgactgtcagtcttattggtgcttataaaactggaggactggacctgccttctccacccactggtgcctccctgaagttttacgtgccttgcaagcagtgcccccccatgaagaaaggtaacagagatgtggggaaatggggatgggtcaagctaagccacacagaaatgatcaaggtgtggaatcttgagacctgctgacaggtctcaagaataagagatctcaacccctccctccttcttccaggagtcagttatctgctgatgggccaggtagaagagaacagaggccccgtccttcctccagagagctttgtggttctccaccggcccaaccaggaccagatcctcaccaacctaagcaagaggaagtgcccctctcaacctgtgcgggctgctgcgtcccaggactgagacgcaggccagccccggcccctagccctcaggccttctttcttatccaaataaatgtttcttaatgaggaatgggtcagatctccatgcttatggtattggggtccatcttgaggatttcttttcattaattaattaactcaacacatatttactatacagaata

SEQ ID NO: 126491 - DNA, 1032 bp, Homo sapiens
acggcagaaacaaagacgtcctagccaatgacagaggccgtacggcggaagtatagaaaaggactctctggaacatggcaacattaatctgaccacaagctgactggcaggtgctttaaccacaaggtgggcatcctaacgcgagcgaccgttttgaggcagaagcccgatggggcccgtgtccgagcttagggaggggccggagacgcaaacacaggtctcccaggaagcaggcggcgtcacaggtcgctctgcaggcgcccgctgcagcgggcggagtctggctggagagaggaggcgggcgtccgggaacgcccggaaggggcgaggccagcggcggggcggggcttatggagatcgtgagctgggcgtgaggagaaggccgggttgggagctgcgaggggccgggtttagcggggtgggcgtggccgtcgaggtggggctcggcgggtccgaaggaacctggggcagagctggaagaggaaaggtcttgggggccctgggcctgggtctgcgggagccccatctagcggggttccaaggcggcggcggcatcagtcgaggccctgctccgggagctcatcttgtcccctttcgcccctcacgccccccagctctgactccaggccctgtcccctgagctctgccctcggatgtccgaccgcccagagcctgcatgcgccgtggggcgccccaggaccaggagctggtgggtccggggccccctgggcgggggtcccggggcgcccctcctcccttgggacccgttgtcccggtcctggtctttcccccggatctagtattcagggcggaccagcggagcggaccccgacagctgctgaccctctataaccccacaggaactgcgcttcgcttccgaggtaaagggatcggcgcctcgtgggggctggtggccggacactggggggttgtgttggctggaggagtcagatgggtagggttgcacgtccagctttggtggactgggaaagtcatgtccagcctccggggcagaaggcagaggggacttaa

SEQ ID NO: 126492 - DNA, 1339 bp, Homo sapiens
catcctgcagtgcccatggctgtagcgatcctcaaggaggtggaatccccctatgatgtccacgattatatccgttcctgcctgggggacacgctggaagccaaagaatttgccaaacaattcctggagcggagggccaagcagaaagccagccagcagcggcagcagcagcaggtgaggcagccggcaccagcagctggggtgggcttgcctggtgcctcctgaccttcaccctcctctccgctgccttaggaggcatggctgagcagcgcctcgctgcagacggccttccaggccaaccacagcaccaaactcggccccggggagggcagcaaggccaagaggcgggcactgatgctgcactcagaccccagcatcctgggtgagctgggctggggcaggagcgggacttccttggcacagggcaggaggagcccaggagagagctcagacgcagcttctccccggcttcagggtactccctgcacggatcttctggtgagatcgagagcgtggatgactactgaccagcccggacccccagcccctgggctgtaggccagggcagccacagcggcgtggaccgagggtcccagcctgcaggctccccgcagagagcacaggaagaggcaggggcggggtccccagcacttgttacaaacacacgatgcaccttaactcacccaccacgaggcactttacagactgggggagggggtttttctttttatttttttttttaattttaaacgactgaagaaaacattaggagaggcaaaaatattgttaaaaactagactctaaacaccccttcctgctgtgaggatagtgggtgtgacaatggaaggtccacagaggtttttgttttttggttttttttttttttttaagaaaaaaagatgaaaaatgaaaaaaaaaatggttaggaggctgaaagaaaaaacacactgttattttggggcagtggggacacaggccccgtggacctgtcctgcctggcccccaaggccatacttaccccccagaaggcgggccatggggtaactggaagctgggggccagcagtttgcacaggaggcctgtctgagccccacccgccagacctgttgtgagcagctcctgtcactgaggctggctgaggtgtccggggtggggccaaagtagccccttggcttcgctgctttgggggacagttgcacaaattggacgagtggccccagctctctggctgccatcttgtgctggccgagtagacgggaggggccaagccgtgccaacctctctggctggcagggtggggcagcaggactctggttctggtgaggggcgtctcccactg

SEQ ID NO: 126493 - DNA, 1818 bp, Homo sapiens
accgccgccgccacagcagcagcagcagcagctcacggcattcctgcagcagctccaggcgctcaaaccccccaggtgcgtggtgcgtgcgagccctcaggatacagggtgggggggggatgggggcagaccagagatggatttggggtcctaagaatccacaatttgctcctcagaggcggggaccagaacctgctcccgacgatgagccggtccttgtcggtgccagattcgggccgcctctgggacgtacatacctcagcctcatcacagtcaggtgtgtggcctgactggtccccacccccaaggcagtctccgggtgaaatggggtctggggtctgctccccacccccacacgcccctagctgccattctggctggggagcccactgctgcggctggactagatcagtgggcccaagtgcccacctgcagccgcctctgcccccctgccccctgcaggtggtgaggccagtctttgggacataccaattaactcttcgactcagggtccaattctagaacaactccagctgcaacataaagtgagtgggcatcctggggctgaggccctgggaatgaagggtggaccgaggcaggccccaggctgtcccctgcagctctcccctctgatgggccactggtctcagttccaggagcgcagagaagtggagctcagggcgaagcgggaggaagaggaacgcaagcgtcgagaggagaagcgccgccagcagcagcaggaggagcagaagcggcggcaggaggaggaagagctgtttcggcgcaagcacgtgggtgctcccaagcctcagctggctgggtggacaaccctcgccaggtcccctcaccatgtccccctcttaggtgcggcagcaggagctattgctgaagttgctacagcagcagcaggcggtccctgtgccccccgcacccagctccccgcccccactctgggctggcctggccaagcaggggctgtccatgaagacgctcctggagttgcagctggagggcgagcggcagctgcacaaacagcccccacctcgggagccagctcgggcccaggcccccaaccaccgagtggtgagcaggccgggaacctcccgggctccccctacagtttccagggtggcacagggagggggatactgaacccagacttgtgcagccccagccccagtcccagcctctcctgtgatggcaacagctcttgtggccctcacctcacctgtctccctttgccacctaaacaagcctccccatccgcttttctggggtgcctttgtttgagccactctgatcttctgccatctgtagcagcttgggggcctgggcactgcccccctgaaccagtgggtgtctgaggctgggccactgtggggcgggccagacaagagtgggggcggcagcagcggcctggggctctgggaggacacccccaagagcggcgggagcctggtccgtggcctcggcctgaagaacagccggagcagcccatctctcaggtgggcgtggcacctggaggctccgggatggccctgagggggaaggtggcagacccccccaacccctgccagctgatttccaaccctgactcaccctcccccttcagtgactcatacagccacctatcgggtcggcccattcgcaaaaagacggaggaagaagagaagctgctgaagctgctgcagggcattcccaggccccaggacggcttcacccagtggtgcgagcagatgctgcacacgctgagcgccacgggcagcctggacggtgggcgagcggctcccaggaggtgggcgggacctgggtctccag

SEQ ID NO: 126494 - DNA, 1096 bp, Homo sapiens
gggccgggcaggcactggtgttctttgccgggctgggcattggctgcccacctacctgtagaatcaggctacttagatctggaagaagagtgctgagaggtggggaggaaccagggggtagcagagccatgtcttcaaggcagtgtaccagatagaaatcaggcgtaatcaaaatgacctttgaaagtcccttgaagaagctgtagaacctggagtgacgtctgcggtgttgtgtggtgttgtgcgatgttgtgatatgttcctgccgcgtctggcagcgtggaggcgagggtcagggcaccgcattccctctgccattagttgagttgacccaagtgaagtggtggactcggcctaagggagtgtgacccgcggttccagccacactcaagggcttgtgctaactcgcgtggcaggcccagcccttggttctgaactctggccatctccctcttctaggtgggaaagagctgaccccactgcctcctcaggaggagaagtccagctccccatccccactgcccaccctgggcccactctgggggacaaacggggatggggacgaaactgcagagaaagagcccccagcggccgaaggtaggaagggaggatggcctacctcccgggtgcgctggggctgtgggagaaagtgctccccactcgtgggggtgggcacacagggcattcacattgaggagccatggcaagagcgtggtgttctggagtgagagtaggcgaaagctatcttgtctcctccccgcccttctttccacctcctatctcatgccttccagatgatattcgggggatccagctgagtcccggggtgggctcctctgctggcccacccggagatctggaggatgatgaaggcttgaagcacctgcagcaggtgtgggggcctgagaaagcgggagggacccttcccacttctgacctgacctgcttggccccagccccggccccagctcaagctccatccccatccccatcctgatgttgctgagattggcagctgagcctttcttctttttctgggcatccaggaggcggagaagctggtggcctccctgcaggacagctccttggaggagga

SEQ ID NO: 126495 - DNA, 1567 bp, Homo sapiens
ggggcagcacgcggagccgaggtagaggggtgatggcgtgtcctggggacgggcagatctgggcccctgacttcgagaacgtgcagcaggtttcattgtgcgtctggcctcttctctaggccgcggccgtggtgacagctgcttttaccaaagaagcatcgaagaaggcgatggggcctttggacgaagcccccgggaaatccagcgcagccagagctgggatgacaggtggggcggggagggggcatggcgcagagccgggcaggccagggaggggaggcctgggccctgtcgctagagggtaacagaggcccaccagataagccctgtccgagatcccggtgctcctgacccctggtttcgtttgtccccttcctccctccactgcctcagggcacagtggacaaggcatggggcggttgcacagggtggcaggggaggctgtactgtttctgacccacacgtttcccctgctgcagaggcgagaggcggtttgagaagtcagcaaggcgggatggaggtacgaggctgctgagggcggcggccggggcggcagggaggaccaagatgggtggcccagtctgggggtgcttatttcggaggtgttgggggcaggagggcctggagctggcccccccaacgtttcttgagggtccaggcaccacgctgcctttctaataactgcccctgtcttcccgtctcccagcacgatgtggctttgaggagggaggggctggcccaaggaaggagcacgcccgctcagacagcgagaactggcgctccctacgggaggaacaggaggaggaggaggagggcagctggaggctcggagcagggccccggcgagacggcgaccgctggcgctccgccagccctggtgagattggggcctggtagcattggcgggggcagtggggagcaggaactgtaatgagagggtgggctcctgtagccacggggagggagcagaggctggctggtgtgggagtggccgggacagcagccctggaggtgctccgtgagctgcagcagagggggccgctggcttcgcttgggtacccactcttcttctccctgacttttcctgtgcagatggtggtccccgctctgctggctggcgggaacatggggaacggcggcgcaagtttgaatttgatttgcgaggggatcgaggagggtgtggtgaagaggaggggcggggagggggaggcagctctcacctgcggcggtgccgagcgcctgaaggctttgaggaggacaaggatgggctcccagagtggtgcctggacgatgaggatgaagaaatgggcacctttgatgcctctggggccttcttgcctctcaaggtatctgtgaggaggcgagggtgggaacctgcccttccggggtcctcttcctccccacccaccccagctgttctctgctccccaccccggccccatgcagaagggccccaaggagcccattcctgaggagcaggagctggacttccaagggttggaggaggaggaggaaccttccgaagggctagaggaggaagggcctgaggcaggtgagccgcggggtg

SEQ ID NO: 126496 - DNA, 1051 bp, Homo sapiens
cagattgctctaggtggccacctgcagtcagtgacaggctggtggcttttcatgtcatggaacacaccaccactggagcatccagccgaggcagaggaaggagaggtcccaggggaggccagcctggccttgggttgcctctgagcccggtgtttccccctggagtgcctggactctgagcaggcctcggcttgtcatgggctgctggctcagctggggctgatggcctttcctcctcagcaccctggttgaacccgcttcctcttctttcccagactgtggcgtcctggagttgatgggagctgcagcaccaagccgggccagcctccctcccagccagtgacaacaccgcagcacctggaccccgcccacccgcttgagtcctctgcctggggccccagggatgcgcctcctcctgaaagtcccctccatcctcccttagaggaacaggctgccgccgcgcccccatcagcctccattgccctgaccttatttccacctgatggtgccagaggctgcttcccagctggtatcctgagatcctcgttcccttggtggcttggttgtttaagcctccattattgattgggggcggtggtctgggtgtgattcctgtgggggaaaccagcccgaggtgccttggctcaggcttgcctgcctggagtccttgtcgtgtacccgtctgtggccctagagtcacctcctgctccttttcactgggtttctccccagaccaagcccctggatttgagcttctgagcagccaactgatttttttcatgagggaaagaattttgctcctagatttatttctaatccttttctccgtaactgaccttttctctgtaagctatttgtggctctagtgggtttttgtttgcttgcttgtttttgttttatctttgccctgaacgtccatcctggcctcggctgcctccctccccgagttcttcactacacctcctgtctcagcctcccagagagggtggcgagggtgctgatgcccagagacaccatccggcgaatggacctctcctgtcatgcggggcag

SEQ ID NO: 126497 - DNA, 1615 bp, Homo sapiens
ggctagatgaaggatgttgaaagtctaacaaatgtaaaatggcttcaaactcacagaataatgcttgcgagtttgggatggttactgctaccgtgcgcacctccagtcttgcatagtgtcaaggatgtcggggcacgctgtcggagcagcttcctccttcttttccctggctggagcccaaggctgggcaagtgggcaaaagggatcacaggaggtaaagagtgaaaatcctttgaaaactgttaacttgtagacaattgccaagcggtggtgtgatttgctgggatggctcagagaggagagagctgggataaccgaccagccgcgaagaatgcgggtttgcatctcttttttaagcctcagcgtcctcaccctaccacgcttggagaatctccatcctgagaaagggccaggtcccctccagcaggcctggggctgggcggttgttccagtgttgaggaattggggactgtgcttctgtttaagtggctctgttctgtgccaaggcacagtgctctgtgttggagctaattttaggggtgatggagtgaggagataatgttcttagctgaatgtgcactgggaccgcctgttctctgtcttttctttctctcttgagttctgagccccagagagcaggctccctttcccgcgcgccctggcgcctactggagcacccgggcccagcgtgtcctcgccccttgtctccggcagggggcagtctttcaaaagcattgattcagatgctgggggagtgagggtagacaggcccgagaaagagaaggggtggggaaggggcgaggagccgaagtaggccgaggcttgagggcagggccagggcgggggacaggctggaaggggcctgtgagaaggagaccctgagctgagaaagctcagccgggtaagctgagacgggcaggtggcagtaccccagcccccgccacctcctgctcttaccttcattggacagggatcagatacctggccctgagagcttgcaatagacaaacttaggcagtttttcttaaaaaaaaaaaatctattcttttctcaaagattttctcctggcaggatttcagatttccctcgtgggacagtgtaattagggaatgatgtccctgctgttcagagaggagaatgacccagcgtgcacacacctgccttcccttgccttccccttggcccagtagacccccaagggctgtgcccatgctcgtggcgcagaggagggtgtctcagcactggcgcacttggtatctggagtcacatagctcttggctgtggggctgccctgtgcaccccctgcccagtggtgacaacccagaatgtctctagacttggccaagagccccctgaggagcagaggtgcccccagtccagaacctgttggagggtgggagccccatggtggcctgcaggtgtgccactagttcctttagtccaaggaaggggccaggcaccatcagcttccggcaccagaccctgctgtgggggtgcctagagagttaacctcactctcctggtttcttcccaagaaggcgggtggcatgggctttttcctgctctgggcctgctctctcccctgtcttggtgtcgctgtcctcagtctgcatga

SEQ ID NO: 126498 - DNA, 1079 bp, Homo sapiens
ccacaggggatgccaccgtgggggagggactctggggactgtcacacctgggcagggtcccttctcagtcttttgttttgttttttgtttttttgagatggtgtcttactctgtctcccaggctggagtgcagtggcgcgatctcggcgctcactacaacctctgcctcccgggttcaagcaattctcttgcctcagcctaccaagtagctgggattacaggcacgcaccaccacacctggctaatttttgtatttttagtagagacagggtttcaccatgttggccaggctggtctcaaactcctgacctcaggtcatccacccgccttggcctcccaaagtcctgggattacaggcgtgagccactgcgcccggccccttctcactgtctgacttcttggcagagtctgaacaatgctcagtctatggcgacccccgttacctcacatttgacggcttcagctaccgcttgcaaggccgcatgacctatgttctgatcaagactgtggacgtactgcctgagggggtggagcccctcctcgtggaaggacgcaacaagatggatccgcccaggagctccatcttcttgcaggaagtgattaccaccgtctacggctataaagtgcagctccaagctggtctggagcttgtggtaagagctgggccagggcctggtgggtgtggggaggcagctggaccaggtaggccacctggagtagaagtcagggatccctgttccctgggatgtttgtggcaggggtgggctggttgtaaaatcagagtcagcaggacgcagtggttcacgcctgtaatctcagctactcaggaggctaagacgggaggatcacttgagcccaggagttcaagaccagcctgggcaacatagcaagacgcaacatctctgcaaaaaatttaaaatgagctggatatgggggcgcacacctgtagttccagctattgggcaggcttaggctggaggatcacttgagcccaggagtttgaggctgcagtgagccaagatcttgccactgcactttagcctgggtgacagagagaaactgtctcaaaatcaaaaaca

SEQ ID NO: 126499 - DNA, 1589 bp, Homo sapiens
tctgtgcagcctcttcccccagtctcattttgcgggcttttctctcttttctttccttccctggcacccaagccaaaggccctgcctctggcctccagccctacccccttctgcggttgcacagaaggatggctgcccagctcttaaaaaaactgcccgggaactgttgacatctgttctccctcccccgctggcttttctgattggcttacaatcctgaggctaggaccgtctcaggagccaagagaggagagcggccacagggaacctagggtctcaccaagctctcctttccttctgcagggacctgctccgaatcggagtcactctggcgggacaccagaagaaaatcttggccagtgtccagcacatgaagtcccaggccaagccgggaaccccgggtgggacaggaggaccggccccgcagtactgacctgcaggaactccccaccccagggacaccgcctccccattttccggggcagagtggggactcacagaggcccccagccctgtgccccgctggattgcactttgagcccgtggggtgaggagttggcaatttggagagacaggatttgggggttctgccataataggaggggaaaatcaccccccagccacctcggggaactccagaccaagggtgagggcgcctttccctcaggactgggtgtgaccagaggaaaaggaagtgcccaacatctcccagcctccccaggtgcccccctcaccttgatgggtgcgttcccgcagaccaaagagagtgtgactcccttgccagctccagagtgggggggctgtcccagggggcaagaaggggtgtcagggcccagtgacaaaatcattggggtttgtagtcccaacttgctgctgtcaccaccaaactcaatcatttttttcccttgtaaatgcccctcccccagctgctgccttcatattgaaggtttttgagttttgtttttggtcttaatttttctccccgttccctttttgtttcttcgttttgtttttctaccgtccttgtcataactttgtgttggagggaacctgtttcactatggcctcctttgcccaagttgaaacaggggcccatcatcatgtctgtttccagaacagtgccttggtcatcccacatccccggaccccgcctgggacccccaagctgtgtcctatgaaggggtgtggggtgaggtagtgaaaagggcggtagttggtggtggaacccagaaacggacgccggtgcttggaggggttcttaaattatatttaaaaaagtaactttttgtataaataaaagaaaatgggacgtgtcccagctccaggggtgatgggggtgatggactagatttctaaggagagtggggctgggtagggagggctttgtggctgaccgagaggtgtcagaggtctggaggctgcagggctgtaggggctggaacttggttatcagccccagggtatgtttgaggtggtggggtgggggccgagcgagatgaatcattcgcagctgcttctaacgtctccagctggctctgccaagagcctggggcacctccggggtggggctgtcccctccctcccctgtc

SEQ ID NO: 126500 - DNA, 1014 bp, Homo sapiens
ataaagatgtgtgactcagtttaccttttgttcctttcccatcggctacaggaagcagagcaatgggagagaagcagaatattcggacaaacacggacagtatctcatcggacatggtgggttgccctaatttgatgggaataggggcttggggccgggtgtggtggctcctatctataatcccagcactttgggaggcagaggtgggcagatcacttgaggtcaggagttcgagaccagcctggccaacatgttgaaactccatctctataaaaaatacatcagtcagccaggcatggtggtgggcacctgtaatcccagctactcaggaggctgaggcagaagaatcattttaacccgggaggcggagattgcagtgagccaagatcgcgccactgcgctccaggcctgggtgacagagcgagactccatctcaggaaaaaaaaaaaaaaaaaaaaaaaccacggagacaggggtttggggctaaaagctatgagccgagcctccgagtccagtgggagttaattcccagctgacggggccctgcctgatttctcaggtactaaggtctacatcgaccccttcacttatgaagaccctaatgaggctgtgagggaatttgcaaaagagatcgatgtctcctacgtcaagattgaagaggtgattggtgcaggtgagagccgaaggctgcccgggcacctgggaacgaagcgggggtgggcagggccacactggagcgggagagctgatgacctctgcgtccttgtttgaaggtgagtttggcgaggtgtgccgggggcggctcaaggccccagggaagaaggagagctgtgtggcaatcaagaccctgaagggtggctacacggagcggcagcggcgtgagtttctgagcgaggcctccatcatgggccagttcgagcaccccaatatcatccgcctggagggcgtggtcaccaacagcatgcccgtcatgattctcacagagttcatggagaacggcgccctggactcctt

SEQ ID NO: 126501 - DNA, 1033 bp, Homo sapiens
ggggaacaaaaaccatgaacgaggggaagaggaaggccaaaggggtggaaaaaccacgaggacgaggtgtggtgagaaggaaagacgcaaagaggaaatggtgattgtgacacctattacctgagtgtttccaagcaccaggcctgtgctgagcgccttacaaatattaatttcacccatccagcaacgctaagggtggtgctattattgcccccatttttcagatgaggaggctggggcttagttaaggttaagtagtttatccaaggccctgtgccgcgaggaacagcgagaagtggaggccgaaagcgaaggagagatagtgactgtcagaaagagaaacggaggtggacagagagtggaggagagataggtgagagacatgcgaactgacagatcaaagcgtggctgcagctgagctgggacgcagaaagggagcctgcgcttgctctgggctgcggacagcccgaggcagagacagtgtgtaaattggagacaggaaaacactatcccggctggaacaatggagggtggagacggcagcctctatccacccccttcccagaacccgggcatcctgtccccagtgagcagggctgtctcttgccacccatggggaccttgcgcctctcacctcaggctggctggcttcccatctgacccctagctggaggacatcatttggtccccaggaagaggctgcctcacccaccctctttctcttctctcctgcagctcccatggggtgggagccaggtgttctggctcccctctccacccttcccagcgcccaatgccccccacattgccggcccccgaggggattcctgtaccctccctcctccactctccactgccaggggctgtgcagtttttcctaatccccccccttcctccagtgcctgtcccctcccccgatgatccgagccaagccaggtgtgttcacccctcccattcataccgccccccagaatctcctcccctctgccttcccataaccaaatccagatgtgaggcctcggcgggagcctgg

SEQ ID NO: 126502 - DNA, 1036 bp, Homo sapiens
tccctcccgggcccggcgccgcccggcccagttccagcgcagctcagcccctgcccggcccggcccgcccggctccgcgccgcagtctccctccctcccgctccgtccccgctcgggctcccaccatccccgcccgcgaggagagcactcggcccggcggcgcgagcagagccactccagggagggggggagaccgcgagcggccggctcagcccccgccacccggggcgggaccccgaggccccggagggaccccaactccagccacgtcttgctgcgcgcccgcccggcgcggccactgccagcacgctccgggcccgccgcccgcgcgcgcggcacagacgcggggccacacttggcgccgccgcccggtgccccgcacgctcgcatgggcccgcgctgagggccccgacgaggagtcccgcgcggagtatcggcgtccacccgcccagggagagtcagacctgggggggcgagggccccccaaactcagttcggatcctacccgagtgaggcggcgccatggagctccgggtgctgctctgctgggcttcgttggccgcagctttggaaggtgagtttccttgcgggggggggcgcaccccgtcactcctgggacctcccccccaacatctgggcctcggagtggaggggccggcctctgactacccctacccgggcactgcagtcccaaacacttcggaccgatagtgctggaacgggaggggggcggggaagaggcgcccgacgggtagtggagttttcttttgtttgggaaagagatggagtctggctacgacccgggacattcccctgcccgggctccccgaactctcactgctgattacatacgcccctggctgcctttcctttcctccctaccccactattcaaaactatctgcaaagtttctgtcccagtcccacctcccgccgtacatgagggaaggtttctggagaagcaacagcagacaaggcacaacttttcgtgctaggccctaaaacgacccccagcgccaattccttagcgatcacac

SEQ ID NO: 126503 - DNA, 1059 bp, Homo sapiens
accccgtctctactaaaaatacaaaaattagctgggcatggtggcgcgcgcctgtaatcctagctactcgggaggctgaggcaggagaattgcttgaaccgggacctaggaggcggaggttgcagtgagctgggagctgagatcgcgccactgcactccagcctgggctacagagtgagacgaaatctcaaaaaaaaaaaaaaaaaaaaaaaaggtgggtgtgtccgagagggtgaggggtccggctagatctccaaatcgcccttctcactctcactctcgtgttttgggggggcttccccgccgcccgcagccatgacccctgaggctggggctgcggctgcggctgctgtctttcctgagctgtttcctgtctggctcctgggggccctcgggatggctgggaggggcccttcctctcactgccaactcccctcaccctcccatcagttagcggggagggtccagcacagccgtgctcctcccaccaacccccttctacttcagggaacttaacagtatgggttactggatagatggattggagggggtgctgctccaggagtcagcccctccaaggggcagaaggaaaggacttagactcccacagtaattagcggggacagattttttttttttttttgagacagagtctccctctatttcccaggctggagtgcagtggcgtgatctgggctcactgcaacctccgcctcccaggttcaagcgattctcctgcctcagcctcccgagtagctgggattacaggcacagggcaccaaccccggctagttttcgtatttttagtagagacagggtttcgccatgttggccaggctggtctcgaactcctgacctaaagtgatccacccaccttggcctcccaaagtgctgggattacagacgttagccaccgcgcccagccggaggacagaatcttgaggagcccagcaagagagacgttggagcccagcaagagagacgttggagtccaggatgcttggggggctgccaagcgcccttacgtcccagaaaggacagccgggcctgtgataacct

SEQ ID NO: 126504 - DNA, 1043 bp, Homo sapiens
ggctccgagacccgcggcccacgtcctgccggagacgcttgtctgcagggctgcattgcatccccgggcgcacgtggagctggagcagcgcaggctggggaagagcagagagggtcgggcttctccgggcgcgccatggggcggggccgaggacggggaccaatagcgcgcgcgtgctggtgggggtggggacaggctccaggcctggcatcccggtagccgcagctgtcttttccggcccccgtgcactctccgcccgagcggagccccccggctcgcggggatcgcccccgagcgctgcgtcctgcgggtgggtgagtgagcgcctcgcggcccccgagctgtggggtgcacctggccggggagaaggatatcttggctcccttgcaccccaacgggcgcaaaggggcaggagcccggattgggggaggaggaggacccggggaccttgtgtcgctcggtgggagccggtctgtgtttctgtttcgctagggtgtgtttgggttggtagagtttgtggggaggggtgcctcgtgtggatgggaggaatcggggaggctaaggcgaggaggagggggtttgagatgggttgagggagaggattgacggagggtggggttttgaaagagttggaagtttcttgttacctgtgggtgcggtgattgcattggggggcttggtaggggcagctcaggacaccgaaggagaggatggggaaggctctcctgcccgtaacttacttcccttttgggagatttggttcctcttgcattgctagttaaggaaggagaggctggagaagcctgtgccgtcagagaacctttgcccctttccagaaccggtgccatccctagtctcaggaacataagggaaggggtggcccccaggagccgggaggggccttgaaacccctgctgacaggtttggggtaccacttttttgtggggcagtggctggtaccatttgcagcccacggacttttttgagttgccggtaagcagggtgtgggtgcgttcctgtttccttgcggttgtctctttttt

SEQ ID NO: 126505 - DNA, 1069 bp, Homo sapiens
tgttgccgtaagagcccgtacacagtgggaatgtcatacctatggctgacgcaccttgctgtcagtgtgtgggagcgtggtgtaaacttagcctgtgagcctgactcctgtctgttcctgccttccccgctctgcccccaggtggcatgaagcccaacacgttggtcctaggtttctacgatgacgctccaccgcaggaccatttcctgacggacccggctttctctgagcctgcagacagcaccagggagggcagttccccagctctgagcaccctgttccctcctccccgggctcctgggagcccccgggccctcaatccccaggactatgtggccacggtggccgacgccctcaagatgaacaagaatgtggtgctggcccgggccagcggggccttgccccctgagcggctgagccgggggtctgggggcacctctcagctgcaccatgtggacgtgtggcccctcaacctgctgcggccccggggtgggcccggctatgtggatgtctgcggcctcttcctgctgcagatggcaaccatcttgggcatggtgcccgcttggcatagcgcccggctccggatcttcctgtgcctggggcctcgggaggcgcctggggcggccgaggggcggctgcgggcactgctgagccaactgaggatccgggctgaggtgcaggaggtggtgtggggcgagggggccggggctggggaacccgaggcggaggaggaaggggactttgtgaacagtgggcggggagacgcagaggcagaggccctggcacgcagcgccaacgccctggttcgggcccagcaggggcgcggcacaggaggagggccgggtgggccggagggtggggatgctgagggccccatcacagccctcaccttcctgtacttgcctcggccgccagccgatcccgcccgatacccccgctacctggcgctactggagactctaacccgagacctgggccccacgctgctggttcatggggtcactccagtcacctgcactgatctgtgatgcccctgcctccagggctaggtagagagggcccaggcagg

SEQ ID NO: 126506 - DNA, 1069 bp, Homo sapiens
actttgggcggccgaggcaggtggatcgcttgagctcaggagtttgagaccagcctggccaacatgatgaaagcctgtctctactaaaaatacaaaaaaaaaaaaaaaaaaaaaaactagccaggcgtggtggcatgcgcccgtaatcccagctactggggaggttgaggcaggcaaatcacttgaacccaggtggtggaggttgcagtgagctgagatcgtgccactgcactccagcctgggtgacagagtgagactccatctcaaaaaaaaaaaaaaaaaaacgaagaaaactagccaggcatggtggcgtgtgcacccgtagtcccagctactcaggaggctgaggtaggaggatcacttgagcccaggagttggaggctgcagtgagctatgatcatgccattgcactcctgcctgggcaacagagtgaaactccgtctctaaaaaataacaataacaaagaacgaaggagggccagggttggaaacaggaagagacagtcctggggcatgaagagatgagagagacaggaaaggtcagacattgtgagacaaggtggaggccaggcctgacctgtgaaagtcctcaatgcagtggatctggctcgtagcatccactgtgaaggggatgccgtcgaggccgcggtgacacaccacgcaggtgaagcagccagggtggtaggccttccccatagcccgcaggatccggtccaggatgggctgggagcacgtggcacatttctccagggtggcctgttgggaaggaaggcaggaagatctgggagcgggcgggagccatggcagctcaacaggaaccccagcaacccagccatctaatttctgcagcctcctgcatgcagcctcctgcatgtgattcggtgaaaggcagacttgagcagatctgagttcaggtcccagcactatacacggtatttaaacactatgagaaaaacaggaatcaggctgggtgcagtggctcacgcctgtaatgccagcactttgggaggccagagtgggcggactgcttgaggccaggagtttcaaaacagcctggccaacatggcgaa

SEQ ID NO: 126507 - DNA, 1053 bp, Homo sapiens
ttccggccgcgagggtggagctttgtgcctcggaggcgtgggtgacgcaggcgcagcgcgggctgcgcgcgctactgcccatccccggttgtcccacttttgttcgcctctcttcggccctctactcaagagctccgtctccgtctcgccctcctcgaagtcctcgtcgcgcgcccgcgacccaggtcgccctgaaatctagcccgtccgagcgcgagtccaacgccgcggccgcaccaaggtgggggaggggaggagcctggggggccccgctggggcgggagaggaaccggggtccacgggggcgggcgcggagaaactcggggcgagtggaggtgttggagccgcgttctcaggcctaggatggtgggggccgcggagggctggccttggcgggagggaagcgggcgagctgcccgcgagggacggtcccttcctccgctcgtccttttgcaccactcctaccgcctctccccggtccccaggccccctcagaccgtgccatgggtgacagtgatgacgagtacgatcgaaggcgcagggacaagttcagaagagagcgcagcgactacgaccgttcccgcgagagagatgaaagacgtcgaggggacgattggaatgacaggtgagccgtttttaacttcatcttgtccccgtttcatgccgtttcactccacccgcgtcgcttttctttctcccccttgtaatttttatgagggcgaatcctatgaaatggctcattggaccgttttctgtggttcagcctatttgctgttggccaaataactagctgtggcttggtttttgaaattctctgcagatcagagctatagagctaagagtttgagtatgaagaagcactgtttatacatgcacgaaaagcgtgcttttttgcttttttttgttttgttattgagatggggtcttgttctgctgccctggctggagtgcattgatgcagtcgtagcagcctccacctcccgggctcaaccgagcctcccgcctcagcctcttgagaagctgggactccagggggaggccatcacgcccgcc

SEQ ID NO: 126508 - DNA, 8437 bp, Homo sapiens
aattattgttacctttttaaaaaataaaaaattttttgtagggatggcggggggcgggggggggtctcactattgcccaggttggtctcgaactcctggcctcaagtgttctctgcctcggcctcaaaagtgcttggattacaggcatgagccactgtgcctggcctttaatctttgttacttgttcttactgccagagagtgggaccgtggccgtgagcgccgtagtcggggtgaatatcgggactatgaccggaatcggcgagagcgcttctcgccacctcgccacgaactcagcccgccacagaagcgcatgaggagagactggtgagatggagcggtttccctctcctcccctttgcctcagttccacctgggcctcccctttctcccctcacctgtgcctaaatctttgtcatttccttttctcaacttcccatcacccatcgttactttgtcccttgaaacccttgtctgggagaccatgctgtgtgtacccccgtctgtccatcctccatgctctggggaggtgactcccttctctgctttacttttgtgtcccccaccttcagggatgagcacagctctgacccataccacagtggctatgagatgccctatgctggggggggtgggggcccaacttatggcccccctcagccctggggccaccctgacgtccacatcatgcagcaccatgtcctgcctatccaggccaggtaagggtggggcttctcagaagagggttggtaggcctgggggatggatggggttgctgaaggccatggctgaagccagggagcgggtcaggcacacagaggcatgtccctggggtaggggtggtagctgttggggtttggggtgatgtccatggtggacaaagtaaaggggccccagctactttggcccctgtagcctcccaccgttccccaaaaaccaagccttcctgaccggggtcccctccaggctgggcagcattgcagagattgacctgggtgtgccgccgcccgtgatgaagaccttcaaggagtttctcctctccctggatgactcggtggatgagacggaggccgtcaagcgctataatgactacaagctggatttccggaggcaacagatgcaggatttcttcctggcgcacaaagatgaggagtggtgagtgcccctacttccctggacctctgccctggcatgtccccctggccccgctggtggagccacagccctgtcctcttcccagttttccctgtccagaactttctgggggcgggggtcgggaagtatgacagcattggctgatggggtctccccctcacttcagcaactgccacggcccccgccccgccctgtctcctgtcctgctgtcctcagagagtgggacacctccaggcagcaggccagagccacttggccccttggggcagcagacagactgcttcccacttgttggtgttgggtcattgtcatccctgatcaccaggaccctgtgtggctgtggcgtcctcctaaagcgacgagtgaatccagacaagaaaagcaaagatctcggtcgtttgacagaaaaagaattttaatttttttttccttttgtggatgttttaattttaatcaaccatcttttccccccttcctgctcctcctcctcctcatcctctttctgctcctcctccttgaaaagagccagaactgggaactacacccgctcatcgacggagctcggagcaaacccacctccacccccaccatacccagcccatacatgagcccctgggctgagctgcgcggccccggccaggcagacaggccagggcactgctgtgcacaatgcagcggtttagctgaatgtgattgctcaggcagctagccagtcaggccccactgcggagtcccgcgtgggcatctcggccgggcgcccagccaggagccagccggtggcccaccagccagcatgggccctgggcgccgctagttaaatcttgagctctgtttgaccaagcggccaaggtaaagatcctggaggtgatgcctgcggctttcctttcctcttctgccccactcgtggttctgttctgtcttcgctgtcccctctctcgaattgctctgtgtctttgtcctaatctctcagcaccttcattcttctctgtttctgttcttgctccctgcctaacaccaccttcttccctgttggtttttttagtttctctctctgatctttagtttttccctttgttttcggtttctgggactttctcacactctcccctttcctccctttccccttttcctcatactcctcatttcttctgttttccctctgaggtcctatttgaaatgttttatttttcttctccctaaccttccagccctctcctctctctccccctgtgggcaggacctgaggctctaaagggcactccagtgtctcccttcggtctttcctgtcccttcaccgtcttgcttatcttcccacgggtggagaaaggtgccctgcctctgggcttttgctatctggccctctgtcttccacctcggggtggagggagttggcgggagcagtttttgaatgactgcagtttggggttggtgaggagagggaggttcttcagggcctgctatttcctgagccttcctctctgaagctttgggaaatgacacctttttactacgttagtgtttcccagagatttaaagtggtaaatctgcctctcctaccctggcgtccccctgtagtcattggtcttcccaaatccagagctcttagttcctggttctcccccaaatcttcacagaacacaacttctggttccttttggggtgttgggtggttctagcgcacccctatcccttaatctctctattttgatgaccttttgtggttgtgagaggaagggggatatgccctgtctttcctgggccccttcccacatcctggccttggcttccaataactgttttgtctttccctcccccgcttcgttcccaggtttcggtctaagtaccacccagatgaggtggggaagcgtcggcaggaggcccggggggccctgcaaaaccgactgagggtcttcctgtccctcatggagactggctggtttgataaccttctcctggacatagacaaagctgatgccattgtcaagatgctggatgcaggtgtgcggatttggaggggtggcaggcatctgggccccatgggggtgggggtgtctggggatcaggtagaagccggttgacaggagccagggccctggggtcatgacctctgttccctttgttggtagccgtgattaagatggaaggaggcacggagaatgatcttcgcatcctggagcaggaggaggaggaggagcaggcaggaaagcctggggagcccagcaagaaagaagaaggacgggctggagcaggcctaggggacggggagcgcaaaaccaacgacaaggatgagaagaaggaagacggcaagcaggtccgagccctgggtctcctagtgttgtccctggcagcctgggggaggggggcgggtaggggtccataggagctagaagtagggggctggggaaaatgaacctgtggcctcagctgtgggggtgggggccctctgataaaggtgggaggggaggtttgacatccccagtggttgtctcttaccataggctgagaatgacagttctaatgatgacaaaacaaagaagtcggagggtgatggggacaaggaagagaagaaagaagactccgagaaggaagccaaaaaggtgaggtgtctgtggcctggggtcagagtgttggggctggggttctggcacgctgacttgtcccctctgctgtggctcacacagagtagcaagaagcggaaccggaagcacagtggtgacgacagctttgacgagggcagcgtgtcagagtctgagtcggagtcagagagcggccaggctgaggaggagaaggaggaggccggtagggtttcttttctgctttaaagtgcgttctcctaatgcgggtggggaggtgagaggttggcgacattgacgggagggtgggtggcttttaggggaaagcttctgtatcctccccaccacaatcagtaataaaaatgcaccaactccttcctaccccccttcctgcctagaagaagcgctcaaggagaaggagaagcccaaggaagaagaatgggagaagcccaaggacgccgcggggctggagtgcaagccgcggccgctgcataagacctgctccctcttcatgcgcaacatcgcgcccaacatctcccgggccgagatcatctccgtgagtggggacccgtggagtcagggcagggctgatggagaagtggagggtagagggaaggcagtggggccctgcctgtgacagatgcccccgtttcacctgctagggaggccccttccccaggttccatggcctccgaggactagtcctgatagcgccattggctttcaggtgctggtgttctgaagccctttagtggtttttccctgcccaaggatgggaagagtgataaggcagttagtccctagggttctgagggcagtgggggattggaggaagaagcgaatgaatccttgagtcactgtggggctgcttttctgcttcttgcagctttgtaaaaggtacccaggctttatgcgggtggcgctctcagagccccagccagagaggaggtgagtaactcggtgcgttggagggaaaagtgcaggggaacgttaatggccaacaccaactccctcgcttgactatgctaacattttctttcttgtgtaggtttttccgtcgtggctgggtgaccttcgaccgcagtgttaacattaaagagatctgttggaacctgcagaacatccgtgtgagtgctgggggtgggactgtggggaagaggaagggagactctgtgccacacgggacctctgtgtgactttgttcatctgatagtttggttgttctgcacactctttgaccgttttgtctggctacgttgtctctgggcaaggctctagggcgttagcatggacggaacctatgtggtccccgtccccagggagctcgcagtctgatcaatcgctggtgctcaagagggaagggtcttagagctgctgtttctctggcaagcggggtaagtggggtaagctgctgatgatgtctgccctccagctccgggagtgtgagctgagccctggtgtgaacagggacctgacccggcgcgttcgcaacatcaacggcatcacccagcacaagcagattgtgcgcaacgacatcaagctggcggccaagctgatccacacgctggatgacaggacacagctttgggcctcagaaccagggacgcctcccctgcccacggtcagtgactccccaaaggactttgtcagaagcaactggtagtgcctctgctgtgggcacctctgaccttacctatctgtagccttgaacccttgcacccactcgcctgctcactcatttgccccttcgtgtgtgggtagcagcacctccagattccagcagaactggggggatgctagtgatcatttgtggctggggtggaacaaaagctaaaataaagacaaatctcaagggggcaaaaggtgccatttatgtccggtgaactcctgtcccctcgctgctctttcacttgtggaaagtctcaggttacctcctctgaaggtcttctctgccttacttgcttctcttcctcccatcagagcctgccctcgcaaaacccgatcttgaagaatatcaccgactacctgatcgaggaagtaagcgccgaggaggaggagctgctggggagcagcgggggcgctcctcctgaggagcctcctaaggaagggaacccggcagagatcaacgtggagcgggatgagaagttgattaaggtgccagtggcagcgcggggcacgtgggggctcgggcggtgagggcaggagctgaacgctcgcattcacttcccttaggtcttggacaagctcctcctttacctgcgcatcgtgcattccttggattattacaacacctgtgagtaccccaacgaggacgagatgcccaatcgctgtgggatcatccacgttcgggggcccatgccacccaaccgcatcagtcacggggaaggtgagctccaggttcccctttgttcccggctgcccctggccttggtcctccagccccttgccaccatccttccttctggctcccttgccaaccttccttcctctgttcccaaaccacagtgctggagtggcagaagacttttgaggagaagctcacgccgttgctgagtgtgcgggagtcactctcagaggaagaggcccagaagatggggcgcaaagacccagagcaggaagtggagaagttcgtcacctccaacacgcaggaactgggcaaggataagtggctgtgtcctctcagtggcaagaaattcaaggtgtgggatgttggagaatggccgtgctacggtggtgggaggtggggttgagacaggaagccccctgggcaggggtgggggaactgcttactgcactggcaggcgggagctgggaatccttccagctcgggcctgggagcgaggcaacccttatgtggctgtcctgacccctctcctctctccacccagggtcctgagtttgtgcgcaaacatatcttcaacaagcatgcagagaaaattgaggaagtgaaaaaggaagtcgcgttttttaacaacttcctcactgatgctaagcgcccagctctgcctgagatcaagccagcccagccacctggccccgcccagagtaagatacgatccatgaaggtcgcatgtgccctcttccttgactacccagggactcctgtttctctttaacgtgtcaccccgagaagtttctgccccatcctcaggccatagccctagaagtcaattgtacccgtatccccctccccgcccccgcagtaattcatgtccctgtccgtgttgtactccccccaggtttgaccccaggactcccctacccacaccagactccccagggcctgatgccctatggtcagccccggcccccgatcttgggctatggaggtaagtacaggagggagatgaaggggcttggtgagtgtgtggctttgggagaagaaaacagaggatggaattgaggacatagttttgcaactcaacactgatctctgtcatagctggtgctgtccgccctgcagtccccacaggaggccctccatacccccatgccccgtatggtgctggtcgagggaactatgatgccttccgaggccagggaggttatcctgggaaacctcgcaacaggtgaggagggcagacgcccaagctttgttgccgcctgcagactcccttttgggagccctcagctctcatcctgtacctctcacctcacaggatggttcgtggagacccaagggccattgtggaatatcgggacctggatgccccagacgatgttgatttcttttgagccgtcccccgttcctcagtcctgtatcatccatacttgtactaccttgtcctatgaagctctgagaattttttgtacgatcagccttactgctaataaaagcacttccacagggctcctgactctcgtgtgttacataactcctccatccttccagagtaactcctgaggtgttgctcagccctgccacttttattattgatgtcaaaagcgccaggctttgcagggacaccagtgggaggtacataggtgcgtgtctgggacccgagaatctcagttctgtaacttcgtcctcagtccaaggtgcgctgctgctgttgggagctaaggctggtcaagcacaggttgtagaaggagttggggtcaaaggctgcactcacctcttgccagcccacccacccagcagcctgtagttcactggggctttttggagtgccccagtagtgagggtccaataccaggacataggcttccgtgcctgaccctacgcagactcccagcaaggccttggacctggcatctgcgtcccccccaaccatgactgggcccccaccccctgcgaagtgcgagtaaagcctctccagctccccgtgcagccccactccccggggtacgtggcagaggcgtccctggggccctccgaagtgagcgaggcagaggctggcctccacgcagccgatccagtcccgggagccccggaagccggggggcttgtcgcccatgtcctccagggccgcctgtacggcggccagtccaggtacgcccgcgggctggccctctggccacgagcacagcgtctgcagagtgcggtagccgcagccccagccgcggtcgtccaggccgtcgcagccgtagtggtagtagaggtagtggcccgagagcagcgccaggcggacagggccgcggctcggcggggacaggcccacgtggacgtccctcagcggctccagggcggtgggcgggagcggaggtccc

SEQ ID NO: 126509 - DNA, 1063 bp, Homo sapiens
gacctaggcatctctgcccactgggatccccgtctgtgtccttactgcctgctcctcgcaccctggcaccctatacagcaggaccccagtacctgtgcacacaggagggcttccaccatgtttgccacaaggcctgtggactggggacactgaggattcgattattagctaaggccagggactcctggtcttgtcagttctcacaggtctgacccaacaagtagcactgacatttttacgtttgctggatgtacacacggaagtggaggaggaggaggagaaggaggagggcagctccttagctcaagagcaagtggcccaaggcctcagaagactagaaggaagttcctggccattcaggtgagacctcaggttccttcccggccatttgggtcagcccctagccctggggatccgtggggcttgaggacgggcggtagaagctagagggtgagctggtgaaggtgccttctcaactctgatcctgacgcctctgcctgcagcatggtttcccacgggtcctcgccctccctcctggaggccctgagcagcgacttcctggcctgtaaaatctgcctggagcagctgcgggcacccaagacactgccctgcctgcatacctactgccaagactgcctggcacagctggcggatggcggccgcgtccgctgccccgagtgccgcgagacagtgcctgtgccgcccgagggtgtggcctccttcaagaccaacttcttcgtcaatgggctgctggacctggtgaaggcccgggcctgtggagacctgcgtgccgggaagccagcctgtgccctgtgtcccctggtgggtggcaccagcaccggggggccggccacggcccggtgcctggactgtgccgatgacttgtgccaggcctgtgccgacgggcaccgctgcacccgccagacccacacccaccgcgtggtggacctggtgggctacagggccgggtggtatgatgaggaggcccgggagcgccaagcggcccagtgtccccagcaccccggggaggcactgcgcttcctgtgccagccctgctcacagt

SEQ ID NO: 126510 - DNA, 1238 bp, Homo sapiens
ctggccggtgtggacaataacctggtggagctggaggcagcgcggagggtggagaaggaggcgctagcccggctgcgggagcaggcggcccgggtggggactcaggtggaggaggcggctgagggcgtcctccgggccctgctggcccagaagcaggaggtgctggggcagctacgagcccacgtggaggctgccgaagaagctgctcgggagaggctggcggagcttgagggccgggagcaggtggccagggccgcagccgccttcgcccgccgggtactcagcctggggcgagaggccgagatcctctccctggaaggggcgatcgcacagcggctcaggcagctgcagggctgcccctgggcaccaggcccggccccctgcctgctcccacagctggagctccatcctgggctcctggacaagaactgccaccttcttcggctgtcctttgaggagcagcagccccagaaggatggtgggaaagacggagctggtacccagggaggtgaggagagccagagccggagggaggatgagccgaagactgagagacagggtggagtccagccccaggctggagatggagcccagaccccaaaagaggaaaaagcccagacaacccgagaagagggagcccagaccttggaggaggacagggcccagacaccccacgaggatggaggaccccagccccacaggggtggcagacccaacaagaagaaaaagttcaaaggcaggctcaagtcaatttcccgggagcccagcccagccctggggccgaatctggacggctctggcctcctccccagacccatcttttactgcagtttccccacgcggatgcctggagacaagcggtccccccggatcaccgggctctgtcccttcggtccccgggagatcctggtggcggatgagcagaaccgggcactgaaacgcttctccctcaacggcgactacaagggcaccgtgccggtccctgagggctgctccccttgcagcgtggccgccctgcagagcgcggtggccttctccgctagcgcacggctctatctcatcaaccccaacggcgaagtgcagtggcgcagggccctgagcctctcccaggccagccacgcggtggcggcactgcctagcggggaccgcgtggctgtcagcgtggcgggccacgtggaggtgtacaatatggaaggcagcctggccacccggttcattcctggaggcaaggccagccg

SEQ ID NO: 126511 - DNA, 1050 bp, Homo sapiens
gttgcagtaagctgacatcgcgccattgcactccagcctgggagacaagagcaaaactccaactcaaaaaaaaaaaaaaaaaaaaaacaggaagaaaatatttagggttcataatttaagaacagagaaaaatattctagcccaaagaaagggttgggatctgagacttttgaagaaaggaaggagatacagaaaagagatttcatcctggaatgaaatctccctccagagagccctgggaaagcacggtagcccccatccatcagagtggagccccttgtgggggaagtgggctcggctgggaaccctcaattcagcataagcctcacatgtcctctcctctctgtcccggtgcagacaagggcatggcccccgccctccggcatctgtacaaggagctcatggggccatggaacaaggatgagatcagcaccacagacgcgatcttcgtccagcgggatctgaagctggtccagggcttcatgccccacttcttcaggctgttccggagcacggtcaagcaagtggacttttcagaggtggagagagccagattcatcatcaatgactgggtgaagacacacacaaaaggtgagcaggcagggaaaggaaacccatttcctgggcctcaagagaaagggaatttggaaataaatccacatatcccagttgggtgcagtagttcacacctgtaatcccagcccaacactttgggaggtctaggcgagaggaaggcttgaggcctggagtttgagaccagcctggccaacataacaagacctcatctcttcaaaaaatttaaaaaccagccgggcatggtggtgcacacctgtagtcccagctacttgggaggctgaggtgggaggatcacttgagtccagcagttcaaggctgcagtgagctatgtttgcaccaccacactccagcctgggtcacagaacaagacctcatctctaaaaaacaaacaaaaaccaaatccacatatcctaaaaaatgctccttttcagcattctcttctctatggacaaagggctggatgctttaagaacc

SEQ ID NO: 126512 - DNA, 1002 bp, Homo sapiens
gcaagactttgtctccaaaaaaaggaactagacgggttcatttaaacccctgactgcagccctttgacatacatccaattgaggactggggactccgggaaacatctaaaaggcttaaaaactttgtctaacttcagccgggcatggtggctcacacctgtaatcccagcactttgggaggctaaggcaggtggatcaaaaggtcaggagtttgagacgagcctgaccaacatggtgaaaccccgtctctactaaaaatacaaaaattagccaggcatggtggcaggcgcctgtaatcccagctattcgggaggctgaggcaggagaattgcttgaaccccggagacagaggttgcagcgagccgagatcgcgccactgcactccagcctggcaatagagtgagactccatctcaaaacaacaacaacaacaacaacaaaatcgtctaacttcctgatcttcctgatcattgattttcccataggtatgatcagcaacttgcttgggaaaggagccgtggaccagctgacacggctggtgctggtgaatgccctctacttcaacggccagtggaagactcccttccccgactccagcacccaccgccgcctcttccacaaatcagacggcagcactgtctctgtgcccatgatggctcagaccaacaagttcaactatagtaagtccaagagccccttccccacagcccacagcaactgcatctcattcctggggtctcccaaggaatacccaaaatgtcaccctctgagggaggaagaccacagggaatgctcccctttaagggaggagagaccctagaatatactccagctttgacaaagatttcccaagcaggagacatcaggataatgggaacagaagacaggaggtttatcccatgaaggatgaagaagctgaaatccagagattccctcagggccacatttgtccacctgactccagggtctcatcttcgtgtgttgctagtgtgattacctgggg

SEQ ID NO: 126513 - DNA, 1021 bp, Homo sapiens
aatacagaagctgaggcgggaggaacatttgaaccggattcggaggctgcagtgagctatgattgcaccactgcgctccagtctgtgtgacagtgagaccctgtctcttacacacacacacacacacacacacatgcacacacacagagagagagaaattagaagatactgaattggcagaagagaagggaaatagaaattaaaatactgaataggggagcagtgaacaggggatacccaaaagccaagagcgagagagagcctggcttccagaaatagtggagaagccaggagaactaggtgaaaacccagtgctgggttgccatcagcgagagctggagccatttccaacgaaccatcttgtcgtcttcacagctgagttcaccacgcccgatggccattactacgacatcctggaactgccctaccacggggacaccctcagcatgttcattgctgccccttatgaaaaagaggtgcctctctctgccctcaccaacattctgagtgcccagctcatcagccactggaaaggcaacatgaccaggctgccccgcctcctggttctgcccaagtaagccaccccgctatctccccgacctaccaacccctctctcctggctccctaaagtcaccgcccccaggttgaatttcccagatctgtgatgcttgcaggacatgcatgtgtgggaggctgatgggaaactgtggcctgggtttgattatgagtcttgcaatcatccctccccctgtttctgctggagggcaggggacagctcttcctgaccacacccccacattgactatccccagaatacccagcaaaagcccccaaaaggagagtcagagaaatgagggaggtgggggcccaatcagtccacatctacttagggtcgccccatcagcacttccatccccaaccctttcaagtcaacatccaaacaaaagaaatcacttccaaggacggagcagctcaaagcgcagcttctagctggggttccaagaaagcagatttttcgaa

SEQ ID NO: 126514 - DNA, 1091 bp, Homo sapiens
caacatggtgaaaccctgtctctattaaaaatacaaaaattagccagccgtggtagcgagcgcctatgatcccagctactccggaggctgaggccagagaatcacatgaacctgggaggtggaggctgcagtgagccgagatcacgccactgcactccagcctgggggacagagcaagaatctgtttcaaaaaaaaaaaaagaaaaataggaaggaaggaaggaaaggaaaggaaagaagagagagagaaagaaagagagagagagaaagaaagaaagaaagaaagaaagaaagaaagaaagaaagaaagaaagaaagaaagaaagaaaaagaaaggaaagaaagaacgaacgaaccaggcctccctctccaaccttcacctccgtccctattctggccacttgattcgggggacacctggtaggggatggggaaaggtgggagctgccagccagaggggaccccggcttgagcagcctcttgctgctatctgcaggttctccctggagactgaagtcgacctcaggaagcccctagagaacctgggaatgaccgacatgttcagacagtttcaggctgacttcacgagtctttcaggtaagaagactttcctttgcattttctcaccccagtggactgcgggggcccctaagaggaaaaaggaacctctccttgagagcggcagctgatctaatcctgtatccacatctgtttcagaccaagagcctctccacgtcgcgcaggcgctgcagaaagtgaagatcgaggtgaacgagagtggcacggtggcctcctcatccacaggtgagtctggctcaggtgaggctccacgggtgtcgcctccatcgcccttcaggataactggtccccagacccggaaaggaccccgcagccctctcggcacagagcagctctgtctgtgctcagccatcacccactccccacctgtttctcagcctggaaaacgggcttgggaccatggaaccctgtttcctcgcctgatggctcctaagttccctgactgtgaaaaggcctcctaaagaaaaacccaagttgttcccacagtgggaagtaaacttaagaaacatgct

SEQ ID NO: 126515 - DNA, 1238 bp, Homo sapiens
accctaccctgcttcctgtcccaagaggaggctaccttctatcacccacagacagtgccgggtccccgctctgtgactcaggcagctgcgactccagacagctcactcatctgcctagatctcagtccttccacccacatccagcctgatgagctgtcccactccttctgcttctcaacccccatggttcttccaccctcaggaacagtccttttcatgggccaagtgatggaaccctgaccctggggaaagacgccttcatctgggacaaaactggagatgcatcgggaaagaagaaactccgaagaaaagaattttagtgttaatgactctttctgaaggaagagaagacatttgccttttgttaaaagatggtaaaccagatctgtctccaagaccttggcctctccttggaggacctttaggtcaaactccctagtctccacctgagaccctgggagagaagtttgaagcacaactcccttaaggtctccaaaccagacggtgacgcctgcgggaccatctggggcacctgcttccacccgtctctctgcccactcgggtctgcagacctggttcccactgaggccctttgcaggatggaactacggggcttacaggagcttttgtgtgcctggtagaaactatttctgttccagtcacattgccatcactcttgtactgcctgccaccgcggaggaggctggtgacaggccaaaggccagtggaagaaacaccctttcatctcagagtccactgtggcactggccacccctccccagtacaggggtgctgcaggtggcagagtgaatgtcccccatcatgtggcccaactctcctggcctggccatctccctccccagaaacagtgtgcatgggttattttggagtgtaggtgacttgtttactcattgaagcagatttctgcttccttttatttttataggaatagaggaagaaatgtcagatgcgtgcccagctcttcaccccccaatctcttggtggggaggggtgtacctaaatatttatcatatccttgcccttgagtgcttgttagagagaaagagaactactaaggaaaataatattatttaaactcgctcctagtgtttctttgtggtctgtgtcaccgtatctcaggaagtccagccacttgactggcacacacccctccggacatccagcgtgacggagcccacactgccaccttgtggccgcctgagaccctcgcgcccccc

SEQ ID NO: 126516 - DNA, 1047 bp, Homo sapiens
atgtttcatgatcaggaggaaagatgcaagaggaagagggaaaaaaactgatccaaggcaaggcgcggtggctcacgcctgtgatcccagcattttgggaagctgaggcaggtgggtcacttgaggccagaagttcgagaccagcctggccaacatggcaagaccctatctctacaaaatattttaaaaatgaggtgggcgtgatagcatgcacctgtagtcccagctactcaggaagctgaggcaggaggatcacttgagcccaggagtttgaggctgcagtgagctgtgatcatgccactgcactgcagcctggacgacagagcaagagaccctgtctctaacaaaataacgaaacaaaaaaactgaaaaagctgaccaatgactaaggcttggaggttgggggcagaacccaaggtgggaggcacggtcttgaaaaggaagtggctccagttgcccctccatgctcaacttagcctctccccgccctcccaggtgtgcgagctggacatcatcttcaactttgagaaggcctacttcatcctggatgagtttttgatggggggggatgtccaggacacctccaagaagagtgtgctgaaagccatcgagcaggctgacctactgcaagaggtacgggccagggacagtgaggaggaggaggaagcgcacagtggcggacagggtcctccctcccctggacacccggcctgccctgcccaccgtcgccaaggagccccccctccctgtggtatctgacccccaccacgcccagctctccagcttactctcaagccctgaccccatggggtgggaggtagggtggcagatagcccacctgtgcacccctcattccaagctctgtccttctcccaagcccccagatgtctcgtggccacccagtctcctttgtccaattctctgagcaaggcttaacaccaaagggttaagggtttgctctggagttaagggttgcttggagaattggagaaggggcacctggtaggtcattcttttcttccctgatttcttcccccacctctcttt

SEQ ID NO: 126517 - DNA, 1047 bp, Homo sapiens
cagcacaaggtggttttcgtccgtgtgagtgtgtccgtgggcgtctttgtgtgtctgcgtttctgtacatgtgtgtacgagtcagggggtgtctgggtgggatggattcgggacaacgtgcctggtgtaccccagaatcaggtacctcaagtggttttttttctgttgctttttgatgaggacgatgcttgatatgttactatgtgcgtgtggacggggaggcaggcgacttgtgtgtattgtcgagtgtgcacagcgcagcctgtgagtccctgcaaccgcgtcttgggtctctgaagtcgcattccttgagggttttggcgcccctccctccacctggtaaaaggaatgagtgagaacacttagagcacacctccattgccctgcacacatctccagcctaggtctgggtaactgctaggctaggtgtgacattgtgtttgtgtaagtgggtgtgtctccgaatctcagtgtgattctgtaggacagtgtgttatgtgtgtgacaggtggaagttgaaggaggctggttcaggatgacagaagtggttttctttctcttggtggataccaccttgatggtgtgtgtgtgtctgtgtgtgtatttgagtgtgtgtgtgtgtgtgtgtgttagtctctccagtggctctctcttcgtgtctctccccatctctgtctctttctctctctctttcttggtgactcatctctgcggcgttgccctcccccgcttgctgggtctcccctcccccactcaggagtgggtgggggtctgagggcgaatgggacctcaggactaaaaatcagggtgggcacccccttcccatcactcatcattccagaccctcccgtagcccccagcccacccctcagtcccttccccaggattccccagctctgggatggggagaggatagggcaagagtgtgttctaaatggggcaattttcagggggccttcagcatcttctgtaagttcaaagtggagaccccttcccctctcataaagtgccccctccctgcctgcccctccaccatggctgacgcag

SEQ ID NO: 126518 - DNA, 1050 bp, Homo sapiens
atgtaccatacatctcccaggcctatgtgatccggggtgataccctgcggatggagctgccccagagggatgtgttctcgggcagtgacacagacccggacatggccttctgtaagagctttcgagacaaggtgagcgcgggtgcacggtctggcctgggggcagtcccccagactccaggcatcgcctgcatcacggacacccccaccccactacagggcatcttcctccatctgagcaatcagcatgaatttggccggctcctggccacttccagatacgacacggagcacctgcaccccgacctctggcagatcttcgacaaccccgtcgtgagtggggaccccacgcccagagcacacaggttccccgccttgtgctaaggaagacaccaaacgtgatggctgctgccagcgcaggacactgagtgggagggggcggtcccctgggggctgggagcgaggggggcacagatctgatgtgccccccaccctctcacaggactggaaggagcagtacatccacgagaactacagccgggccctggaaggggaaggaatcgtggagcaggtgagcccacgcagcctccccacccaccccctgccctcatggccatcgcctcttgggggcccccgcctggattcaaagttttcacactgagttccccagagatctgagggttttctgttcagacaagatgaaggcagaggccgaacagaaaggactcttgcccccaaagccagcattgatcagacagcctcttctcctgtatattgggtatactggtgttatgcttgaaatcacatcttaaaagaagaatggggctgggctcagtggctcatgcctgtaatcccagcactttgggaggccaaggtgggtggatcggttgaggccagaagtccaagaccagcctgggcaacatagcgagaatctgtctctacaacaacaacaaaaaaattaaataagaaatgaggccaggagtggtgctcatgcttgtaatcccagtacattgagaggccgaggcaggcagatcacctgaggtcaggagtt

SEQ ID NO: 126519 - DNA, 1042 bp, Homo sapiens
ccatccagcccctcctgggcctccccattcgcatccttgcagcccccatgctgtcactcctgcccttgccagctcacccagacagcagagagcctggggaaggaaggatagacactgcctccctcctcttctcctgggggcatgggccagttaccccatccacaccgcctccccacctgccgccgtctcagctcgcctctcacctccagggacctgtgtcggcaggaccccgagtgtgagttctacttcagcctggacgccgacgctgtcctcaccaacctgcagaccctgcgtatcctcattgaggagaacaggtggcttaccccctctccccgcagccggagggcaccccaacaggccccgggaaccccactcctgccctgggcaccgggctccccaggcctgctcccgtctgcccagccctcacccccacctgtccgcaggaaggtgatcgcccccatgctgtcccgccacggcaagctgtggtccaacttctggggcgccctgagccccgatgagtactacgcccgctccgaggactacgtggagctggtgcagcggaagcgagtgtgagtcccgccagcctgcagccccccgcctcctccgacccggggcccaggtagacccaagccccctactctcaggggtttggagtggtcaccagtcagaggtgccatgaggctggctgcagtggctcacacttttgatgccaccactttgggaggctgaggtaggaggactgcttgagcctgggagtttaagatcagcctgagcaacgtagcaagagcctatctctacaaaaaacttaaaatattagctgggcacggtggtgcgtgcctgtggtcccagctactacggaggctgaggtgggagaatcacttgaacttgggaggttgaggctgcagtgagccatgtttccaccactgcactccagcctggaaacagagggagaccctttctcaagaaaataaaaaacaagggccggccgcggtggctgacgcctgtaatcccagcactttggaaggcagaggcaggtggatta

SEQ ID NO: 126520 - DNA, 1050 bp, Homo sapiens
ggtgtagtggcatgtgcccatagtctcagctacctgaaaggctgaggcaagagaatcttttgaactcaggaggcagaggttgcagtgagccgagaccacgccattgcactccagcctgggtgacagagtgagactccatctcaaaaaataaaaataaaaaaaaaaaaaaacaaggagagagagaatatgaggaggggtagggatgctgaggctcctactggcctcccgctcagctcaccctccccttcctcgcccagctgcggtgtgatcacgcaggtagtaggcagtggagctctctgggccagcagcctggtcagaacccaaaggttcctgcccacaacgagccacactccaggatagccctggtgtccctttattccctggagaatttgggaccccatatttagaagaatgtgttgcttggtagctcccagagaaagggggtctgaagcctggcctttttcttccccagatgaagtggttttaaagtttgatcggaaccgtgtgcgtatccggaacgtggcctacgacacgctccccattgtggtccatggaaacggtcccactaaggtgccaccagtggtctcaacccccgccccgccctgccccaacccccaggcacctccaacccttctgagaagctggcccttcccagcccccatatcagaggtgcctgacccccacctccacccctggaggcctcagccactcagcctcagtctgtccccaacagctgcagctcaactacctgggaaactacgtccccaatggctggactcctgagggaggctgtggcttctgcaaccaggaccggaggacactcccgggggggcaggtgaggtgggggtgccagggaggggcacgagagggcagcgtgctgagcaggaggtacaaggacagcggactggggggcggtgggggcatcgctcctgggtccctgcacctgtcagggtggaggttgggtgggggcagcagggaagtccgggcttctctctgagtccctgcgtgttgcatcttccagcctcccccccgggtgtttctggccgtgtt

SEQ ID NO: 126521 - DNA, 1567 bp, Homo sapiens
ctccctatgcaaagggactcggaattcctgggcaccactcccaccctgccctccttggggtcagagtgttcctgggtgagaagagtttaagaatgggaaggaagaaagggagggaagtcgagtgagagggaggacagcaaagcacgtgaggcccggagctgggcggtggatctcaagtgccatttccctctggtaacagagaagctgctggtgatcactgtggccacagctgaaaccgaggggtacctgcgtttcctgcgctctgcggagttcttcaactacactgtgcgggtgaggagagggaaaggcccctgggagggggtcccagcaggaggggtgggctgaagtctggatgcccaggtccccacggtaagcctggtcaggagttccccccacaactccccaccccttgcctggcacggggcaatcttctccacagaccctgggcctgggagaggagtggcgagggggtgatgtggctcgaacagttggtggaggacagaaggtccggtggttaaagaaggaaatggagaaatacgctgaccgggaggatatgatcatcatgtttgtggataggtaacggggctggggatagggagcggggtaaggatgctgaggttcccagtggacccctgcccatcctccccttcctcacccagctacgacgtgattctggccggcagccccacagagctgctgaagaagttcgtccagagtggcagccgcctgctcttctctgcagagagcttctgctggcccgagtgggggctggcggagcagtaccctgaggtgggcacggggaagcgcttcctcaattctggtggtgagtggcagagtgcccaaggcagaggggccaagagcggtgggacacagagtgttaaaggcgcctgagggctggagacagcctgggggacaggccctgggaccctgggagtctcgaggtcaacactccccctccccgccaggattcatcggttttgccaccaccatccaccaaatcgtgcgccagtggaagtacaaggatgatgacgacgaccagctgttctacacacggctctacctggacccaggactgagggtagggaaggcagaggagtgggcgcatcccgcagctctgtgggagtggaggcctcaggctgaatgggatttggggagcaaagggggttgcaaagagaaaaatgtgtgcctgggcgtggtggctcacgcctgtcatccaagacttttgggaggcttaggcaggaggattgcttgagtccaggaatttaagaccagcctggacaacatagttgagacctcatctctacaaaaaaaaagaaagaaaaaattagccaggcttcatggtgtacgcctgtaatcccagctacttgggaggctgaggtgggaccatcacttgagcccaggagtttgaggatgttttgcaccactgcattccagcctgggtgacagaatgagactctgtctctcacaaaaaaaggaaaaccatggtggctcatgcctataatcccagcactttgggaggctgaggcgggtggatcacctgagattgggagtttgagaccagcctggc

SEQ ID NO: 126522 - DNA, 1054 bp, Homo sapiens
cgggcggaagacggggagagcgagaggctggcggcgacagggagggaggaagcctaggagtccgccgcgggacggaggcctgggggaactgggagttcagctttctgcagagggccactaggaacctcggattgcccacggaagccagccactttctttgacagtccagcccacctcctcttctgcccggagaagctccaggggctgcctttgtgatcacagcatcttcacaaggaccaaaggaaaataagatttcttgtaagaacaccgtgaccacatctttaaaatgacccatttcgtggctcccacaagatttacacctccacactgaggccggaagtggttttgcccctataaaacatggcgaaaagctttcttgtctccaaggaaacgccacgtaatgagtcaaagctgtggcgcacgcgcagaagtacaagctaccggaagtgatggcgcccctactaaagccttggggttagtacgcgtgcgcagcagtttcttccgacagttgtgttgtgccaatggtggagaagaaaacttcgggtatgtgagcccccgcggttcgcccccttccccttcccaagtcagtcctagaattttcttacctagtcattcctcttttttggtctcgctctttcgcctaggctggagtgcagtggcatagtcatagctcactgcagcctcgatttcctgggatcaaaccatcctcccacctcagcctccggagtggctggaactgcaagcatgaggccccacgcctggttaatttttaatttgttatgtggtgacgggctctcgctatgttgcccaggttggtctccaactcttggcctcaaagcgatcctcctgcgtgggccttccaaagtgctgggattacaggcgtgagctgccgcgcccggccccagctattcctcgtaaatcccttcctcagccctcgggtcctggcgttgacccttcattcacgttttattggtgcctgctccaagccgggcgctggggatgaagaggagaaagacccctcttatccaagcattggctttttctggaagggggg

SEQ ID NO: 126523 - DNA, 1052 bp, Homo sapiens
gaggcaatgggtacagaaatgttctgcaaattgaaaagcaatggccagatggcattgtttttgttttttgctgagacgggttctcactatgctgcccaggctagtctggaactcctgggctcaaggcagttctcctgccttggccattttttttttgacagtctcactctttcacccaggctggaatgcagtggcacaatcttggcttactacaacttctgcctcccaggttcaggtgattctcctgcctcagcctccaagtcagtgggactacaggtgcctgccaccacgcctggctaattttttttttttttttttttttttttttttggtatttttagtagagacagggtttcaccatgttggccaggctggttttgaactcctgacctcaagtaatccacccacctcagcctaccaaagtgctgggattacaggcatgagccaccatgccccgtggtatggcactgtggacgtgcactgtgtgtgtgcgccatagcgtgcaccctaactctgctccccagctaggatgtaagctcccggaggcagccgctcactcttatcttcgaagtccctcccacacctggccgtggccagcccctactgggagctcaagaaacactgccgatgggctgatttgcagccaggagatctggggagtacagatgaggcaggggtgagcaggtgtccatgcagcagggtaggggaggtgagcatgaggagtgggaattggagaggagattagatgaggacaaagcagcctgaagtctgcggttgagggggacccccgccccatcaccttcccccagttaccggccagaatgtggagggcccctgcggtggccgccagcttggctttcctggagagctccaggcccccaatgttggtgcagcgcaggcccgctatgcctagcaagaggccgaggaagcccaggaggatggcggtgatcatgagtgcccggcaggcctgaatataccctgggggtgggcacagttgtcagcctttcccatctcccctctgcgacggagccagcccaacagcccctcaccat

SEQ ID NO: 126524 - DNA, 1614 bp, Homo sapiens
gcaggagaatcgcttgaacccaggaggcgaaggttgcagtgagccgagatcacgccattgcaccgcagcctgggcgacgagtgaaactccgtctgaaaaaaaataccacagcagatgccaaaactgagtcacgctgcctttggcttctccagggccccgatttcctcatttcagttggatggaccagttgactgtaatactgataaaaggcatgttctgtcactggggtgttggcacagctggggttcaccctgtcccagagctctggctagggtgctgggagtgactggagctgaaagggaggcttaggactgtgaccctcccaggatcacagaggcattcagagagtggaaggggcctctgggacacagtattaggaaagtattaggaaagaagcatttctcaccctcttctctgcccctccccagagctgctgcccaaagggagcaaggaggaacagcgggattacgtcttctacctggccgtggggaactaccggctcaaggtgaggtggggaccccgttcccttcaccctcctctggggctgcaggaccttcttactgtgtcctccagggtggagccctggacagcgggaaggctgaaggggtgcagaggtgcagagcggtgtcagatgaggactccgagggaagatcagagtggcgagggggtggggaggaaggtgacgtcaagagactgggtgcaggcccaagccttgcgctgttatctcccgcagagttggggttgtttgtggactctactccgtggggtggggctggagggagggagtgggtggaggtcgagggaggagcccccagggctgaagaagggaaggcccttcacgtgggcagggggagtggtggatactgaggtgtagccggcccagtggctcacgcctgtaatcccggctactcaggaggctgaggcgggaggactgcttgagcctgggagtttgaggttgcagtgggctgtgattgcgacgctgccgtccagcgtgggcaacagagcaagaccccgtctcttattaaaaaacaaacaaacaaaaaaacactgcggtgtgtatgacgcgtgcgcgtttccccgagcgcaggaatacgagaaggccttaaagtacgtccgcgggttgctgcagacagagccccagaacaaccaggccaaggaactggagcggctcattgacaaggccatgaagaaaggtgacagcctcggcccctttgttcagccccgctcttccccacgcctgggcactttggtctctctgtaaatgaacccctccaggcagcccctcagccccaccccttccagttcttagagccccttgccctgcgactccaggtaggggtgtgcctctgttgaggggcagggctggcggaaggggacggtcagggtttccgcaggggccgggctcctgacactgtccctttccttccccagatggactcgtgggcatggccatcgtgggaggcatggccctgggtgtggcgggactggccggactcatcggacttgctgtgtccaagtccaaatcctgaaggagacgcgggagcccacggagaacgctccaggagggcctgtccatcctcgctgtcctttccctgttctccccctgccccccgt

SEQ ID NO: 126525 - DNA, 1489 bp, Homo sapiens
tccagcgatcttcccgccgcggcctcccaagttgttgggcttcggacgtgagctacgcgccgggctcccggttctagttaagattttgttgcaggcgatgaatagtcacgtggcctccaaggtcctagatttctgaggggcgtcagcttggcaccctaatgtactgtgatctctggtcagctacccaccctctttttgctgttttcatcctgggggctaaccgccaagacatggcctccagtttccctagggaagcctccacagaggaaggcaccggctgaggcacctgggaagaccaacctggggaaggtctccctgcgcgcagtctgcgggctggagggaccggccgagcctgcgcactagcgccccgccggcgctgctgaactgagaggaaggggcggggcgtcgccaggtcgtgccagcatccgccggacgccggaagtggttctccgcccctgccactgggccatggagactgtggcacagtagactgtagtgtgaggctcgcgggggcagtggccatggaggccgtgctgaacgagctggtgtctgtggaggacctgctggtgaggcctggcccggacagagggaaagggaaggtcggagggcgggtcctgaggagagtcaggtaggggccgaaccctcctcccggcatcggcttggccgagggaagccgaactacggctcccggcagcctccacagcgcctggctcctgcccggagggcctgctatgccgcagaggctcctgggagttgtagtgtcctgagccccccacacctcagactacgggcctggagcccgaccgtggttagactgacgggatctgggatcatgcaggagctgtgagctcagggcgctcctccagcggtggaggaatacagtgaccatcataaggtgtcacctattactgcgtccggcacggtgctaaggcatcgcatgccagatctcagtctttgtagctctaggaggtaggcactacttctattcctggacaataaaaggtccaggcccggcagggtggggcaggatggggccagcagcctcaaatgaggaccgcgtgggctgttgagcagttctgacagcgtgtttactgttcggccgccggggtcagctgctccgggagcggtgcctggagctgccaccaggtggcatctccgctcggtaccgccgcggggaggggagaccgggggcctctgtcccaagagctggcccgcaggcccggaggagccgaaagcctgggtcccgggcatggagatagcagaagctggggtgccagataccgagacctgcgagggaaaggggcagagccagggagatggcatgtccagatagagaatggttgacgccctacatttctaaatgattcctttcctcccctgtggcagaagtttgaaaagaaatttcagtctgagaaggcagcaggctcggtgtccaagagcacgcagtttgagtacgcctggtgcctggtgcggagcaagtacaatgatg

SEQ ID NO: 126526 - DNA, 1003 bp, Homo sapiens
gcatgcgccaccatgtctggctaatttttgtatttgtagtagagacggggtttcaccatgttggccaggctcatctcgaactcctgacttcaggtgatctgcctgccttggcctcccaaagtgctgggattacaggcgtgagccaccgcacccagccaattttttgagacagggtcttgctctgttgcccaggctggagtatagtgacgcgatcatggctcactgcagcctctacctcctgggttcaagtgatcctccaacctcagcctcctgagtaactaggactatgggcacgcaccaccacaacccagctaattttttaatatttttatagagatgggggtgggtctcactatgttgtccagggtggccttgaactcctggcctcaaaatgatcctcctgccttggcctcccaaagcactggggttacaggtatgagccaccaccatgcccagctcacagtaacatgtaaatgtccagctactactgtgtggccttgagtgggtcactgtacttcttggtgcctcagttttcccaactgtaaaatgggatcagtaatagtatctatctcatctgttgttaggaggattaagttaatcaatagggacaatgagcttagattagagcctggcacctagaagtgccatcattgtgtctcctgtgttgtgtttggtcactagacaagcacgggaggaggcatggcttgggagcttgacactccctggttcaaatccaggctccaccactgcctcgctgtgtggctttgggcaagttacttaacctctctgagccttagtggccagttttggcaaacggggataataaagcatggtctcttggggtcgctgtgaagcttacatgcgctgtgggggaagagagcacctccactgtggccagcacatagtaggtgctcagcaaagctccactcctcctccccgccccacacccctacagtgaggcttgggcatcaaggaagcgcctgactccttggccctagaggca

SEQ ID NO: 126527 - DNA, 3035 bp, Homo sapiens
ccgggtgcccgggcagtgtacgctgcctccccgccgccggtccgagccgcgatcgccgcgcgcctgggggctccggcggcccccggtgacctgcggcgccgggtcccttccttgcgtcccctcggggcttctgccctctctgcagggcccgccatggagcgcgcggcgggtgcgctcggagatgccttctcgggccgggttctcgaaagcagagccccgggggcccgttgggaccgtggcatgccgggcggtggtccgcgcgcggagtccccggcgccgcggggggaccgtgccggggctccccggcccgcgcccgagtcgccgccgtgcccaaggggcgagtgcctgcctgccaccccccgcccggaggagcggcgcacccttagggtccgccccgcacgtgccagctcggcgcccgcggcgccgggacagccccgggactctgccaggtggatgttgtgcgtagccggagccaggttgaaggtgagcggcgtgtgggccagaagtcccgaggttgcaggcgcggagggaaccggggatgtcggggggtgcccgggtcccgcggcttagaatgctctagggcggcctggtgctctgggaggggataggagggttcctcagggcccctggggaactgcagctactcccaactgctaaggtgtgcgtgaagataaacttggctgaactttcctaacctggaggactggtgacagtgacctaccgcaatacctttgggagcaaagctcgagatgcaggcttgtatcaaacgaagcgggttggattaaaacatatttaaatggaatctgacaactttaattgtatatgcttgttttctgctcttgcctactaagaacgataaagccgagtcatagtcgttatgaaatttcctgaaatttctcgcttaactaggaagaagactatgcgaaatatgtatttccgataagattaaaacttaaaggagtttaagtatttattgactaaaatagattactccaaagtgtctattgtgtaaattagattcctggatgtaatgaacacagccgaatggcatttttgataaattggtctaccctgttttagtaaaaatagctcccttttaccataatttaattcctgtgcttactgtaaaacccgttgtggagttttaaggacaaacattattattatttttctctcttgtcttcctaaatgtgacatcctagcttaatatcaatgaagtgtcttttttaaagcatcctggcaaaattgcctggaaaatggatttggtttctagagttactagattttaagaactctaaaccttcctgtcccccatattagctacttcttcaggggatcagggctccagggttccatcgaaagtttccatgtcagtttacttgcactttatgtggatattaagaagaaatcaaaaccaaaccccaaaacaaagtcccttatttgaacttcattcctctttactcctttgcttttggtggttgctaacgatttggccttagatgatttcctatgggtttgcaaactttagtcgaatacggaatgtcaaagttcaagtctcaggccaatctggttctttctctgggcggtgaggaggcctttggagttggtgtctggttaattcccaccgatagtcagtgagtcaatagaacgagtttgggagagaattcattagttccagatttttctcatttttccagacctctttatactgagattgggttgccacctgggggtaaagaggctgatcggtctttgcagagagaaatccaggttggagacgtcagcgggtccaggtgaggttgggccgttccgcagttctgcaaccctggctcactgggttcttgtccctcggcttcctgggtcttgaagctgctgccttggcacaggagtgtgtgctcaggaagagaatttctgaagattgtgttttattccgtttcctttttagtcccaaaggcttgtggtatggaagtttcagtgctttggtattgctaagactagttggacaagttttttatcctatctcagacttgtaaaaaccaggttttcttttctttttaaataagaaaagcactgttgtataaatttgtcttttaaatacatatttgaaaggaggacactttctaagacaaagctcatggcactctgtatgttagtggagctttgaactctttgggacggggcccgccaatgactgccttccctttgggacattattcccacatggtgaccagccttcccctttaagcagcttctgcaaaagtaaacttgaaaagttgccttctttttcagaatcaaaaaacaatttcagttttgctgaaagtccattttctgatggctttttttccccctgttgtggaagtgtgtatgttactggctgtccagtactgtttgccataataagtatattattttaattaaaatgtcccatctagtaccctttataaaagagcagttcaagaaattacaccactgctgctcctgcttttgttttcttggttcttttaatatgggtgtctttgaggttggatgtgggaaggggtcattggcagttgatttaagttttttcctatgtgaaactctttttttccttaaaggtgcaagtggtgagttaatgcaacaactcctggtacagttgagtccacagagagccctttgactacatcctcggcttcgtgtatcttctgtcggtagttagccaacctaagaaagctgaaagggccaaatagtccaataccttcaggaatgattctctcctaaatccactgagctaaccttaaaaatgcagtctggtgaactgtgctgagcctgaaacctttaatggctatttaaaaagtctcctgtttttgtacaattaagacaaacccatcagggtttatatgggagctgtgaaggaacagtagtttgtgctctctgattcccttctgggtctacctgtagcagtaaacaatcaaaaccactcctgaggctgtactcactttctgtgtcttaggagagaacacaagactagaagtagaaaatccacatttgtttcagct

SEQ ID NO: 126528 - DNA, 1011 bp, Homo sapiens
ggtttatcaaacacaagtggggcgacaggacccacacttcggcgttggacgtgactcacgcggggagttggcttggagttcctttattcatccctatttgctttctgtctgtaatcctttgtaattccctggtttcatgatgtaattctaatggaaataaacccgaacctttcaaaattatgtaattaattgcattcagcttcaatgacaatgactaattatagtgatacctggtggcaaggcaggtacctactgctggggggctcctgtctgcttggtactaggactgccacttctgggcgcgtcggagcggctgcacagggggtcagctggctgtcctgtggcctgctccggtgcctctggtccccatcttaccaggagcagcgccatggccatgcagggaggggccggagagggaggtggtgtgcagggaggagctgcttaggggtgggagggcttggacttgtctgcaggttaaagagaagtcttgctgggaaagtaacttcggggctggttccctgagagcattcttatctgattcatgtattttcctgagaaaaagggaggagggtgcgttcgactgaacgtgaagcgttcaaggatcggaaaggcaagccaggtacagtggcttacacctgtaataccaacactttgggaggctgaggcaggaggatcacttgagagcccaggagttcaagaccagcctgggcagcacagtgagaccccatctctacagaaaaaaaaaaagaaaagaaaagaaattagcccagcatggtggctcacacctgtgataccaatactttaggaggtcaaggcggaaggattgcttgagcccagttgttcaagaccagcatgggcaacagtgagaccctgtctctacagaaaaaaaaaaaagaaagaaattagctgagcgtgatggtgcacacctgtgatcctggctgctcaggaggctgaggcaggaggatcgcttgagcccaggagttggaagctgcagtgacgtatgacagtgcc

SEQ ID NO: 126529 - DNA, 1039 bp, Homo sapiens
tctgatgtcttatttttttcttttattctagggagttctcatacatttatctctccaaatattttctctcctctctttattttttcttctttctaggacacccactgtacaggtgtcaacccttcttctgttgtccatctctctctctctctctttttgaaatggagatggggtctcactatgttgcccactctggtctcaaactcctgggctcaagcagtcctcctgcctcagccttccataatgctggaattacatgtgcgagcccccatgcctgacctgttctctgtatctcttaacattagcctcattctcaaacatgaagagagtagccttggtgtagactggccacgaattggcgattgttgagatgggcgattggtagtgagggtacccatgaattggcgattgttgagacaggcgatgggtggtgaggtactgtttgtatgtatttgaaatactgtctgtgtatagctccagttgaattacctcctactgagacccactggccttagcctgtggtgtggggatgaaagtggggagggaatagaggaggaggctggctagataggcttggggctggctgccaggacagttaacatgacttacatggcacatcgtacatttctatggaacagtgctgttccgatttagccccttgctaggcaaagtgattcatgaaccagcaacagtggtatcacctgggagctcgttagaaatgcaggatctggccgagcacagaggcttatgcctataatccccgcactttgggaggctgaggccggaggaccacttgagttcaagaccagcctggccaacgtggtaaaaccccatctctactaaaaatacaaaattagccagatgcagtggcacatgcatgtaatcccagctacttgggaggctgaggcaggggaatcgcttgaccccaggagtcggagatttcagtgagccgagattgcaccactgcactccagcctgggtgacaaagggagactccatctaaaaaaaaaaaagaaaaaatgcaggctctcaggcccca

SEQ ID NO: 126530 - DNA, 1021 bp, Homo sapiens
tagacctcattccacccctttagtggggacccaccgcgcgctggccgcaagcctattttaatttgtaacaattctgcttgatgacaggaagacgtcaaaaaggagaaatcaggctaactggggctccttgtccacttggggggcatgtctcagtgtcttgcctggggccttgtacacaccctctcttaccgggagtaaagtgaggtttagaaagattacctttgtcctgggtcattcttccttaaatcacagctaggatgcaaacccagacctctctgatgtcagtttgcaagctctttcaggtaccgtcagccacatgccaggccttcagtggggtgatgttttttgttgtttttagaaaatactgctattcactcatgggaaatagggacgagggcttagatttcagctgctttgcattagacaatgatttctcttattataagcagagctctctattaaccaaaaacacttggctgttagacatggtgtttaattgctgttagaatgtatttttgtcacactgccctataataagccaaagaactgtttgtgccaaacagtgaagggaagctaggggaggatgaaaactgtgcctgctactccacctcccttctttcgaggtcgtggtgttttgtttgctgttttagctgtggtgtgtgtgtaccactcgtacctttcacaggaggacacctcatctgaataccagtcaggacctgagacgcgttgagcccctccccacagtgcccacgggtaggtgcgccgctctctgccccttccgggagctctgctttttctacctttagagatttctttcatcctctattacgtaggcctgactttttgcctaataaaggaaaaacaaccatctatttagcactctttttttttttcccaaaatggaaatgactttctctctgatttttacaaagcaaaaaatgagagtaaagattaagaaactacaagaaattatggtgaagggagtaaagatggccatgaatcctatgactgccgatggttt

SEQ ID NO: 126531 - DNA, 1006 bp, Homo sapiens
caccgcagggagcgcagatgtacttggagtggggaatggttgggggggacccattcccctgctttaaaccgcaaatgtcttttgatatctagtaaaattggcaagcagaatgattgaaaacatgtgagaggtaactggatctaagtctcaagtagtacatatttgagaagttttccccaatgtaaaagtcactctttaagagccttaaactaataaaaacaaggaaattccatgttacggctgccactcggccttttcatttttattccagaagtcagatctgacaggtcagcagctcactggctctgggctccccgtgtttaaagcagtggggacgaggagaagaactggcagccgccgggacggggaagtctccaatgccattcagtgccaggctcgtaattccctcttagtttatcctattttctcttcttggggcggcttcctgtatgtactttattcactgaagctgcttcaggattccttcagagactattcttgtttctttccatttctgtgtctttttttttttttttttttttttgagacagagtcttgccctgtggcctgggctggagtgcagcggcgcgaccttggctcactgcaacctccgcctcccgggttcaagtgattctcctgcgtcagcctcctgagtagctgggattacaggcacgcaccaccacacctggctaatatttatatttttagtagagacagggttttgccatgttggccaggccagtctcgaactcctgaccacaggtgatctgcctgcttcggccccccacagtgctgggattacaaagcataagccaccgcacccggctaatttcctttatagttacactagcttggaagaataacatactgagtggcgtggaaggcgttggtgcacataggtgcagcatcccagagccccgtccactggcggctatttgtgcatggctgcctgtggcttcttatctgtgatggaacctcgtgggcagagaagtggctggagagcatc

SEQ ID NO: 126532 - DNA, 1016 bp, Homo sapiens
gatgccaccgcaacggtattggcgaaccggcaggatgaaagtgagcagtccagaaagcggcttatcgaacagagccgggagttcaagaagaacactccagaggtgaggcgcgtgaccatcgtgttcgctttgaagggatcttagaatgctggtgcatgttcaggcgacgctccgtgagcgtttcattttcatcagatgaacgcacggccggcaaacaacccgtttctttccccagatgtcttcagccccatttccagcagaacgcatgccatcctgcaggctgtggggatgtggaaattgataggttgtctggaaatatgaaagtcagagccaattccaggtgcagatactggacaagcttggtctgtaagaacacgtgggcaggtgtgtgggtgtctcagaccctcgagctcatcccagaccctgtcccatgtcagttagcaagccaccaaagtccataagggatcctgtggggtggaaggtccgcggggcctgcttccctgttgctggtgcaggcggagtgtctgaaggctgcacgcatctgggcatagcagtgcgcctaacgcttcttgtaaaacagacatttcgcctgctaggccttttaaatgcctctctgtttcttgaaatatgccgtaaagggcaatggaaatgtgctttttatatactcctgttttttctctcgtgagtgtgcaatcgggggacagtgttgagttgctggggtggcgtttttctgctcgtttcctggccccttcttccttcccttcaaccctatcaggggcttactaagaaaaaaaaaaaaacatccaagcgtgttgcaggcagatgagcagtcgcgggaatggctttccgggtgacatctgccagtttggtccccatggcgctcatcccgcgggctcggaccccagcctctcttacatcttccccttgtatgggaaggggtcgcagcagcccacagcttcggcccggcttccgggcttggggaatcttctccgtatcgtagctcttggctcctccat

SEQ ID NO: 126533 - DNA, 1091 bp, Homo sapiens
gcggaaagtccaagacgagacccacttcacttgtgccagcagccagagcttcctgctggtaactttttttttattttttgagacagagtcttgccctcaggttggaggaccacccaatcgctcaggttggagtgcagtgtcacaatctcggctcactgcaacctccgcctcctgggttcaagtgattctcctgcttcagcctcccaagtagctgggattacaggcacatgccaccaccacacccagctaatttttgtatttttagtagatttcactatgttggccaggctggtctcgaactcctgacctcaggtgatccgcccacctcggcctcccaaagtgctgggattacaggcatgagccaccgcgcccagccctcctgctggaaatgttgaaaccacataagaccagaacagtggtgggagtcgggggctgtggccggagtgtgctgggtgtgcaggaggcggagttccctgctgttccctgtgacagcaggtgtgtgtgtgtggggggggagctgtgacagtacgtgtgtgtgtagatagcacatgtgtggagcctcagctcagtgcctggcctgtgtcccaaggggacactgggtcaccgtttgtttggggtctcagtcttgaggagccaccactgccctgacactggttgctcctctggccacaccgcaggattgattactaaccgtggaggtgacgtcgggttgttgcatgtgtagaaacgaggcttgcttagagctttcgcccgttgggtaggacagcctggcttaccgggaggagggtatcctcttccctatggatgcagcccacgatccccatggcaacataccttccagggcacagcgtggcagagccagggctggtggtgttcctgctggtgtgacaccaagggtgttgatcttgatggaaacgcccacgtctctctttgttctgggaaagaaggaaaggtttcctggtgtctgatgaatgtctaatgtgttccacagggaggattaggcacccgcgagggttcagtggggagtaaagtttgtctgccatcggagatttcaccttctagactggcccttcccagatgtcactgggaaa

SEQ ID NO: 126534 - DNA, 1065 bp, Homo sapiens
tgtctcctctaaaacagaccccgttgctctgggaggagagccgagctgcggctcaggggccgtcactggtcatttttgccctgatgtatttttgcctctacatttcttgatctctggaacgttaatcccaacgatgcctggtctgcggtgctcacagtctgtgtctgtgctttctacacctgtcctgctcagatgcacatgatgtcacacccaggtctccatcctggctcttgttggctgcggcggcagccctgactgtcggagacgcctggctcagcatgcccaccttgcaacagggagcaccctgtgctgctcacagaactgcccatccactttcttttcctttcctgggtgccaacatcttcctctgccccttctacgccggcctggcgcatttctctgatttctgtgttcccgggtagcagttgtaaaaattcaggcttgggagttgtcttgagataggacttggaaaggaatcttttaccatcgttgaaattggctagatttgtggattccttcccgaccctggcaggcacggtgaggggaggaggtccctcctttttattgatcaggatgcactgtgtgcggggtaagccaggaagccacgcacctgatgctatctctgccatggggaggaggacagaggatgggaagatgctgtgaacttttatgattcgtttttcactctcggtgagaaaaggagctagcaggatgggtgagggagtggagggtagtaatatatagttgtggcctgggcccaaacgcatttagtcactgcctcgacagcctttatatagacaccaccagagtgactcagcctggaaaaagagagtcacttaaaaataaagttgcgactccagtggacacgtggtgcacaggctgccctgagatagtcaccagggctccatggccctgcacaccccccaggaccctgggcgagtcaggtggtgaagtgagggtgatcgttgtaaccccatcttggcattgacgtgaggatttagcaaagtcacatatcatcccaattacttttttccttttttttttttttctttttggagacagggt

SEQ ID NO: 126535 - DNA, 1119 bp, Homo sapiens
atttaaatgattgctttgccgccatcaagaaaaaatactgtttcacttaacagtgaattgagacaaggaaaagtgatgtgtgaatagaaataaagaaattaaagtaaaaaacaggatcagggtaggttctagggctaataatttaagaacagaacatgtggtttaactctttttgccactctaaggagaggtgatatttgtatttttctttttactgaaaccagatcgtgagacacgcttttcattcatacttgaaacttgataaaatgtttggctttatattaattttctcaattataagtgtgggaaatgaattcgttgataacccttttcaagtaaatgaactgattagaaccagaagagccgagagtcatttttattttaaaattctttttgcatgaacacatgtagtgttgaggaatatgtggaaaattgaaatattgcttctctcctaccgtgtctccagtgcctcgataaatcaccttttttttttccttttaaaatgtctggccttataatttatgtttgcataacccattactaaattcatagtaggtgttttagttggcaggcattattccagggatttggaggagtttaaaaaaaatacagagcctttgttagtatttatactaagtggacattttccttttttaacaacaacaacaaaaaagaattagatttttaaaaaagaattcagagctagctatttacctttttcctagacaaacactattaagtccatattctcacattattcattgtcttaatggagattaagatttcttaatggactttattatagcttttctttctttttttcaaaattagaactggccgaagaaaatgcttctactattaagatcagatgaatttctacagaattttcagtaggtgtcatgttgtataggaaataaacatttctgttttagtaggttttcgatttcttacctcccgttgaccgttttgatcataaagtgaagatgaatacattcattcatttactgcagtctttggtacttgaacagaaatagcagtgttcttggtttgttcgcatacttgtggcttacctttgagactttctaatttttaaccagacatttaaaaatagccattctg

SEQ ID NO: 126536 - DNA, 1047 bp, Homo sapiens
gtctgcctcgtttcaggctgggatcacagatcaggagcgaaggctttatgatattaactagtcaacagatacattctttgaagaatttctgtgtttttaattaccccacgaaagcctttggacgcacgggttatgaggggcattttgcattgctaaattccagccttgattgcaaacctgaaaagagcagaaactgctcagaacaagttgttaaaaccacagacacaagggaaaggtttctctctctccctccccctctctctgtccctgtttttaagtcctttcagctggaggtgaaactgcaacgttatcaaacatgccagtacacactgtttcccaggcctgtttttgcatgagttggggtagaaatgtacccagcttctgttccagtaggtggagaaagatgcttaaatcctagaagcactgttcacctacctttttagggtactgcaggtttagctcgagggttggagggcatccagaaaagcatgactaagagagaaaaagactactcccaaagctaacagggtggagtatcatagccaggacaggaaaattcccagcagggaaacggcctgtctgtaatgcagacacattgggtcataggtttgctttcacagaataagtgaaatggaacaaaagtcttttttgaattctcattccaagaggcccagtttctgcaggtgtgtcttttcgatcttaccttgtattcagtattatttcaagcaatctccattttaggcagtgtctactccagaccaaaaaacctggctaagaaagaaattttgttgattttgagacagggtctttctctgtcgcccaggctggagtgcagtggtgtggtctcagctcactgcagcttcaacctcctgggcttcagcgatcctcccacctcagcctccctagcagctgagaccacagatgcctgccaccacacccggtgaatctttaaattatttgtagagacagggtttccctgtgttgccccaggctggtctcaaaccactcctgggctcaagtgatccccctgcgtcgacctcccaaagt

SEQ ID NO: 126537 - DNA, 1054 bp, Homo sapiens
ggcaacatagtgagtgagaccctgtcttgacaaaaaattaaagaattagccaagtgtggtgacatgtgcctgtagtctcagccacttgggaggctgaggcaggaggattgcttgcacccaggagctcgaggctgcagtgagccgtgatcatgccactgcactccagcctgagcaagagcgagactccgtctcaaaaaaacaaaaaccgaaaaaaccacctcactattctaggcccgagcccgagcttaaatatttaccccatatccaaccataagttaatcccgcacacaccttcatcagtttcttaaagaaactggtgccccagcacggggcatgccaacgtattagacaggcaacaacttagacatggggatgaaatgaattccatcttaaatctcaaagtgcacaatacagtctctaaaattaaagaaaagaaagatttatttccaaaaaagcccacagtgaaataattgtctcagtctgtggagagagctaatttggacagaatcacatattttgattcctgggatttttttaaaaggaatcttttaaagcagtaaatgaaatatttttggatgtagacaaaaatgacttacttagccattccactggcaatgtggaaaggatgaagaccaattttgagttagcaaggacaccttcagaaagttcagctcccaggaattgttgaccctagccatccatgtctgtatttcctgaggactattgcttacggaattaattgggactaatttctgttgcacctgatctccagccaaaacactcacattttgcctcatctgcagagacctgggctgagttttatctctgcgtcactgccgagttccctgcccccgctctgttaacagagctataattaactcacaggacgccaggcagccagattcggccaggcgccaagaaatcagccccaattactatattcacattgtcagtaatgcccacttcacagcttctgctaatttgaaatggcaagttccaactttccatagtaaaattaccatttttgtcctattctattacgtggtgatatttg

SEQ ID NO: 126538 - DNA, 1049 bp, Homo sapiens
aaagtcgagcctttaaaataagggctagccttggaacgttgcctgctttgtagatttccagtgttcaagttgtctgatttctttataaagatggagaagtgtctctgtccctctgggtctccgagttcccttgagtctgggcctctgtatctggatcccctcaagccctactttgttgtaagagccaaattagccaggggctactggttggtggctctgctgggggggcatcacagagtctctcttctctgacatttgctgaccttcaacccgccctggtacaggagcaccccattgaggtcctccgttttccagagtcctgtccctgaggaatcacctgcctgagtccctgagcttgggactggctggcctgattgggttgtacattttgttctcttttcagcagagaaatctcaggaggcaccatgccaggccactgtgcccctgcaagtgtgtctgagtatggcccaggaccctgcccatcactggtctgcaacaagataagcacagaagttcagagtaggtgtctagaaatgttcatagcaatttaacgtgacggtgacatccaagtggcattttaattttattttataaagatctgagtccacaatgggctggaaatgtaaaaatctgttgtgtgttcttctcccacagattgtttgacaaacattggtcattattattattattattattttgagacagagtctcactctgtcgcccaggctggagtgcagtagtgcgatctcagctcactgcaagctccacctcctgggttcacgccattctcctgcctcagcctcccgagtagctgggactacaggcgcccgccaccacgcctggctaattttttgtattttcagtagagacgggtttcaccgtgttagccaggatagtctcgatctcctgacctcgtgatccgcccgcctaggcctcccaaaatgccgggattacaggtataagccaccgcacccagccaaacattggtcattatttaatctcctcatctctgattggatttcactgtgatcatttactgtggctaaggc

SEQ ID NO: 126539 - DNA, 1244 bp, Homo sapiens
gcatcacaggacctggggacttgttagaattgcagattctgaccaggcgtagtggctcacacctataatcccaatactttgagaggccaaggtggaaggattgtttgaggagttcaagaccagcctgggcaacatagcgagaccccgtctctacaaaaaaaaatacaaaaattagctaggcgtggtagcatatgcctgtattcccagctactcagtagacttgaggattgcttgagacctggaaggttggagctgcagtgagccgtgattgcgccactgcactccagcctgggtgacagagcgagaccctgtttcagtaataaataaattaaaagtacagattctcgggtctactccagacctgctgaatcagaaaatacgcgggcaggcccagccgcctgtgccttcaccagctctcctggttaaggcctgagaaccctgctacggaaccccgagtacctttcagaacatgttgacctcattcgcagggatcagtggccctttgtcatctggtctctggccagtgtccctccctcatctggtggacttggtactgatgccgaaccacctgtgggttccaaacgtgccattgtttctcccacccacgcatttgcacaaatgtggtcctgtgtggctcactcccttttctgccgccaccttctcccccactgcgccatgctggtctcagctcggggcttacctggtcccagaggtgtgttgggaggtccccaccccttgcctctgcccgttgccttttccacccctgcactgggtgtgcataggtgcgcagggcacgtgtgtgtcctctgcggtcactgacttgattgtctgcctttcccaggaggacatgggctctgtcgggacattttatccgtctgtttacaacatgaaatagacacctccgaaatgtgtgtgtgttccgtaaatgaaggagcagagggaccccttcggagcatctcagaggccaggaagcctggcttctggccgccctgcccgctcctcacgtgtgaggggaactggggaagtcgagtcagcccgctggggttcctgattctctgcggttctgggaagagcttgcagtggaaggcctcccagccatttcctcttctcccccaactgtgactcactgattgattaatgtttggaaattgtgactcatcttgttagagaaggaaaaggaaattttattctcttcattctccctccctttcaaataagtaataaataaaaagtggctgatcttc

SEQ ID NO: 126540 - DNA, 1061 bp, Homo sapiens
ggctcacgcctataatcccagcactttgggaggccgaagcgggcagtgcgggttgagtgcgggagtttgagaccagccagagcaacatagcgagaccctgtctctacacaaaatacaaattgtttgctgggcatggtggtgtgcaccagtagtcccagctatctgggaggccaaggcgggaggatcgcttgagccagggaggtcgaggttgtggtgggctgtgatcacaccactgcattccagcctaggtgacacagtgagaccctgtctcaaacagaaaaaaagaaatgtggccaaagctttatgaacaataatgttaattatagtgttattgatatactaaaaacaggtgggagggaacaaggctagtgtccaatatagaggaacggctaaatgatgctaaaaatcattcattcaaattattatgtaactgatattgtttcccaagaatatttactaacacagaaaagatcatgatatcacctaaagtaagaattaaagatgctgtatcaccctagtttaatgaaagaaaaatgttcaaaaatataaagacaagatgaatatatagacatacagcacaatagatgcaaatacctgcacatcacacaagggctggtgaacatgaggacactggattcttccaggcctttttctaagtcttagcagggattatttttggttggtgtgagattggcttttttctttgttatgcttttctgtgttttgcagattttctccatagagaatgttacttttttttaggcagggaacggtggctcacgcctgtaatcccagcactttgggaggctgaggcaggcagatcacctgaggtcaggagttcgagaccagcctggccaacttggtgaaacaccgtctctactaaaaatacaataaaaattatagccaggtgtggtggcaggcgcctgtagtcctagctagtagggaggctgaggcaggagaatcatttgaacctgggaggtggaggttgcagtgagctgagatcacgccactgcactccagcctgggcaacagagtgagattccatctcttaaaaaataaaa

SEQ ID NO: 126541 - DNA, 1447 bp, Homo sapiens
tgtgtgtgtgcaagagagcgtggctaagacaagggtattcacctggcatcctcattcccaagttgccaatactcctctccccttttttcttaactcaccacctgggaagttttcctatttctctccctcctatcccagataagaagaattgccttctttcctcccagctgatttgcttttctcgtcattatatggcaaaccaggctgcactcccctcctaaggcaggcggtggttctctttgggctctgagtcctcagtgttctgcctcttcgggtgccaaccaggaaagccgccttccgcttttagagcaacgtgaagaaatcatggcagcccacgtaagatctctcattatttctgttgaaactgattctatcgagggtggagtgcattgcctttaatttctttgtttgcgtgtattttttttcccctctctctcacaagaagtatattcttttctttcctgtttgttcctgctcgatttggggaggctgctgtttccactgcctaattaatgggaaggtgttctgcggaggatttcaccgcgtacatattctctgtttggacatggtacaacctgtggacccttttaaacatagttacatgtttgactctttatagggtaataactcgattaattttgcaaggctttttagaataccattgttctcttgaaaagaacaggtttgctgttttaacaagactttaatgccatcgagatgcctcacattggcacggttgcgtaagaatcgcacggtcccatgaaatgaaattgagagagctttttccggcgcctggttggttggggcggcctccgttcggtgcttttttcatcctcgacccagtgaccaactgtgtttgccctgatgtttctttcaattccaccattccgaaatgtctccggaatctgtcgttttagcttttgcagcaaggttcgttgtgtttgtcttgcccgcttcaggtttctctaatgagattcacgtgtaaaggaggattggcaattaatcggatgactgattaattgtgagattcttattcttaccaaggaatgctatggaagtcctggcttcagataaaattctcaatgagggccagttgcagtggctcacgcctgtaagcccagcacttgaggaggccgaggtgggaggatcacttgagctcaggagtctgagaccagcctgggcaatatgacaagaccccatctctgcccaaaaagaaaaaattagctgggcatggtggcacacacttgtgatcccagatacagctacttcggaggctgaggtgggagaatctattgagcctgggaggttgaggctgcagtgagcagagatggcaccactgcactccagcctggacaacagagcaagaccccgtctcaaaaaagcaaattctcaaagaggccttaatataccttttttaatcataagctttaagagcctggtcatgcaa

SEQ ID NO: 126542 - DNA, 1347 bp, Homo sapiens
tttttaaacgtgttcactgcctccttatcatttgttccactgtggttttggccagcctgaaccccactttttccagtttatgaccacaaagaaggattgtgcgggtgtgcatgaggaccagtaagtggcagagtctgcattttctggtgctgtccagacagcaaagagtgctgtgttctagaaagacagtaaatcgtatcatgtccttgctaaccgacgatggagaattctgtgggtcagaattgagcatcttttttgagacagagtctctctctgttacccaggctggagtgtaatggcatgatcttggctcacttgcagcctcaaccacccgggttgaggtggggagcctcccaatgtgctgggactataggcgtgagccgccgtgcctggccagaattgaacatctttgtatctttcttcttagtttagtacaaaactgaataatatttgcaggcagcagaattggatcgggaatttctcaaactgccaaagatgaaattagaatgagtgatttttggctggcagcttgaagtacatatatatcagtttgtgtatgatacgtgtgagtatgtagtggtttttccctcttcaactgtctttaaatatgtgtgcgtgcgtgagtgtgtgtacaaacacacgtagctttaatatcaaaaaggttatttttgtaggtctgttaggagacatgaatatgctcaaaagggaaaaaaatacatggatagggtgagaggagtttgctttatttaaggacatgataaaaggcatagcccttctgcctttctggaatgctgtaacagaatatagaaataattgtatcatctcctgtacttctcagagctggtgtttgcgtgaggctggccctgtgccaggttggcagggttgggggtaacccaggagcatgcctgctaaggcacactgccattcagggcctggccttgcccctgcgccccagccccctgctctcctccatccagctctgccctcttccatttctctgctacagtctgaaatctctcagccacaccagctttctcattccatgacctcatctgacttgtctccttcccctctgaatctgagcccttgttaagcctttttttgttttttctttgagacagagtctcactctgtcacccaggctagagggcattggtgcagtctcagctcactgcagcctctgcctccgcggtttaagcgatcctcccacctcagcctcctgagtaacctggactacaggcatgcaccaccacgcccagcttatttttatattttgagtagagatggggtttcgtcatgctggccaggctggtctcaaactcctgacctcaggtgatccacttgcct

SEQ ID NO: 126543 - DNA, 1051 bp, Homo sapiens
tggtcccagccactcaagaggctgaggcgggaggatcgcttgaacccaggaggtcaagcctgcagtgagccatgattgtgacactgcactcagtctgagtgacagagcaagatccagtctttaacaacaacagaaaaagttaattggcaaagacttcttttttttttttttgagatggagtctcgctctgtcgcccaggctggagtgcagtgcacgatctcggctcactgcaagctctgcctcccgggttcacgccattctcctgcctcagcctcccgaatagctgggactacaggagcccgccaccacgcccaactaattttttttttttttttttttttttttttttttaagtagagacgggatttcaccgtgttagccaggatggtctcgatctcctgacctcatgatccacccccctcagcctcccaaagtgctgggattacaggcgtgagccaccgcacccagccaattggcaaagactttctaaaagtgtcctttggctttaaaaacactgcagatagaccagggaagaagaattgtccatgggaatgatccagaaagcatctgtgatgatgtgtgaagagccagaggtagaggcatgggctgtgagggcggcggtgcctaagacctccgagcacacctccctgtagtgtgggcatgggggtactcaagccctcaggccagcatagcttccttgctgaaatttgggggcacgaggtgacaggcagctggggaagccagaccccgcttctttctggctttgcagagagtggtgagcctttaggactagaagggacaactctgtcctgctagagagcgaggcattgggcttactagggctggaactgctgtgagggaaggtattaccttcccttgtaggaagcatttcttgccagaatcacgccagtattgcagtaaaaggtaacctgcaaatctgcacattgagttttcatagatacgctaccctaaaggggagtatcctggttttttttttttttccccttcattgtcctctggtatctaattttgatagatccactctctggtt

SEQ ID NO: 126544 - DNA, 1047 bp, Homo sapiens
gcagcgccagggaccccttaactgatcccctctctcctcccaccagccaggggagctggggaagggcatagtacatccctagcatcaggggagcgcagggaaagaattgtcgaggaagccttcctaaagagggtggtatgggattcgggattggaagatgagtcaagtcaggttttgcagaggtttgtgaagatgcaagcctggcgaagcctgtcttggggaggacctgccagaggttccgaacgatttgcctgtggggtaggatggggcagcctggtggggcatttcccacatcagaaacggtctggacactgacaaaggcagcctaggaccaaccacgtaatgtaatagttcccagagtaagtcatcccccaaaaatgcagagaatggcctgagagaattggatcttggctactttcttttaactttggaggccatgggctcattctgagacctcccccactgcctttgcctccccttttattttccaggacagatttgtcactattccgtctgcttcaagtccaacctacatgtattttattagaccagacacgttttcattcatgtttgtgaatataagccccttggggcaaatcttttcacatatggtcttacagcatttcaaaaacaatttattttccctcttctgaaggagggattcttagggccaggcgcggtggctcacacctgtaatcccagcactttgggagcctgaggcgggcggctcacttgagcccaggagttcaagaccagcctgggcaacatggcaaaagcctgtctctacaaaaaatacaaaaattatcctggcatggtagctcctaactgtagtcctggatacttatgagtctgaagtgggaggatcgcttgagcccaggaggtcgaggctgcagtgagcctaattataccactgcactgcgacctgggtgacagagcaagaccctgtctaaaaaaaaagggattcttaaatatttgttgacgggaattggagaggcatgaaggaagatgggttttggagaaagactgacttgggattgattcactagg

SEQ ID NO: 126545 - DNA, 1053 bp, Homo sapiens
gatggagggaggcagggctccaggcctggtggccccgggagcgggtgagtggccggccccgcagtgagacccccgctctgccccttctaggatgcggccaagcccctggaggtgctgttgctggagaagaaccgctcgctgcagtccgagaacgccgcgctgcgcatctccaacagcgacctgagcggtaggttggccgggcttcgcgcgtgtgcggtggttggttcgcttccaggggtcggtcgaggacgaggaaggtgaatcgtgagtctggacagatgcatggccagagaagcgccggttgacgagaacctttgactaacgcgtgttgggtgccctcctcctcaccgctcctcccttcccttccccgccctgcttaaagctggatgtcgagacgggccagccgcacaggctctgcggaggtcagttaggggcagtgcggctggaatccccgggagggacagctcggaggacgtcggcctttctgatctgtgtctggttgtgctgcacagaggccaggggcagtgtgaacccagcctcgctctggtggtgttttcagggacagccccgggcctgccgggtccagtagaggtttttcttccttggtcaggtttcccctggggacgcgtcccccatccttagcctttcttggctcatcccccaaatggtggcgtcacttgactgtgcttctggtttgggcagctggtaaaacgcgtacaggtgtctcgggctctaatggtattgcattctcaaaacgggcgcgcgcctccacatcgagggggctcggtacggtgcatcgcctcagagcaagaggtgcgagcgaatccattggtcctaaaatgtcagtgtttgctgctcctccggccggggccagcgggcccagtaagaggcccgcgacccgtcaactcttccctgtgtgtgtcaccagctccttgtcacgctaggagtttgagtctatgtcaaggggactctccaggctgcaacgtacaagaaaggcgcaaacatgaatgcatgttgcttgttttgggaagcctcgtttggctgacttacaaa

SEQ ID NO: 126546 - DNA, 1051 bp, Homo sapiens
ggcgactagaaatgaggatgagtatttcaagtcccttgagatttctagttcagtgttgtaaaaataccatttgagaacattgaaatagacattcgtgctcatgccttaaatttagcagagacttaataacattgaacttgtttggcccgtgagtgcagttttattctggaacttgagaacttttcaaaagagtgatcggatgcagcccctaaatatcccagggcggcatctgtgtcctgtggggggtgtttgtgcctatacatatgtatggccatatgggagcgtcagaaaactcgggtgtgtacacgcaactcggcaatcatctgcggcggaatgtcactcccaggccggctccccaggtcccaccagctcacctctgggcccccacctttgatcaggatgtggtcagaacaagcagacctttctaaatgctggcctggctcagcgtttgcagaggacaccagcttcgccagtcccaccggcacccactgccccacctctggagggatcttgtccctggaaccttagcctttcccggtgccaccaagtgaagagcaaggtgcttgtacacacctcctccgcggggtgtcagggtgacagccctgccatcttggcaggatcaagaccctgggatgagaccctcttccctccctgggagctgagagctgtggctgtaaccatggctcacccgaaagtccccctgtgccggggtctcagccaccgttgatctttaaatgcatattccctgcccacaagctgtcaccgccaccaggccgtggttctgtgctcagaagtcagccctagacgcgccctctgcgtggtgggtgtgcattgcagcagcatctgtggtgtcatgctaatagccaggcactgatggcctgtgtgttcggtgccactccaggtgctgggcctgtcccagggcagcgtcagcgacatgctgtcccgaccgaagccatggagcaagctgacgcagaaaggccgagaacccttcatccggatgcagctctggctgaacggcgagctaggccagggtgttctacccgtccagggc

SEQ ID NO: 126547 - DNA, 1417 bp, Homo sapiens
tttagtagagacagggttttgccgtgttagcagggctggcctcaaactcctgacctcaagcgatctgcccacctcggcctcccaaatgttgggattacaggcgtgagccaccgtgcccggctcccctgctcattcacacttaatgtgccaggccacgaccacctcccctctcccctctcccctaacctcctccctccttccacccgcccttccatacgtgtctgtctgtatagtcattggaatttcctggcttggcatgggctcaaagccgaaaccatggacagaatgaaaagtggcgcatcagaccagccgccagttaaataatgtttgggttcttgtcagaatgtcacggagtaccctgtcattttgtttcagcaacttgtccttctgaatgcacagttcgccttatggcatgccagcagtaaaaatgtcacttacaataattactttttggtgaaaatgcttgctgacttcccaccttcaagctgttttttacacagtggggagataataagaaacgactttatcctgactgctcaaatgaacactaaatggaatttgggttcttattactgcagatagagggccgggtatggaaatttcaacagtagatcggaagaactgcagagagatgtatctccgagaattacggcgggtgcgggttttcaattggctcccattgaaaacttaaggcagctgttgtttgcctgctgtttttggaatataatatttttcataatccttttatagttcgtgaatgccttgtgtatctcagagggccttgagtcactatctctgctttctgtagcttgctcaccaagctcctcttatgccagattcagtgccttgtaaaaaaaaaaaaaaaaaaaaaaaattaattcacatagatgactttttaaatgtaacaccttactattgctgtcaaaactggatggatggtactgtgcagtggggcttttaaaatatgcaaattacccattttcaattgtcctggtcctgcaggctgcagggtccttggaagcgaggtttttgtctgatttctcccttatccccaagacacagagtaggtgctttaaaaatatgtgagtaggctggatgcggtgactcatgcctgtaatcccagcactttgggaggcagaggtgggtggttcgctggagcccaggagttcgagaccagtctgggcaacatagcaagaccccatctctctacaaaatatacaaaaattagccaggcgtggtggcacacacctgtggtcccagctactttgggtcatacattggcaaggaggctaaagtgggagggtctctgaagcccaggaggtcgagactgcagtgaaccatgatcacaccactgcattccagctggagcaacagagcaagacctcgtctcaaaaaaaattaaaatgagagtgaaatg

SEQ ID NO: 126548 - DNA, 1015 bp, Homo sapiens
ggttgcagtctgcggagattgagccactgcactccacctgggcagcaacagggaaattctgtctcaaaaaataaaaattaaaataagtgcccgcggcaatttgttgcagtggagaataggggagtggtgtcccagccctgggatggctcctggccaggcccggaggggtgggtggtgactctggagaggggctgccccgtggcccgagggtcgctggaggggcacggaggggcctccaggctggacggagcaggagccccagagagaggggtctggctggggtagcaccagaggccctttccccagcagcacccccctcacgtccccgccgcttgttgtcttgtaggtctcggatccgcagagaactgttcattgaggaaattcaggccgggagtcagggccaggcgggcgccagcgactcaccctcggcccgcagcggccgggcggcgcccagctcggagggcgacagctgcgacggcgtggaggccactgagggcccaggcagcgccgacaccgaggagcccaagtctcagggagaggccgagcgggaggaggtgccgcggccggcggagcagacggagccgccgccctcggggaccccgggcccggacgacgcccgcgacgacgaccacgagggaggccccgtggaaggcccggggcccctgcccagccccgcctccgcgaccgccaccgccgcgcccgcggcccccgaggacgccgctacctcagccgccgccgcgccgggggagggccccgcggccccgagctccgcgccgccgcccagcaacagcagcagcagcagcgccccccgcaggcccagctcgctgcagagccttttcggcctccccgaggccgcgggcgcccgggactcgcgcgacaaccccctgcgcaagaagaaggccgcgaacttgaacagcatcatccaccgcctggagaaggccgccagccgggaggaacctatcgaatgggagttctgaggggccgcggccctggggcgggcagccaggctgggccg

SEQ ID NO: 126549 - DNA, 2189 bp, Homo sapiens
ctatgtcgtgttttcaaggaagaaaacggaaatgtgtggtcgagcttttttgtaccctgaagtgttttttttattgccctaagtgatttccacaggttctggaataactcttacagctttgccttgtgtcctcctgttccgtgtgggctttaaaagaaaaaaaatcaaacccacatattaaaagggggctttttatctgccatctaatggcttcagagcgataatacactattatcttcttaaaccaggaaaaaataaaagggggggtgggatttttcagaaaaattaaaaaagaaagtttttgtagctgttcagttgccactaagagattgcacagtcaaaacgactctaaacacactagtttggattcctaaatattttcaagaaaagaatcttctcgtttgaaactttgaattaaaataaaacacatttactccacatattttttaacaaaaagaaaacgtcacatcaggaaactctgattttgtggtagctgacatagtgttttcttgtacgtgaatagaatcctgacatgtagtgcacattgatgtatagctttaactgaccctgggttttgcagaccagggtttgtttaatacactccattctaggccaaatcaggacaaaaaaaagaaaaaaaaagaaaaaaaaaaaagaaaagatccgaatctaggtattttataatctgctttttaacctctaaccgcagagcacgctgatcagacctcatatcttggaggtttaggagacaagttagaactgtagcatgtacctgttaattttgtttaatttatggtgtctcaatctgtctgtgcgtctgcacgtgtgcaagcattgaaagaaaggagagagtagtccgggcgagcacagcaggcagttccagggccagacgggcccatccccaagtagatagcagtctacggatctctctctggcacagaaggcacctcacctcacaccactctcctggatacctgatgaactgagccctcccaggggaagacactccccaggcctgggcagggcttacacgcgcactctctctcttctttccctttttcttcccaccgcaagcactgatgaccctgttgaactcgtgggaaacttcctttctctgcaggagagagaacgtggcattctgggctccccactcccatccctgtagaaatggcccaaactcacaccaaaacgtggatgctcttcaacttccaaacctaccatttgcccttctttcatttcgcctcttagttctttttatgcacagttttagggcagtctaagtacaaactgaaagtctaacttgtctctgattcctcccttgtctatgtgtatatgcgtgagaatagaggcgggtgagagtgtgcgtgcgtgtgcgtgtgtgcaattttatacgtctgtgtattttcttaagtacctgtgcacacgtagagtgcattactgccacctttttcaataagctgttttatcagttacggcttctacaagtttgctaatttagacttctttattgccatatctttaaactaacaatagatgatttcggtatatatatatatttttttttgcttatttataggtgctgtattttattatctgattgttaggaagggatgaaaggggcaaatattctttagagggatagactgccggcagtattgggtataatttacaagatgtagttgtcatactgtatattactgattgaaaactttttgaccgtattgtgtatcattgaaacctttgtcttaggtcaacatctttggatgacattttaatggtgcattcattatttcttaagtttaattaatattacttttttttttatttggggggtgggagggagttataattttaaaggtatgctctggctgttccacctccgtgtgcttgttaattaacttgtaggactttgactgtaagatgtgaaaccacgtttcttgcatgatgttttagagattatttcatttacagtcttttaacctgcagctgcagcacttagttcacgttttcacaaatttcaagagtcactacactaaagacaatgccttttcatgaataagaagttttcagaaggctctagggggctgggaggcaggctgttcgtttgtcttttgttgggggtatcatttctgaacttgaaatccagttcagggagaagagaattcaaaattagaggagcttaaggggac

SEQ ID NO: 126550 - DNA, 1061 bp, Homo sapiens
gctgccactaaaataatacagcaatccgtggccaggggagcaccccctcctggttgggcccctcagttggagtctaagggttaatctctcatcttgctaagcagtattcaagtgccttgaacagtgtcccctcggcatggctccccttcagcaggctggcattccaagcagtggcccccgcaggcagccgacccccttcctcttcacgctctatgagtttaaaaagctgatttgtacctctcccctgggggaaacggttccatataaaacactaacacttaattacaagctccattatgccattttaaatggcttctttttgttaattggaggcattgttcataacttaaggcttttgccattaacttagctggctaagcagaggctcggggtaaaatcagtgtttgcatttagcctcttgacccggagttccggcccaagctcccttgtgatagccgagatggcaggtgtgtgagttctgtcctagacctgtgcccaactcacttccaccccagaggagtcttctgtcctcctccccaacccccgagctccctggtaacctcctcttgaacttctgtatcagtgaagacatctgtggtttctgctcaccagacctctctttagaaagggttatcagagccatggagcttagctcaattggattcttctagacgatcttaggaggcatcttggcatgaggcagcttctaagcgtctcctgggacaggattggggtgacagcccagggatgcatgcatgggagaactctctgagaaatgccaggatcgtggctcacagggacccaccatcaaaacctgctactttgtgcaagtaattgaggcaaaagataccagtcgacagcctccctggggtagatcccttgtacctccaaagtacaaatacctccctgctcagtttccttcctgtcgccatctttgttttcttcccattgaaaaaccatcctgtctgatgtggacgttcaggtctgctggttggcggtccgggcccagagtgcagcagagctctgggttaaatattcctttctggccaccgcccaagccc

SEQ ID NO: 126551 - DNA, 1010 bp, Homo sapiens
cctctggagcagctgcgcccccgccccctgctagggccccggccgggtagtggggcgagagcagccgggtccttagaggaggggtctctggttgggggaaggggtgcccaggtctcttccctacgctgggagcgctgggagggggcgtcaacctagaatgagggtgagggccacgggatgggatcggggaggacctcctccaggccacaggcacgccctccctttggcccaggcccccctttctcgacctgcccagccggggagctccccggagcccccgattgccgggaggatcgtggagggtgcccaagaggccggcgcctttaagaaggggcgggttcgtgccctccattcaggcccttgggcctcggccattgatgaacctgcgggctgcgcgggccggaaccgcgccagcccagcgggctgaagccgggcagaggcagggacgcatcctggccccctgcagccccgaagtgggggccttcagggagggaagtctgcagtgactggagcctctcaggagccacgcaaggcagaccgggcagccccaggcgagactctgaacacgaataagccaggatctacgtgcacttcgagctagtgcaagggagagcctcaggctaggctgtcagacctgggtggagccctaccaatgcccccgagccaacatcacctaccctgtaaaatgggatggtgctgcctgcctcctggctaagggaccggcaactcccggcaggaattgcgtcccagagtcaggtccctggagctcctctgggaggactgggggcagggggtgtggtttccccaagaggttttgactgcctcttgagctgaagcccccactactgtgtcccaccttgaactctcccaacctcttccctcctggcctccccactccacgcaggaagaggttgggagagtgacctagaacttttcagctccaggagctttgggagaggtctggtggtggcggtggtggcacttcttttaggctagtgtggatcagggca

SEQ ID NO: 126552 - DNA, 1054 bp, Homo sapiens
ctccagcctgggtgacagagcaagagcctgtcccaaaaaagaagtggtttgtatgccacttatcttgccttctcagtttccttatttttcattttgtgagagtaagcaagcttttccagttatctgctggaaagaaatgggagtaatgtggtaataccgagttgcgccccaaggtggctttggtgcgccgtgggtcctggatggactcagaggcacagatcactcaagctattttggctcttctcctaaaaagcaggaggggcagctggctgggtgttctgttgttggagaggacatctcaccgcttgttttctgtgctgatccagtagctcagggaagactcccggcagtgtgggacttgtgtctgaaatgacagcataggatgacattaagccaatgtggattattctgcagccttgaactccccagatgatgtattcccacaccactcttacttatcctaacataggcctgcccatcaaagaaatccagggcgcccttaggggatttgttactaggtacatctagagcagagcttctccacagttgcactactgatgcctcaggctggaaaatgctgtgtcctgaggggctgtgtcttggtcactgcagggtgtctcgtggcatcctagtgtctaccctcccgaggccaggagcacccaccttcccccagtcatcagcaattggatgtctccagacacgaccagatgcaccccagtgggggaggaggacggaattgttcctgtctgagagctcctgatctaggggcaggtatccagtgtccagaaggcactcagcatgtgtttggatcaaactgtttctttcagagccaaaatccttcaacataatatgttggaaaactacccacgtcctttgtgtctttggaaaaagagatactctatgatcattttagaaatttttaaaatatgcagaaaagaacaacatcaaaaataaaagttggctgggcacagtggctcatgcctgtactcccaacactttgggaagctgaggctggaggatcatttgaggccaggaatttgagaccagtgtgggc

SEQ ID NO: 126553 - DNA, 1054 bp, Homo sapiens; identical to SEQ ID NO: 126552

SEQ ID NO: 126554 - DNA, 1555 bp, Homo sapiens
ctctgcctctgcctttccaactctcacttgtcctcctgctcccgcgtgaagagggggaggggaggagttgggaacacgtcctcatgctcggcttctggctggcagtcatgatgggggacagggaacctgtgctgctcacaggtgtcaggaggggcttcctgggccatgcttgggaggagctgggaagctggcgtatgtgtggggggcagagccctctgccacacaggtttcggaaatccttttgcagacggcagtgagaacttgagacttcagtgagagtgttgtcagcctggcgttagtgttgaagagctgggtcgggaagttgcccacccaagaggcaacttgagccatgtaaaagtagtgcgtggtttatggggtgtcgggtcttgcgtgtgcctctgggcctttgggtaaagatggggtgcacccgtgagagcagtggtagatcaggtctgtgagccacccttactcctggggaatggctcagaggactggtggacgtgaggcatgaccctggtttcttgccatgcggtctaggaacagggacttttgacttcccatcagctctcctctttgaaagcacccttgaccctgaacgattttgcatgtctgtaatttgaatgtcgtgtggttacaggacccggtcagcccaaggagcaggggtccagcagctctgcggaggcatctggaacagaggaggaggaggaagtgcccagtttcaccatggggcgatgacaatgtttgccacagcctctgcctggaacctggctcgtgctgtgaccagaagggaaaggcggctgtttggctctttctcccccgcaaggacccgctgacccgctggatggagagcaaaggagacccctcccgagccgctcacagtcctgtatttggcaggtttgggagcctgaggggccatctccctgacactcagaggcactgccttgcagacaccatccgtgctcctggtaaagggggacagagagcctcaccttgccacatatttgaacagtgatgagtttggggctggtttctgggaagggaacgtttatttagtaaagagcagaacacccttgcgttttgttgggacatgtggaccgtgagtcgcaaacactctggagaaggctgagatgccaccattcccacggggactgaagacacattacgtggacctggtcccaggctcagtgaggagatggcctcagctgtggggctggtccatgttgcccactcactccagtgggaagtggggaccacgccatagagggtctgctcccactgcagctcccggtgctctcgtgttctgggaaggcctgggtgtgtgcacaaggaggcccgggccagggacttcaccaggggctgggtcacaagggcacagggtgtgtggaaagcgctgtgggggaagagccggtcaccggagagtgagcaggcggagactccaagctgggctgagccagagcagaaggcgagggattcccagccggacgggggttctctcaccaacagctgtgatttcatcccgaagtggaagggggtctaaacagaacaggctgagaga

SEQ ID NO: 126555 - DNA, 1068 bp, Homo sapiens
agagcgagaccctgtctcttaaaaaacgatgatgatgaacacagaggacggggcactgtgctgggagccagggggcctgggaggagccgagaccagccttttacctcggggttttgaggccaacagggacgacagagacagtttctagttagagccttggctccatttttggatgatttagccccgagttcctgagtctattttatgccccttacgtactttgatagaactaaggaaatagtggttttgagtgaagggaaaggaaacccagaaacattttacgttgcttttacttctgtagtgtagattgccccggcccctctctgagccctgtagcatctgtgatagcttctgtcccttcatcggttcatgtcacagggattttctttcccaggaagcggacacggagagtcagccctaataaatgagcacatgccctggctgtacattttgaaacctgtttttctctgtctgggactggctggtttgtgtttcggttttagttctcctatctttggactgttggtttccatccctctccccacccccacatgtgtcacagcccctgccctgagtctgcaacctggagcttgtgggccgcctcagtgctggggagggtgctggggcttggagcctgatgacctggctttgaatcctgcccctgcctctggtaagccaggggactgtcagcaagtcccttcctgcctctgccagctcactgggccaagagagacagtcgccacaggtgtgtgttgggtgggtgggcacatggcgacacagcaggatgccaggttgcggtgggcttcacccccacggggtgcaggagatgatatttaggcaggacatgtcctgtagccatttctggccattagtactaggtcatcaggaccttaagttgagagattctttcttcagggcatcacttatttaggaaaagaagaacaaacagatgtcatcattgagaaaggattgggtgatactgagagcccctgccctccccccgacaaaaaaaaccaccattaggggagaatcatgaagtaatgtccctcattgctcatgggtgggaag

SEQ ID NO: 126556 - DNA, 1057 bp, Homo sapiens
gtctcgctgtgttgcccagcctgtggacttgtgtttcttttgcagaaaacataccgtttcatttactgctccgacaccggctgggccgtgggcacagaggagtctgactttgagggctgggccttccccttcccaggagtgatgctgatcgaggactttgtgacccgggaggaagaagccgagttggtgcggctcatggaccgtgacccctggaagctctcccagtctggacggaggaagcaggtagaccggccctgagctcatgggggttgctgggctgcgctgaggagacagccctactgctgggggccatccccctccttgcagccacacccctcaaacctccagggttggtagtgggcgagttccccagaccttggggctgtgggcagccagactcgctgcaggacgtgtgtccgatgggcagaggtgcacctgggcaccccatctccctgtgatatgcgctcctgggctctctgcccctctgtagctggcttggtggtggtgaaggcaccccattctcccaagctgcaggcgcccccacctcccattgtcaccatccgtgtcctgtctcctcacacgcattcccaccttccccctccccgggcccgccgctccctccaactccttccccacctgtgtccaaacatccccgggtgccccctctcccttcattgtaggttttttttttttttttttttgagacagagtctcgctctgccacccaggctggagtacagtggcatgacctgaactcactgcaacctctgcttcccgggttcaagccattcttctggctcagcctcccaagtagctgggactacaggtgcccaccaccatgcccagctaattcttgtactgttagtggagacggggtttcaccatgttgaccaggctggtctcgaactcctgacaagtgatccgcccgcctcagcctcccaaagtgctgggattacaggcgtgagccaccgcgcccagccccattcttttgtgacatcctgttggatgttggtacatttcatttcctcattcatctgtcgatggacattggcgttgt

SEQ ID NO: 126557 - DNA, 1035 bp, Homo sapiens
ccgggctacccgcgtgttcacaccaatagctctgccccagtgactgtttactctaacccccgcccaggagttcttttctgtggcctggaccgctctgatggtggtcacacaggctggccacaagaagcgctggagtgtgctggcggctgcaggcctacggggcctggtccggctgctgcacgtgcgtgccggcttctgctgcggggtcatccgagcccacaagaaggccatcgccaccctgtgcttcagccccgcccacgagacccatctcttcagtaagcccctccccttcacccctgggacccccaagcacccctgtcctgctgccccagtagcctccacgctcccctccctgggatggctgtgagctcgggcgcctgccgggccccagtctgcaccgctccgactctagctttggcaggaagccatgtcgcttcaaccctggctttatccacagcctgctctgtggcctcggagttttccaacagcctgggccactctgtcccctgtcagtgacctggggggatgcccctgcccccgggtgtggcgcccctgtcaagggggatggatgagccacaggaagtggccgctggagccaccgcatcaggttagatggaggaaacagggattgggggcccaggagtgttcctgtctcctagcctcggcccgccctccccgcctcggaggggctggccttgggaccgtgggctcagcctgggatgcagccagcaggagggagcagggtcatctcagggccacttctcccctaccccaccccctcttcagcggcctcctatgacaagcggatcatcctctgggacatcggggtgcccaaccaggactacgaattccaggccaggtgatgcttcgggtgaggctggggagtggccagctgctggggcagggacacctcggtctgggtctgatgctctgttcccccttgcccactggcagccagctgctcacactggacaccacctctatccccctgcgcctctgccctgtcgcctcctgcccggacgcccgcctgctggc

SEQ ID NO: 126558 - DNA, 1169 bp, Homo sapiens
gctggcatttgtgaatgaggacatcgtgggtgagtgagctcagcttgtgggacagcctggcctccgggcacacagatggaccgcttgtccctgggctaggcttctgaggatctctagtgggagaaggtgtctgggaggggccaccctgcacagctctcccttctcccccacagcctccaaggggagcggcctgggcaccatctgcctgtggagctggaggcagacgtgggggggccggggcagccagtccacggtggcagtggtggtcctggcgcggctgcaatggtcgtccaccgagttggcctacttctcgctcagcgcctgccctggtgagcctgcccccctgcccgccccatcccgcgggcttccgggagctctgcccccactcagactccacctctgtcccggcagataaggggattgtgctctgtggggatgaggagggcaacgtgtggctctacgacgtcagcaacatcctgaagcagccacccctgctgccggcagccctgcaggcccccacacaggtactgcccggctcaccctgcccaggcttgggctggcaaggcatcaggggccctgcctttggtcagcaggagcccagcccagccctcccctctctccccaccagatcctgaagtggccccagccctgggcccttggccaggtggtgaccaagaccatggtgaacacagtggtggccaatgcctccttcacctacctcaccgccctgacggactccaacatcgtagccatctgggggaggatgtagcctcacaccatcgcaaaggaccagggacacagctaactaacttattcagctttgggccgatgggggtgggggggggtctttcagtgaatatttttattaaactctactgtggacaagaagcctgtggaaaggtgtttcgagttatgcaggaagaagtgttcctgctttgactgacaggcaggcccaggagttgaggcttctagagcagagactcttgggagctcatgggtttgcacacttctctccggctcagcacagcccccgcagcagcccctggaccccggatctttggtccagaatgaattcatccctgccagccggacgcccctgaaacaggtcatctgcctgcatcaagcctgacaatccatttgcttgcgaagtcaccgctgctcaagtccac

SEQ ID NO: 126559 - DNA, 1095 bp, Homo sapiens
tcgactcttccagggtttatctctgccctcaaaacccacgaaggtggggtgcggtgactcatgcctgttatcccagctctttgggaggtggaggcaggcagattgttggagatcaggagtttgaaaccagcctggccaacatggcgaaacctcttctctactaaaaatacaaaaattaactgatgtggtggagggtgcctgtaatcccagctactcaggaggctgaggcaggagaattgcttgaacccaggaggtggaagttgcagtgagcttagattgcgccactgcactccagcctggaccgcagaacaagactctgtctcaaaaacaaaacaaaacaaatgcaaagggccttctggtcaacccacagtgggatggggaggaggaggagacacggggagggagaaggtggaaggtgccctggtgggccttggcccagcctcttcacagactgaaagagtcagccctgccatcacccccagagccacctctagcccaggaggcccatgctgggccacccccagccttcccacaaggacaccagaaggtctggcagggagagtggaggctgctggccctcactctgacctcccccacagggagaggcaccgggagctgagcgggggcgcagaggcaggcacggtgcccacgagccctggcaaaggtaggtcttgcccacctgggacttgctcgtggcccgagccccctccagagatgcacgggtggggtcctcgggctcactcccaggggccctcacggctgcctctgcccacagtccccgaggactcattggcccggctgctccgggtgctgcaggacctccgcgaggcccatagctccagcccggccggctccccaccctcagagcccaactgcctcctggagctgcagacgtgaggcccgccctacgctccccttgctgagtcccctgccaagcgctcggagcccccccaggacactctgcaccccctcaccccggtcctcctcattagggtgcagggcctaggtctcttccaggtgggggaggggggagagtcaggaataaggggatccccagaagtgcagagctgagcaggcttgggcctgtcatggctg

SEQ ID NO: 126560 - DNA, 1021 bp, Homo sapiens
gaggaagggcagcttctcctaattcactcaaagctgctgggttggtatggtggggaacatggcgtctggcgtggtacaggagctccgggttaggagggcttcctggaggaggtgacgtctgaacaggcctccccctccgtgtcccctgcagtgtgtgaatgagcttaaccagtggctgtctgcgctgcggaaggtgagcatcaacaacaccggactgctgggctcctaccaccctggcgtcttccgtggggacaagtggagctgctgccaccaaaaagagaagacaggtgggagaggaggcctgggtcccgggctctgcatccgtccactgcgagatcgggcctctggctgaacgatgggaccctgagccctgctgtgcacctgcagggacctaacccaaggaatgctggcccctccaggagctctgggcagaaagggtcccgtggaccaggtggtttgggaaatgccacgtgatgtgtgtgatgcatatgagtgaattcgctgaaggctctaaggaggcccgaaaacacgttagaatcccatttctttttatttcttcttcttctttttttttttttttttcagacacagactttcactctgtcccccagactggagtgcaatggcacgatctcagctcgctgcaatctccacctcccagggtcaagcaattctcctgcctcaacctccccagtagctgggatgaccggcactcgccaccaagcctagctaatttttttgtattttgactagagatggggtttcaccatgttagtcaagctgctcttgttttgttgttgttgttgttgttgttgttgttgttgtttgatactgagtctcgctctatcatccaggctggagtgcagtggtgcaatctcggctcactgcaatctccgtttcccaggctcaagtgattctcctgcctcagcctcccaagtactacaggcgcaagccactgcacccagctaagttttgtattttcagtaaagacggggttttaccatgttggccaggctggtct

SEQ ID NO: 126561 - DNA, 1048 bp, Homo sapiens
ctgcacaattattgtgccagacccctaggttaacagtgaggattcagtgggagaactaaacagataaacagatccagtccccgccctcagagagttacagtttaatgggaaaaagagacattcaccaaagaaggacacagcccactagtgagttacactcgagagggatcatttacagaacaaagcagattataaaaatacagcgattggctgggtgcagtggctcacgcctgtaatcccagcactttgggaggcagagacgggcggatgacttgaggtcaggagttctcaaccagcctggccaaaatggtgaaaccccatctctactaaaaacacaaaaattaaccaggcgtggtggtgggcacctgtaatcctagctacttgggaggctgaggcaggagaatgaatcgcttgaacccaggaggtggaggttgcagtgagccgagaccgcaccattgcactctagcctgggcaacaagagcaaaactccgtctcaaaataaatacatacatacatacatgcatacatacatacagggattaaaatagtctagtactgacacctgaacagacagattgatccaagaaatgaaacagaaattccagaagttgacctgaacacacacacacacacacacacacacacacacacacacacgaaggcgtgaaagactccatgaccctcaaggtataagatgcatttttttttttttttgagacagggtctcactctgtcacccagactggatgcagtggtgcactatcccagctcagttctaccctccatccccccaacctcccccaaccaccctgagctcaagcaattctcatgcctcaaccctcagcctcatgagtaactgggactacaggcgtgcaccaccatgcgcagctaattttttgtatttttagtagagatgggtctaaccatattgcctaggctggtctcgaactcctgagctcaagcgatcctcttgcctcaacctcccaaagtgctcggattacagctgtgagccaccgcacccggccgcattcttctaaatcacagtaca

SEQ ID NO: 126562 - DNA, 1012 bp, Homo sapiens
gcgttgtcccggcaaccagggggcggggctgggcgtggcaccgccccgcgctccgctgccaggggcgggagggaggaatggttgcttcacgccccgggggaagagacgggaagctcggctctgggttgcgggccccggcgtctccgcgtggggcgcaccgtccgacccccccctcccggtgtgcagcgccccgcaccgccccgcctcgcctgggagaagccgccgggacgcgccgggctggagtgggcggttataggctttgagctaggccgtttccgggaggcggagctcagaccccatttcctttctccacatccaggtcaggtggcgtttgctgtggcggctaggcccgcgtgcgctggagacctccgcgctggcccccgcgagcctcctgccctggcccggcgctgcggctctgccgcggcggcagcatgggtggcccccggggcgcgggctgggtggcggcgggcctgctgctcggcgcgggcgcctgctactgcatttacaggctgacccggggtcggcggcggggcgaccgcgagctcgggatacgctcttcgaagtccgcaggtgggaccccggggtttccggcaggtgggcggggactgggcaggggggctccccaggccggggtggtggcttgcgtgtgctcggggtaaaatgaggagccgagctagagggagaggcagtacttgtgtgagtgcagggtgctgcgccgcccccgccgcccctttgctgactatactggtatgaaaacttgccctggctttcctgcctgagctccgcgtcacagcggaggattagatttcttaaaaacctgttgatggcctctcattttaaagcttgctccgggcctttgtgtaactaaagggattctcccgattgtggaagggctgttgaggggcccagagccataggtcaatctctgcttgcaggtgccctggaagaagggacgtcagagggtcagttgtgcgggcgctcggcccggcctcagacgggaggtacctgggag

SEQ ID NO: 126563 - DNA, 1159 bp, Homo sapiens
tgtgcctggaattaccaaaggaagcttttaaaaagtcaacaacttttgagggccagatagaaatttcatattttggccgggcacagtggctcacgcctgtaatcccagaattttgggaggccgaggcgggcggatcgcgaggtcaggagatcgagaccatcgtggctaacatggtgaaaccccgtctctactaaaaatacaaaaaaattagccgggcgtggtggcgggcgcctgtagtcccagctactctggaggctgaggcaggagaatggcgtgaacccaggaggcggagcttgcagtaagctgagattgcgccactgaactccagcctgggagacagcgagactccgtctcaaaaaaaaaaaaaaaaaaaaagtcgtattttttgaggagtcggttccatcctgagcagtagccctactccactgtgcagaaaagtggctgttcagtagaaaaattttggagattctaagatgctcattttcctcccctgccttcagatatacatcagtcaagtatgtgaggatgtcttctctggtcctctgaactctgctgtgcagctggctggactgacattgttgacaaacatgactgttaccaatgaccaccagcacatgcttcacagttacattacagacctgttccaggtgttacttactggaaatggaaacacgaaggtatgaagagctattgtgtcaagcttattaacattgaaatagtatttgcaggccacctatcttaagttgatgtgcctcaaagaggaagatttattaaaaactcacatgggcccaagaaagtatattatttttagtcccaaatattccattgcaaaattaacttttgaaaaccatctgttgtttcacttatcaacagattcctgttcatttggttttctgagaagctagcttccccccaccaaatataggaacattgtgattaaaaggagtctgagtaatagtagtggttagttgaatattttgcttacctcagggttaacaaatcatttttttgattcagttatttgttgaaaaatatttctaaaacaacttttaagctgtagtaaatgaagtgaattgaatatatgaaagatgtctcagtgcttcactctgtccagttaggttgatataagaggcaacagatattgagctgaattaagtag

SEQ ID NO: 126564 - DNA, 1025 bp, Homo sapiens
caaacttgtttggatgtgatccaagatgtaccaaaaggtattgaaaattaaatgtaagagtagtcttctagcaatattgcaccattcccaggcagtttccaacgtgcatcagcatgtctgtctccagtggaacaagataacttccagcccctgaacccctggggaaactccttccctctttactgtatgttgttgccactgtaggagaaatctctcctctgcctgactctgcagctgctttacccagaacctcaggaggaactctgagtccagagccaggctgagttcagccaggcaagtctggccttggggctgtatatatctgtctcagacatcgtctgtgttttcatatattttttgactttttaaaagatgacccagaccacaatagtatgttctatttttgttttgttgtgttgtgtttttccattacattgcttagtacagtatttctaggatagaaaatttgctttcttggtctgccttggaacatacctaccaattacaacattgattttccataaaaattgagtttaaagttccaacttgcaaatgaacttttggatagccatccatttgttagtgggaaagtgtgtctgatttaggtattttcttagtaaataaccactaaaatgaatgtttaaatatcgtattttgcttaagtcagggatctcactgtactgtaataaccgtttgggtacaccactgattgataacttaatgcagatagtggaggattaacataaactgtgtgcttgttacatcctcaatgaaaacaaaactaatggtttaaaatgtcctagtgtcaccacaagatggtgcatgtgacgaggaaaaaaaacatgtcttaatatggtttcaaaccaaaatccatatatttgtttaatctgtagttgtactctaactgtatatatatttttttctcatatttaactcccttctacaaagaatagcaacatcagattttaatacaggataccaaatagctattgctgttgctattccctggttgtatacctgccctc

SEQ ID NO: 126565 - DNA, 1356 bp, Homo sapiens
tgtgagttattcaatgtagttttaaaatgttaaaatatacatgaaaaagttttcatatattattaatataaaataatactcattgtttcatatttcaggtggattcatcattcctttccctttatgacagccacgtagcaaaggagattcttcttcgagtacttacgctatttcagaatataaagaactgcctcaaaatagaaggccatttagctgtgcagcctactttcactgaaggttcattgtttttcctgttacatggagaagaatgtgcccagaaaataagagctttagttgatcaccatgatgcagaggtgaaggaaaaggttgtaacaataatacccaaaatctgattggtcatatttttccaaagagtaatgcagtctggatataaacgtattttctgtcttccttataaggggattctcccagctgctaaatttaaacagtaaatatcacattttgtcattaacacagctataacttgccgtggttctcagatttattttggactattttgatgccaagtgaatataagagcttgtactgaaaccatttatttctttctattttgctatttgcaaatgcttgttatcttccctacatgaagtggcagtaacctttttcacatttaagctacccttctaccttttgaagtgatttgcagttactcatctgagacagcatcagtatttgactaaatcattgtttcacaactgaatagtcttgttcttttagtagcaacgaaatcctaagctcttgaggccattcacctgccaacctgaccatactgctttcaaaagtcttttctcatcagtagaatctattttggtcacttctagtcaatgaaaaatgtaaacttttaggagagaatgtttcttaggactcacccactccattcaatgttatatataaaatagtgtgatcaatcacaatgtccatctttagacagttggttaaataaattatctggtctttgaaaagaccgtgctgggcgcggtggctcttgcctgtaatcccagcactttgggaggctgaggcgggcagatcacctgagatcgggagtttgagaccaagcctgaccaatatggagaaaccctgtctctactaagaacacaaaattagctgggcatggtggtgcatgcctgtaatcccagctacttgggaggccgaggcaggagaattgcttgaacccgggaggcagaggttgcagtgagctgagatagcgccattgcactccagcctgggcaacaagagcaaaactctgtctcaaaaaaaaaaaaaaatgatggagctccgaatgtgcttaagtggaaagatatctatgaaatatggtggttttttaaaacacaaaaa

SEQ ID NO: 126566 - DNA, 1441 bp, Homo sapiens
ctcggcctcccaaaatgctgggattacaggcatgagtcaccatgcctggcccctgttaaactttctacctagcaatgtggttagtcttcccatcccactgtatagcagtttcaggatgatgctgcctctctaacttggagtgctgaacaggaagtaagagttggctttacggtaggcagctgccaggctagcataaattctggcataccagaaaatccctttgatccttcctaaatgcttgtcttactttgtgccaaatgactaatgatttaaagcagtggttctcaaccctgcctgtatatcagaaacacccacagaacttttaaaaattatctagagaaactgccccacctgacattttgattcagtagcctctggtgtagtttaaaaagctccacaggggagctctttcctttcgctgctgtggctgcagccttgagtatgctcaggcttcagaagaggcttgcctctagtgtcctctgctgtggcaagaagaatatctggttagaccccaatgagaccaatgaaatcaccaatgccaactcccgtcagcagatccggaagctgatcaaagatgggctgatcatccgcaagcctgtgatggtccattcccccgcttgatgccggaaaaacaccttggcctgccggaagggcaggcatatgggcataggtaagcggaagggtacagccaatgcccgaatgccagagaaggtcacgtggatgaggagaatgaggattctgcaccggctgctcagaagataccgtgaatctaagaagattgatcgccgcatgtatcacagcctgtacctgaaggtgaagaggaatgtgttaaaaaacaagcagattctcatggaacacatccacaagctgaaggcagacaaggcccgcaagaagctcctggctgatcaggctgaggcccgcagatctaagaccaaggaagcacacaagagctatgaagagcacctccaggccaagaaggaggagatcatcaagactttgtccaaggaggaagagaccaagaaataaaagctgcccctttgtgtgtacatactggcctccgtgattacatagatcagccattaaagtaaaataagcctttatctgcttgcaaaaaaaaaaaaaaaaaaaaaaaaacaactccacaggtaattctgatgtacatttgaggtttcagggcttgtacccatgtggactggaaatgatctagggaggatttgcactttgttccttatctgtcacacactggaaatcagatctttcttgaaaacctgttttggccatggaaaaagcagatggggggaacaatatgatagtagagtcacttgggtaagagaggcaagaatactgaaatgctttaggggaaacttatttactcgtgatttatgtagagctggccttgcttgcctattttgccagctcccattgtgggaaatttttcctt

SEQ ID NO: 126567 - DNA, 1029 bp, Homo sapiens
agtttctggccgaaaagccagtcatttgcattttgaacatcgacccatcttcctatcctctctctctttttttttttaaccatttccaaaccctgttgcttttcttgaacaatgaaaacccgagtgtcagttttgtcttgtgtgtaggtagttttacatagtttccctctctttttttttttcctgcttgttttctccataatgaatataaaacatttctaggagaggtagtgaaataaagtcaatttctctctgggtaatgataataattgctcatcttccctgagggaagggcatgtttataaacacgttgctggctttaggacagtggctggtgacagatgtttctaggccaggcagagatctcagtggaaccaaaattcaagaagaaagattcttttatagagacagcctatttaaaatagatttggttttaaaagcaacatttaatatcagattagtaatgtgttttgctttgtctcttccacttcctacccccaaccagtcattatattttggagagaacagattaagaagtacacaggctgctacccaagttgttctgaatgttcctgaaacaagagtaacatgtttagaaagtggactcagagtagcttcggaagactctgggctctcaacatgcacagtaagtgactcaggcaaccttctctaagtgacccttcatttagcgtagcaaattgttgattttaatctttagctttttcgttggctggtggttcaaaaagggtgacagttattttgccttgacagatttccatgagttgtgaaccttttcttccagtggtacttagttacagggtgcatatgtatcctgttgcattgtctgcatcttgttcttgtagcttattattgattatttattttcagtagtattgataataatgaaagaaatatgtttgcagggctactctgccaagtgtttttactgatgtcttatttgataaaaagcaattgtttgtagtgggcatcctcacacctgttttatagttaaggaagtgagagaagtta

SEQ ID NO: 126568 - DNA, 1613 bp, Homo sapiens
ctgggctgaagcccatattagcctcccaaagtgctgggattatataggtgtgagccacggtgcctgaccagttctttgcttcttaacatagcactgtcattgctgtgggaacttgcatagtaaatacttgggtgatacaaaccctctgtacattgctagctaggtattttcagactaatatatataactttgtaattttcatatagaacaatctatattaatatgcaaatttccatagcattttttaagtaggtagagtcattacaaggtgatggcaaatttatactttttccccaaggaaaaaatcttttgtactataggggtttatatgttaaattttaattttgtcctgttaagtatatctgatgtttttctcctaggctaatcatttagtattgagtgatgggtcagtgtcatgatttctgattttggtttaatagattttaatagtgaaagttaagattgctggcacgttttcttatattttattttcaattagctgtagaaattcttgctgatataatacaaaacagcacattgggagaagcagagattgaacgtgagcgtggagtaatccttagagagatgcaggaagttgaaaccaatttacaagaagttgtttttgattatcttcatgccacagcttatcaaaatactgcacttggacggacaattttgggaccaactgaaaatatcaagtaggtataacagaatttcttggtgtataagggaatttatgaatgttgaaaataaacatttacaaattttcaaaaagtatgtttcagaaagtaattttccccctggtaatctaagtgaaactgtagttagctacattttagtcccacctagctcccaagcacgtgagttcataggtacttcgggaataaaccagtaatggtgtattttttctttgatgtaaaaaaggtgaagttctttgatgtgttgcctgtatcctatttctgactgcattttaggatacagttatggtccaatttgatttcaggtatattatgtgaagatctgttttttttttggtttcctttaaaaattgttttacttcatttacagatctataagtcgtaaggacttagtggattatataaccacacattataaggggccaagaatagtgcttgctgctgctggaggttagtcaatttaaatttctacaaatgttttaaacacagttgttggagtggtatgcttattagtttgatcctgttgggagataccctaagaattttcatttacatagcaaataactgatagtgtgtaaggggaatgtggagcactggaatcagaatttccctctattttttttaaagtaggtttcatttaggccaggcatggtgactcacacctgtaatcccagcactttgggaggccgaggtgggcggatcacgaggtcaggagttcaagaccagcctgactaatatggtgaaaccccatgtctactaaaaatacaaagtagctgggcgtggtgacatgcgcctgtagtcccagctactcgggaggctgaggtaggagaattgcttgaacccaggaggcggaggttacagtgagccaagattgcaccactgcactccagcgtgggcgacagagtgagactgtct

SEQ ID NO: 126569 - DNA, 1015 bp, Homo sapiens
tagatttgtctttactcatagatttctccaaaatacatttcatctaaataatcttaagcttcatatgcaatataactttgaatctttaagcgtatgtagccaagagtcctagaaattgggttgataatagccatctagttttagaagtaggtatagctactacattaattataaggactcattgcttttataacatgaatttctccagggggtgcactgggtaagtgagataataaacacaattcttagtcatactgaattttaactctactactgagatgttgaataaaactaggaaacagcctctaaggatattcactattttccacacactccatttttctttctgtattttggacatgtataattaaaattctcttggaatttttttttccttgcagaatttatctagcaagctggcccagctcacttgtcatggcaatctttgccatagctttcagtctttcaacacttcctacacagatacaggattatggggactgtatatggtttgtgaatcatccactgttgcagacatgctacatgttgttcaaaaagaatggtgagaaaaatagctttaagtaatttaaattttgcctttaattcgttttaaactagttttttatttatactttatggtgatttatggtaattttaccttttaattaagagacctagataaacagtagttgccatgttttcaaaggttgcagttggtttttcctaagtctcaagatgtgaagctgatttatactatagaatttttttttttttttttttttgagatgaggtcttgctctgttgcccaggctggagtgtagttgtgccatctcggctcactgcagcctccgcctcccaggttcaagccattctcccacctcagcctcccgaatagctgggattacaggcgcaccaccatgcccacgatgcctggctaattttttgtattttttagtagagatggggtttcaccatgttgaccaggctagtcctgaactcctgacctcaggagatc

SEQ ID NO: 126570 - DNA, 1421 bp, Homo sapiens
cagactccaacagatgaggactcatgaagtctcaagatgcttatagcatttctgaaaatgtgatcagcccatttgtataaagcctttgtctgctaatgtgtaattaggcatgtttatgtatcatttttgagaaattaatactggggaaaataatcattttagcttttgcttagcattggaattaaattgtaatcacctgtatgttttgtgtagaagatggcatcatcattcttaggtcattaactcatgaaatacaacattttccaactactactgtttttccacgttttttaggatgcgactctgtacaagtgtcacagaaagtgaggttgcacgagccagaaatcttctgaaaacaaacatgttgttgcagcttgatggtaaaaataaagatataggttctgttttcatatggttgatctgtattccaatagttaatttttccttctctttaaacaggttcaactccaatttgtgaagatattggtaggcaaatgttatgctataatagaaggattcccatccctgagcttgaagcaagaattgatgtaagtagtcctgagttactattgggtcatgtgtaaaaagatccttgttacaaaagctgagaatatgtatctttcatcttgctttagttttaaaaagttccaggtatagactttgtttttactacaaacagctgaatgacagtgtcttccatatttcaggctgtgaatgctgagacaattcgagaagtatgtaccaaatacatttataataggagtccagctattgctgctgttggtaagcctggcttcttttcttctatgcaaaaagttggccaagtacttttaattaactcttctttttaatccttaggtcccattaagcaactaccagattttaaacagatacgcagtaacatgtgttggcttcgtgattaaaatgctcctaatcaagattgtttgaacacatgtatttataaaacagagctagagaaaaataaaaatgaacatgtatatacatttggaaatttgaattaaatactgtatcatactttcaaaggataaaaagactacccctctgaaggttgttttgtattaatggtcagtctttgttctctgagaaattatgttggaagcagcatactttcaaattattaccatgagtataattttaagaatgaaaatgtttacagtattttcagttttattataaaaatgcacacacaacaaagattgtcatttcttggctctacttgcattcagcacttgttcttgagcagctttctttgcttttaccatctcgacaagttcctaggaagggagaaaggtgtgatttaagaagttgcgatttaaaaacagacattttaatctagtgtttggtgtaaagaattcaagcaactaagatagatagtactaaatatactgatttcattatct

SEQ ID NO: 126571 - DNA, 1721 bp, Homo sapiens
taattttgctaggtttgtttccttcagtgtaaaacaagaatgatttccagggtttctatccagcaaaagtttaactgtgaggaagctcttttacctattctgtaaggaagtagatttatcagaactcttaatgaattgtggttgtgtttttgagtccaagagtccaacagtactataaatttaaatatggctttttaccagtctggtgagtgtattacattgatttttaagagataaacagtacaaggtagatctttactattgtgttttaaaagcctttgagattttattttctgggatgtgagctatctgaaattttttctcttattaacactcagagggctatatgtatctctcatctctacaagtttattttcaaaatgacacatcccagattgaaatgggcacttagcgaatacttgtggaccacaagacttgtctgagaacatgttcaaagacagttttcaaataaaaatttttcttaatcaggtccatatacagacttcaccccttggacaacagaagaacagaagcttttggaacaagctttgaaaacatacccagtaaatacacctgaaagatgggaaaaaatagcagaagcggtgcctggcaggacaaagaaggactgcatgaaacgatacaaggttgcagacttaagcgtttatagattgttgtattttaaattgtagcttgggtgatatagctcatattttatgtctattaagtggttaataatatagtgcttatttcaaaaccagtagttatggggtcaatattatgaggaagaaatgagcaaccttagaaactttctaggccctggcagataatgaaatcagtatatttagtactatctatcttagttgcttgaattctttacaccaaacactagattaaaatgtctgtttttaaatcgcaacttcttaaatcacacctttctcccttcctaggaacttgtcgagatggtaaaagcaaagaaagctgctcaagaacaagtgctgaatgcaagtagagccaagaaatgacaatctttgttgtgtgtgcatttttataataaaactgaaaatactgtaaacattttcattcttaaaattatactcatggtaataatttgaaagtatgctgcttccaacataatttctcagagaacaaagactgaccattaatacaaaacaaccttcagaggggtagtctttttatcctttgaaagtatgatacagtatttaattcaaatttccaaatgtatatacatgttcatttttatttttctctagctctgttttataaatacatgtgttcaaacaatcttgattaggagcattttaatcacgaagccaacacatgttactgcgtatctgtttaaaatctggtagttgcttaatgggacctaaggattaaaaagaagagttaattaaaagtacttggccaactttttgcatagaagaaaagaagccaggcttaccaacagcagcaatagctggactcctattataaatgtatttggtacatacttctcgaattgtctcagcattcacagcctgaaatatggaagacactgtcattcagctgtttgtagtaaaaacaaagtctatacctggaactttttaaaactaaagcaagatgaaagatacatattctcagcttttgtaacaaggatctttttacacatgacccaatagtaactcaggactacttacatcaattcttgcttcaagctcagggat

SEQ ID NO: 126572 - DNA, 3849 bp, Homo sapiens
aggctgaggcgggtggatcacaaggtcaggagttcaagaccagcctggccaaaatggtgaaaccccgtctctactaaatatagaaaaaattagccaggtgtggtggcaggcgcctgtaattccagctactcaggagactgaggcagaagaatagcttgaacccgggaggtggaggttgcagtgagccgatttcgtgccactggactccagcctgggcgacagtgagactccgtctcaaagaaaagaaaaagttaaaaacatttacactgagataaaattatacctgttcagttgtcattgtctgtttttttgagatggagtcttgctctgttgtccaggctggagtgcagtggcgtgatctcagtttgctgcaatttccgcctccaggttcaagcgattctcctgcctcagcctcccgagtagctgggattacagctttgtaattatgttgatggatgtatttttgagtgtagatactatttttgtgtttgtgcttttagacctggaatcatttttctgataatgaggcagagcgggttaaaatgatggaagaagtggaaaaactttgtgatcggcttgaactggcaaggtatacctatggaactgctattgaagtcttcacttgagcttaggataaagtttcatttcttctttttttttctttagcttacagtgcttgaatgaaacactcacatcatgcacaaaagaagtaggaaaggctgctttggaaaaacaggtaatagaggaacacatcactcctacctatatgtagcatttaattctgctttgacctgtttcttcacctaatatataagtcaccaagtgcagggagtatctgatttctctttatgtttcccactgttttgttgttgttgttttatgtgttcggttttttggttttttgttttgagacagagtcttgctctgttgcccaggctggagtgcagtggcacgatcttggctcactacaacctccgcctcccgggttcaagtgattctcctgcctcagcctcctgagtaactgggattataggcgcacaacaccacacctggctaatttttgtatttttggtagagacagggtttcaccatgttggtcaggctggtcttgaattcttgacctcatgatctgcccatgtaggcttctcaaagtgctgggattataggtgtgaaccaccacgcccagcctgtttttgtttttgtttttgagatggagtctctctctgtcacccaggctggagtgcgggtgggattacaggtgtgtgccaccatgcccggctgatttttgtatttttactagagacagggtttcgctgtgttggccaggctggtctcaaactccttacctcaagtgatccgtccgcattggcctcccaaaggattataggcatgagccaccatgcccagtctgcattttgtttatgtagtaaggtgctgttgttgatttaagttggattagatgtttatggtttttaccatacttagtgtttgatttgtggtatctatcacaagcatagcttttgcaaaatcatattagaaaaaaataattgttttgattattccttgagtattttcatagggtaataacagttagaaccaaaagagatctttgttctgtctagtctataccttttattttacagataagaaaacaggcccagaaattcaattcaattcaacaagtattagtacctactatatatagcactatgcctaggttcttttggagaaatgcctaatgctgttgcaccacaaaggacatgctgagaagaacctgagaagaaccttaaggaccaaaagatggagagcccatagtaaatgaggtgtaggataggaagggccacaagttttagtgaccagggaaggctcagtgtagtttgaaccagcctgaaaggaaggacagagttaaaatgaaggtcagaagaataccacaaactataaaatagaagtagaagtataaagtatggttcagcctgggcaacataaacaaaatctctaccgaaaatacaaaaattaactggcatggtgtcgtgtacctgtagtcccaacttctcaggaggctgaggttagaggattacctgagcctgggaggtcacagctgcagtgagctatgatcatgtcggtgcactccaacctgggcaacagagcgagactttgtctcaaaaaaaacagacaaaaaaaaaatgttatggggaaatggagtgggaaacaaaatcagttaggaaaagcagaaccaatgatcaggtttttaataccttgttgactagtttccattactgcaaatctttgattaacagaaggttcaacattgtactactaatctgacgtttgtggataaggtgcatcagatagatgtaactagttacaagaatcttatttatttaagaatctgcactatgagcgtggtggctcatgcctataatccgagcactttgggaggccaaggcagacagatcccctgaggtcaggagtttgagactagcctggccaacatgatgaaaccccatctctgctaaaaatacaaaaattagctgggcatggtggcaggcatctgtaatcccagctacttgggaggctgaggcaggagaatcacttcaacctaggaggcggaggttgcagtaagcagaaatcacaccactgcactccagcctgggcgacagagtgagactctgcctcaaaagtaagaaagaaagaaaaagaacctgcactatgaatgtgatgatgggaatcaaaaaaatttttcaaggttagcattattgggactttactggttctaagggattgaaggggagaaatgagccaaagctgactcttaagatagcagctgacagaagcaacaagggcaaataaaggttctttttttacttgtgcatgtttgaaggtagtctagaaggaacaatgtaaatggtagagcttcaaaataaaagaggccattttgctatgccttcaccttttggtagagaataaatgagattgtctgcagaaagggtgaatatgagtttgaagagaggtttgaaatggccttgtggatgaataactcagtgacccacagacttgtcaattagtgtccaaggctaatggaagtcacatgacatgagtactgggaaaatcaggcaggctgtgggcagttcttggtccctcaggcagacctatgcagactggaagccagagtgaaaagctggtgcttctttttgggttggcctgagaggagtatggggtcagagtgagaatgacattgagagttgaggaccacaaagccctagccaggaagagagtgtagaatagcaatacagtatacttctaagtccctgacttatgatatttgtgcagatagaagaaataaatgagcaaatcagaaaagagaaagaggaagctgaggctcgtatgcgacaagcatctaagaacacagagaaatcaactggtggaggtggaaatggaagtaaaaattggtcagaagatgatctacaattactaattaaagctgtgaatctgttccctgctggaacaaattcaaggtactggttttaatgaaacttttcttcaactcacactggagcctggagataatgtagacagactccaaatagcagcacttgttatcacagaaacttgcagagataaattctgtgccacagcagaaaagtgtgaaaagtgaggtgcattttgaagctgtcagtcttacccattgcatcagtacacatgcacatatacatatgacagaatacttgtttctcaggaaattgaagatcatgagacaagtcttgatttatgttggcttactctgtcatggcttgttctagggattaggttttctgtagtttttcttttacagtcttgctctttgttttt

SEQ ID NO: 126573 - DNA, 1852 bp, Homo sapiens
gacatgaatgtgcaaaaaataaccaaaattaatattaaatagaaccactgtttaggccgggcgtgctggctcattcctgtaatcctagcactttgggaggctgaggcgggcagatcacctgaggtcaggagtgcgagaccagcctggccaacatggcgaaaccctgtctctactaaaaatagaaaaagtagccaggcatggtgacaggcacctgtaattccagctactccggaggctgaggcaggagactcacttgaacctgggaggcagaggttgcaatgagccaaaatcacgccattgcactccagcctgggcgacaagagcaaaagtctgtctcaaaaaaaaaaaaatcattgtttaatgttagtaatgacacagcattttaacctctaggatgttatgtacatataaatattttataaaatattgcattttccagtcatagcatctataagcagtagtttgtttccaatattttctattttatagtcgtgatgagaggagatggattgaaaagcagaacagagcaacaagagcacaaagaaaaaaagaagaaatgaacagaataagaacattagttggtaagtagaattgatttaagtcccctaaatgttagaaattcaaaatgagattaactttttcttttgctagacaatgcatacagctgtgatccaaggataaaaaagttcaaggaagaagaaaaagccaagaaagaagcagaaaagaaagcaaaagcagaagctaaacggaaggagcaagaagctaaagaaaaagtaagacaacatttaatgaaggtggactttaaatgtttatgaaatctttaatcttcactttaatcttcacatctttttttaaaaaaaactataattcgaaagcagagaattgggtgctactgtgaatgaatcatgaccagttggtataattgagagatcttccttaccagcacgtttttattgagcaaaaaattgtgtcataagttcctttaatattatgcttatttctaatatgtcaattttacattttctaataaatgtttatagatctttaccagctgtctttccgagttcatccttcagttttcaataagtttatgttgccttttttcctaatataatttattaaaagtttaaatttttaaaattataaaacatttaggaattttactgtacctattaaaatgattttactccctttttttaaagcaaagacaagctgaattagaagctgctcggttagctaaggagaaagaagaggaggaagtcagacagcaagcattgctggcaaagaaggaaaaagatatccagaaaaaagccattaagaaggaaaggcaaaaacttcgaaactcatgcaaggtatatcagactgaacaaacactaggcacaagtaaatcaagttgcttattaagcaaaaatacttctttttgtttgtttgttttttagatggggtctcgctctgtcgcccaggctggagtgcagtggcgcgatctcagttcaccgcaatttccgcctccgggttcgagcgattctcctgcctcagcctcccgagtagctgggattacaggcgtgtgccaccacgcctggctaattttttgtatttttagtagagacagggtttcgccatgttggcaaagctggtcttgtactcctgacctcaagtgatctccccgccttggcctcccaaagtgctgggactacaggcatgagccactgcacccagccaaaatatttcttgaaaaaaaaaaattatttttatttatttatttatttgagatggagtctcgcactgtcacctggtctggagtgcaatggcacgattttggctcactgcaacccccgcctcctgggttcaagca

SEQ ID NO: 126574 - DNA, 1071 bp, Homo sapiens
taggttaccaccatttctaaatgtttccttaaatgtgattttacactttgatgctaatttttgaacagttgtatgcacaccgttcatatttactctttgccagttctcttacacagtgctccagaagcctaagatccttcgatcttttacaaccttgggatctaacaattaacttactagctatttctttttccccagagtcatcttttctcttgaggggtgggtgatatttattgttttgtcacttgtctactagaaaaataaagaaggagttaagtccagttatatccagtagtgctaaagctgttgttacctaaattaaatcctccccaacctgcaaacaaaattttcaaatatgaaaattaatgacttctatgttttaaggagggaaatacttgttttcttgcaggaaaaaataggtaaagttatggtgatgtgatcttaacaatttttttctcagcttatgaaatgttatctgatccagtgaaaagacgagcatttaacagtgtagatcctacttttgataactcagttccttctaaaagtgaagcaaaggataatttcttcgaagtgtttaccccagtgtttgaaaggaattccaggtaagttaaggcatcccttttgatcatagtgccctgttggcttgtttattgtagtcttccaggtttctgctctttccctctgataatagtttcatttatagattatttccactgtctcttcctcctcctcctccttctctgcaatattcagcccttctggtgaacttactgttctcatttatattgctttctaaacagaagttctacatttccatagtaaaatttctgtacaatttatgggaagtttctcttttaaatttacttgggctgggcacagtggttcacacctgtaatcccagcactttggaaggccgaggtggacggatcacctgaggtcaggagttcaagaccagcctggccaacatggtgaaaccctgtctctactaaaatacaaaaattagctggccgtggaggtgcatgcctgtaatcccagctcctcgggaggcggagacgggagttttgcttgaac

SEQ ID NO: 126575 - DNA, 1160 bp, Homo sapiens
tggcatccaactgtggttttgatttgcatttcctaacagtgatgttgtccatttgtatatcttctttggagcaatgtttattcaggttatttgcccacttaaaaaatcaggttgttttcttgtgtggtaggagttctttatatattctggatattaactctttaccagaaatagattaccttcactatatttgtagatgtggccactacttattgtgtctaatatgccaggcgttttacaaacactgtaaagtttccttctcacaggtaatcagtccaaaaaccagcgtgccaaagcgtttccccagggctctgtccggactctgaagcactgcataaaggggtctgtctgagcccaatttacttccggtggggaagggaaagggaagacaccaccggaagcaaggaaggtgctgtgtaatcattaaggagcggaggcttttggagctgctaaaatgccggattacctcggtgccgatcagcggaagaccaaagaggatgagaaggacgacaagcccatccgaggtcagttgacatgggccggagctcggagctggggcgggactggagcggagctgccttggcactggagaggagctggattcccgctcctggctctgtgctctggcccttttgtgcccctagtaatttagtctggacaccggccggattaacttgcctgccttctcagtctccctcatccactacaagttctgtattatctgctgatggaaatttttattcattctcagctctcgggtcttgaagaagtcacgcaccctgcttggcctaataggccttgaaaagttctgcctggcggtgctcggtcacctgatcctctttcctctcctcctccttccccctgtgacagccgggagctgtcactgtgtagccacaattctgagacataattttcttaaaaaaattatttgaccagataatacattcacagggttcacaattcaagaggcagaaaagatatctttgaaaagcctcgcatccttggccccagccaccaacttctccacagaggcaactaatgttgctattttgcatatctttttagacatattctatacatatacaagcaagtgtgcttatctattccttttttttaacacaaatgtagcatgctgtacatacttcaacatcttgattttt

SEQ ID NO: 126576 - DNA, 1074 bp, Homo sapiens
ccaggctggagtgcagagatgtgatctcagctcactgcaatcgctgcctcctgggttcaagggattctcctgcctcaacctcccaagtagctgggattacaggcacccccccaccacacccaactaatttttgcatttttagcagagaccgggtttcacaatgttggccaggctggtcttgaactcctgacctcaggtgatccgcccaccttggcctcccaaaatgctgggattacaggcgtgagccaccgcgtctagcctgattaagttactttcaatttaagctttccgatctcaacttggtcctaattgcagttaactttttgtgaatctcctattgactcactttgtttgagtggttatttcaagccttttacatgtttttcaggtcctcagttcagtctctttcttcatgactgatgacttttttctctcctgagacgattgagaatccacttaagagttctcttaacttctctgacattttccattttctgttttaatcctgccttagaggaagtggtatcaatttttgttatgtgcaaccttccccatttctgtttttgaccttatgccttcctcctctggactttgtttcttcagtcactacctcttctatttgttgtcctatggaatttttcccttttgttcttataagcatgctaatatccattttatcttaaaaacatagttgagaaaatcttcctgctctcctaagttacaagtcattttcttttttttctttcacggcctgaaagtggcagaaaggacaggcttaggagttaggaagacctaggtttgaatcttggctttgagttttgtctaataaattctgtgaaactgtttttcctatctgtaatgtagaaataattgtatttacttcacaggtttatatagaattagataatatcaatatgtatctctaatcacggtgtctcatacagtgatcatctcaatttatagcagctattactattctcccacagtacatttctttactatttatatatttatttttagagacagtcttgcactgtcgctcaagctggagtgcagtggcatgatcatagtcac

SEQ ID NO: 126577 - DNA, 1016 bp, Homo sapiens
tcagcctcctgagtagctgggactacagacatgcgccaccatgccaggccaatttttgtatttttggtagagacggggtttcgccaggttggctaggctggtctcaaactcctgacctcaggtgatctgcctgcctgggcctcccaaagtactgggattataggcaggagccaccgcacggggcctgcattgtatttcattgtatgactatggtataatttaaccaagatccttaatggatgtgttttatgtatgtactatataaaataggtcatcacgtatattatgtacttttaaaaacctattttcctcccagttagataaaaattccttgagtccaggaactatttgattgaatatgtatcatcataatcttgcttgatttttgacactcacttaaaacaatttgaatcgaacagaaaaaaagctctagtttcttttttaaaaattttaattctagtttctttttgaatctcacgtattgtctctcttctttcagctctggatgagggggatattgccttgttgaaaacttatgtaagtcctttcagtgtctacaaactatagatgttttatgttgaaataaaaactgttttggtattgtccttccaaaataattagaagaagttaagaaaccaaaaattaaaaaaccaaacaaaaaataaaataaaaagaaacaattagaaaagaatgtctggcagcttctagtaatcttcactaaatgaagttacctacctaaagtttatagaatagatcaaagtatttggcatgtctcagtttatgtattattttaatactattcgtgattaaaatgtgatgctatattgaaagatatttgaaatcatttacacaagtttactatatttaacaagtattactgaattagttctgaaatgaagttttaatgcatagaaatcgatagttttgcataatttcacacacgattttttttttttttttttttgaaacggagtgttgctcttgtcacccaggctggagtgcaatggcgcgatctt

SEQ ID NO: 126578 - DNA, 1008 bp, Homo sapiens
aaaaaacttttttggataaaaataagatctcacaacatagttttgcttcaagtaattgggctctttcctggaactttttggggggaacttgaatgatgaagttttataatatttgacctacacaaaaatgtcaaatgtggcattatatttttggcttgacaattactttagggcagggtgtagttttcagctggggtgattttgccccaccctcccaacccctcccagaggacactgggcaatgtctggagacatccttgattgtcatgactttgagagagggtggtgctgctggcgtctagtggtgagaggccagggatgctactaaacagtctataatgcacatgatagtcctcacaatgaatgattcagtgcaaaatatcagtagtgctgaggtttagaaagcttattatagggtgatgcattacattttagtaaattttgtcatctttctctatgtaggtattaaagaatctgacactggcctggccccaccagcactctgggatttggctgcagataagcagacactccagagtgaacagcctttacaggttgccaggtatgcacgggtgctctgtggcaacttacctttgtctgtattttcaagcacttaatgttagagtctcagggataatgcaatagttcataaataattttgattccaaattccaagtaaataaagctttctacaaaactggggttaaaattttatgccttaaacaattcttcaaaaatatatgaaggcataatcatttaaaagatttaaatgatataaaaagatgtagagcaagaaatgaaaaactcccttctcatacttgctttcccgttgccctttcctcaaacgtaactactgaaatagtttggccctcgtaatcctctgtgtatcttcctgtatttgcatgcaaagaaacatatcctgatttttttttttttagatataactacatgttttgggaatctttgtctttaatataggtatacttatttcttttttcttgtgttttt

SEQ ID NO: 126579 - DNA, 1018 bp, Homo sapiens
gtagtgaataaatggactgagttccttggaataccaaaggatgatctagtaatgtactatagttgaaaattctgtcttctgcatctgcttcctaacttcccatcggcttcgctgactcccctactcccactgttgtttattatgaatggcttcaaatttcagagttgaggttaccagtccatttaaggtaacatggtataggttgggggagtacttgctttaggatagttgtgatgctaagtgtgttaatgtctatagaatacataacaactcacttagtaaattaaaaaaaaatctcccctccctcctcaaaggtttgattgctgttggataggttgtttgcgacattagacatgtagtttagtatcctcagatttcatgctctctttatttctctttatataattagggactctgtctctctcttgttttcttaaagtatggttttggggataaaggactaaacataaaagcactttgaaagcttaaagaatgtattaatgactatcttttttacttccttagcgtggatagaaataaatatcaaattcacattccattgcctcctaagattgacccaacagttaccatgatgcaggtaagaaactatgggagggaaaaggaaggctatgtctttttttttttttttttttgaggcggagtttcactcttgtccaggctggagtagaatggtgtgatcttggctcactgcaacctctgcctcccgggttcaagcaattctcctgcctcagcctcccgagtagctgggattacaggcacccgccaccacgcccagctaatttttgtatttttagtagagacggtgtttcaccatgttggccagactggtttcgaactcatgacctcaagtgtttggcctgcctcagcctcccaaagtgctgggattccaggcgtgagccactgagcccggcagtattttatatatatattttttgagacagagtctcagcctgtctttattttactagtttgtttttcattcattagtgtcataaca

SEQ ID NO: 126580 - DNA, 1201 bp, Homo sapiens
ttagttttatataaagcaagctgttcttacaggatttgcttcaaagtgggatgtcacttgtgcctgaggacatgatttgagctgagatttttggtactttcaggtcatgcatagtgctactcttgagtggacttgaagagcttatctttccttttgtcttctcaggggctcgttttgatgatggtgctggaggtgacaatgaagtgcagagaacaatgttggaactgatcaatcagcttgatggttttgatcctagaggcaatattaaagtgctgatggccactaacagacctgatactttggatccagcactgatgaggccagggagattggatagaaaaattgaatttagcttgcccgatctagaggtaagaaaaccatttcattttaggaaagggatttttgaagttttttcttcctgtgatttttttccattttaatatttgtcaattttctcatttttagggtcggacccacatatttaagattcacgctcgttcaatgagtgttgaaagagatatcagatttgaactgttagcacgactgtgtccaaatagcactggtaagtagaaagttcttgcttatatttgctggtctgtctgctcaggctgctttaattaagcccgtttattttctttttgtttgaaaggtgctgagattagaagcgtctgcacagaggctggtatgtttgccatcagagcacggcgaaaaattgctaccgagaaggatttcttggaagctgtaaataaggtcattaagtcttatgccaaattcagtgctactcctcgttacatgacatacaactgaaccctgaaggctttcaagtgaaaactttaaattggaatcctaaccttatatagacttgttaataaccaattcataaacaaataaatggcttcaaaattgtatgcttttttccatatctcttcttgtaatataataaaaggtgatttctaatgttattaggcagaaaagcttgttagaatatattttgactatttttttgacccacacccgtttaaggatttcacatcatacaaagcgcttgcttagatggcttctatcctaggcatatgctggccgggtgctctacatataaattctcattgtatcctcccatctgtccactgaggaagattatcaaatggatcttcatccaatggatgcataaactttcctacttacttgtagtggcaaagct

SEQ ID NO: 126581 - DNA, 1313 bp, Homo sapiens
gtgccaccctgagatgctgtccttctggctcttcctagaagagcatcagtgtgtataatagtggacaggggctataaatcaccccatctccctatcctgctgaaaatagatactacagaaaagctaataataataatagtattattgtatttccaaaagacactcttcctggagtttaactgatgagtctcggaagggctttattgccttcattcattcaagtgttcattgagctcctcttctgtgtgaagcagctctcaaggcacttagaatttgtgaaacaaaatctttgctctggaggggccaacattctggtgagaggaggcaactgtcaaataaatggacatgtcagggagtaataaatgcaatgagaaaattaaatcggaggtcaacgagtgacggggttagcattttattagaggtggccagggtaaggcctctgaggggcgtgaccattaaacagaggcccgaatcgtgtaagagagttaacccagcagaaggactaaccagcgttaagagtcataccctgtaatcctagcactttgggaggccaagacgggcggatcacgaggtcaggagatcgagaccatcttggctaacacggtgaaaccccgtttctactaaaaatacaaaaaattagccgggcgtgttggcgggcgcctgtagtcccagctacttgggaggctgaggcaggagaatggcatgaacccgggaggcggatcttgcagtgagccgagatcgcgccactgcagtccaacctgggagacacagcaagactccgtctcaaaaaaaaaaaaaaaaagagtcatacccactggtgtttgggtgaccacaacagcccttatgtaaatgtcagtattaaatgatgttttacttcttaagtgagaaaggctgttgggaggtctgtttttcctacttttttttctgaatgacagctgaggttaaaagaaatgagtctgaatcacaagacagcaactaggcttttgagttcacatgtacctctaacataagagatacttttaatagttggtcgactcattgatgaattgattgattatttcatcatcttggtctggcttcctatgacaaaagtgggaagttacttgtctattttttctaaatgataccagggatagtactatttaaatagaaccagagtaaaagtggatacctatttcagttgtaattttagattaggtaaagtagttcctagatcagaccaagtttacaataaaatatttgttagaattatactgatgaatctctccaacattaaaaggaagcaactgtatagaaatagctgtcattctttt

SEQ ID NO: 126582 - DNA, 1038 bp, Homo sapiens
gaaaccctgcaaccagtctcagctgggtttttagtcttccagtaagtcatgagcggccagtggggaccctgtggggttcagttgtcatgggaatctgactatttcaaatgctgacagtgagaggaagaaaatgcattgagcgtaacacactactttaaaatctatgacttttgacactgagaaaatgtaagggacttattaagaacacagcagggtttgaaaattacttctgaaacatcataaccttatatctgtagattcacaaacctaatgaacaagaaaaatcactagatacctatattaaaaattatctgaaaaagcctctcccaaattagttcttataaattatataagaaaaagtatattgattaacatattaaacccataacagggcagttcaatagcaacacactgaacagtgagggacagctcagaggaggctgaggtttaggttaggactcttacgtgacctaggtttgtaaatatgcttcatgggataaacagtgcattaatgacatttaatcattatcctagttgcaaatcaagcatcagcactagtaaaattaaattataaatggatataaatatatgtatatgtacatatataaataatcaagacaaaaatatatattaaaataaaacaaaaattaaattataaatggatgggacagaatatatatatgtaaatgtatacataatcaagacaaatgacaactaagatgagcattaaaaaactaaaaaacaaaaactaagaaacagacaatgctactatcacagagcatgtctctgtctgagaaagtgacttactttaaggatcatccagacaactccttgatgaattcaaggatgttgcttatagacagtatttttataaccaagttctgttgaacatttattgaatgtaagaagcccccacaagactgtaatgccaaaatatgtgctgggtgatggggaaccggtaattggccttagcatcctacagtggcatggtagctgtctaagagggttatgcttagggtaggagtgtgggattttgca

SEQ ID NO: 126583 - DNA, 1050 bp, Homo sapiens
agggaagaactctgggatatcaggaggggagaaattatcaaataggaaactggagagaaggatggaaaggaggtgaagtttcctataagtgactgtccatgcatcctcacagctggtcacctgtctcctgcccggtgcatttcctctcctgtactgccccaccttgttaccagccccagatgtggcttcccggcataacactaaccagattttccctgcccctgactgggtcatcagaactttcctgttttgtaatttactttctaatggcttgctaaatgactcagcagctaatttgattaatttatttagatgaatactaacagagcttaatatggatgttggcattttaacaagggtcatctgcaagtggaattctctaattggaagatatgaatctccaattacaggagggaatccaataatgagaattaggctggccggcgggccagaaatttctgttaagaggaggcacttaaattatactcagcatctactctacctaggtgtaaaagtaatttaggtggtagcagaagaaagttactaagctgtaggtttttagactatacataggtggtcctccattttacaaatgtcttctttcaattaccgtgagccaggtatacataggtggagaccttactccctcttccctcttactttcaagtcattttcaagcccatttcaagctttcgttgatgcagcaattcctttcaacaactctggaagagattgtgatctaccaagcctcatctcattagtcataaaggggtcaaagtcttgataccaagatagcagttgagactccaggctctggaatccttggatcaaataccagctgtattgctactggctgtctggccttaggcaagttatttaatgtgtctctgtgactttctcacctgtatagtggaaagtagaatttacttcgtagcatttttacaggattaaataaatgaatatatctaaggcagtagttctcaactagggacattttgcccgccggcaaacgtagtcatttctggagacagttttggttgtcacaactgg

SEQ ID NO: 126584 - DNA, 2181 bp, Homo sapiens
cagcctgggcgacagagcaagactccatctcaaaacaaacaaaaagaatcatgtgtcaaaagtactttggtgcccataaatttgggtgtttctagagttgaacgaaagaaaaacatataaaataactttatgatttaataaccatactttttgcgtctttatgcaaaagattttttttaaactttttagttctgcagtattgttttggcagttttataccatttggaaaggcttagtattcttcagaggcactgttacaatgaagcaagttattcttcagtccaacattaggtaccacaatagccatagcatctctttttagctatttttaaatgtgttttcataagcagtatctatagtttcccattccacattttaaaaaatatttgatatgtcagtcatttgcttagaaacttttttagaaagtatattgcaaaatgatagacaaaaacattaattgatgatggtttaataaataagagcatgcaattagtgaatctttaaaaggctgttctcacatggatgattatttttgcagaattgaatacttaaggctttaattttatacttattgctagatcattatatccaattattttgaccatttattcaaataataaaccaagtctgaatatttatagtgaagaatgagttttgtgaaaggagaataattatatgtctctctctctgctattttattctgcctgccatcagagtacaaaaatatacattcacatcatctgtttgttgtatcatattcttggatcatacagatttagttacaatacacacacaggtcagccagcgttaaaagactgaaaagaatgaaaactataaatgaggacagatgagctatgcattatgtaatgacaaaacaggtgtctcggaagataaacaatgttcagaagcaaagaagatttaaatacttttgaatctctaattactttattctggttattagacaaagcaaatagctttcaaatgaagtctaaactttctgtagtacaattgaagtacataatgttgaatagctctagcttcgtttacttttttttagaaaggcaaacttcgtgcatggcaaaaaaaaaaaaaaattaaaatattgtgttcctaataacattttaaagaattaatgtcagtcctatcagggtgcatttgatagcactataggatttttagcattagtcatgaattattttgcatgtgctttccagaatcatacaaagctgagcaatctaggggtgagaatgctaacatattatctgtttttgtttttaggacggtgaactttgacataataaaatacttgtatgatttcttgtgaaaacaagcttcaaagccatatggacactgtgacaatgactaagccaagctgtgttcatccagctacttagctggccaaggagaggagttctttggctctattggatttgtccaaacaggtgctggcccagcatggaatctgatgaaaatattctgattggtctgggtggatgtgagcagaagactatttaccagggaccctggagtatttggaagcaacgtgttaattataaacagcagggtttgagcacaatctgttctactcttaatgatgttatcttaacactgaaattgcctgaaacccatttacttaggactacattttgctctgtgaactatcccctgcgctttgaacgtgccagcagcccttgtttatatgcccattcttttcacttcctctccacaggagcctctgcagtcgcttgccaaagcagattttcctaaggccactgttttaaaagatcatagttgcaaaatataataaatacaagttctttttaaaatccaagcttgtgtgtatttatcttttcacttgcttttctcaaaaggcaaggtagtttgatcagaaacagaccaactttccctctttcagcctacttgataactgtggtatgcttgtataaggtttatctggtcactttcttaaaattagctacccaacccagttttttttttttttatcagtatcatggttttattttctttctttctcttttttaaaatcactggcctttaagagttccacaataattttttttcctgttatatcacttgtgaactttggttttgattttcttgtccatatttttgaagaaattttcttttagcatttgaatgcttgaaaattattttaagcag

SEQ ID NO: 126585 - DNA, 1852 bp, Homo sapiens
ccacccacctcggcctcccaaagtgctaggtttacaggcatcagccactgtgtctggccaagagagaggattataactgctgaaggggttatgtggttgagagagggttattatttattttttaaagatttgagcatatttaaatgctgataggaaagaacagatagagaaggagagttaatgatacaaaatggagaaagattaatttaaagcacaaaattactgaaacgttatataagcatggggtttagaatttgagttgcaagagctgtagatgagagagcggaatcttcttgcgttataacaagagaaaaagatggattctgatggagctgaatttggaggtttggtggcaaaaagttgagggagttctgatctgatgaattccattttctccgagaaggaggagacaaaattgagactaagggcagaaatagtagcagtttagagaaatctggaacatttgaaatagctgccatggggaatggaagaaactgttgaaaggaaagcagtttgttgggagtgttgaggtttttgaccttgaatttacttacaatggcaccaatctgtgagacttgtgatcttctccaacaccaatccatgtgctagagactgggacagcaaagaattataatcgaaatcacatcgtactggggttttgccaggtaagttcagtggattccagcaagtaaccacttgacctgatgaatcatggagtcttaagctaggacgggcaggaaggaagtaaagccagtcgggggctaataattcagtgcctagcatatagatactcagttaatgtttgtagatcaggaaaaaatgaagccatttgtgaactgattgtcccaacatgttccagatagcaaaaaagggataaattggggatcataaggtagaatgtctgaatttatttctttagaagtagagcatttctgagtgtgattatgagagtggaaaaggttattggaggtaagaaagagaaatatatagtgaagtcactaggctgacgcaggtcttgggttggaaaggaagactgaactgtatgctaaattactcagtgactaagggatggcgacaaagaggatggggatggtgagcagaatggtcttaatctcagagtagcagagctttttgcacaggacaccagccccacctgacagaactgtccgggggtacagtagagagttaaacattcattggaaggagctgaagaaaagactatgtcctttgaggggagcctagtttcagttaagcctggaaggggaaaataaccattccttgaagagatagaggatatagagactacagtggaaaggtttggacagagaagctgtaggaagctgattctagaaagggaacatagaatttggagatagagtatgggagaaggcagataacagatgactgaaaagcttactaaattttgttcttggattgttcttaatgtgaatggtagttacacattttcaattgtttttcttccacagtcagtgggaagacactataagataaatagaggttacaacttaaagttgtatggttgcaagttgtcagaaaaaaaaaaaattaaaaaaatctcaaactcaaactgcccacaaaagtaaaaggaaacaaaatagtatcctaaagaaagaaaaagtattttaatgaatcaacaaaatgaaataaaaggataaaggcaaaattaaatccttaaatatatgccatataattaagttgtattaacgtattctaaattctgatttaagaattactcctaggaaaattgccaccacactattcgtgtttactgtatttctttccagctggttactttagaaaataattcatttatgttctgtgggagaatctc

SEQ ID NO: 126586 - DNA, 1059 bp, Homo sapiens
cttggttgttagactggaaaacatatgtacaaatttgtatttacagattgcaaagtagtcattttctttgcagacgttttttgtgattcagttatgtatctttatcagactataagatgtttcagaaacaaaagtattacataatcttattaaaacagtttcttataaaaatgttctcttttagattacctctctagtgacccttcagctgttaaccctggttggccatgacgatcagcttgatggaccaaaatacaaatgcacagtgtctctagacttcatcagagctattgcaaggtaaaatgtcttgaattatgtaatgatatactaaatataaaaattagtgttttccaaatgtgatgtcattagtcatgacatttaaacatgaaaaaatcatctatttaagtgccaagaatgaataagctgtacgatagaatgaaccttctcaaatttacaaatgatgtaaaactgggagaaatagctaatatgttagaggacaaaaatcaagattctgaaaaaccttaataggctggaataaatgatcccatagtggcaaggtaagatttaatggacagttggctacagaaaactctcttgtattgaaataagatgggagagagctggcttaagtcctaaattttttagctgactacaaggctttaaaaatcctgacttaggtaacactgatagaaatatagtgtctaggtcaggggacataatcattctactgtgcgttgtcacaggcagatcaaatctagtgtgctgtgctgtgtttagagttttcagagagacaaatggatacatactgaaggggcacgaggagagtggtagaatgaggaattgtgtcacatccctgactgaaggacagagtgtgagagaaaagccttaggaaggacatgtgaactgtcttaagtgtttcaggggctgtcgtgcaaaatgaatgaagctaattctgagtaattctagaatgttagaagttctggggaagaaagtacatttgtcaaaatgaaagctgtctaaaaatacaagtttccttacaaagaggtgttcttagtgtta

SEQ ID NO: 126587 - DNA, 1046 bp, Homo sapiens
gtgttaaaatgtttaatcaaatgtgatttagaaaactcatgaggatatattctcttgtatttatccacaaatctcctctttccactgttcgttctttcacttttattatttccttttgtttgaagaacttccttttgctcttctttgaaggtcatctgctagtgacagattcttccgttttaccttgttcgagcatgtctttatttccactttattcatgaaggatagttttgctagatatagaattgccagatctttcgtcaggattcttctttaatccaggggaggaatgagcctacctgggtagccttttgccgctcagttgtggattggaaagtgctgggcttggttcacctttcgctcttgggtggggaattctaagactcgcaccctctatattgtttctgtagccctagggtccctaagcagcccacctacctctttctacctttcagagtcctcttttggtcgcctcttatattatttccaggatttatagttgtacttagcagggaagaataacaaatatgaatctatgcatcctgtctgggtgggaagttcttctgtatttatcttttttttctaaccctctgtctaggctctttgttagtgtttgttcctgaaatgtgttccttggtaattcaaagctcaattgaatgagaagccttctgtaaattagtgctaaaaaaagattacagaatgttttaccattattatttagagagcttttttttccaacagagattaaatccttctaagtcattaatttatttactgcaaaatatttcaatttattattccatgctggaactacagactttgtgtaaatctccccctgcatttggggacctaacaacaggaatgactgttgtgtatctcttttctctaagtcacagatgtgtcactgaataagaagggtcgaagttaatatacttagccatagaagactatgttaactcttttctgtgtatcttcccattcattaaaatttcaggcctactctcattatggatttctacaagtttccaaactaagaaggctatttg

SEQ ID NO: 126588 - DNA, 1968 bp, Homo sapiens
gtttctagtttttagtttagctaaatggagaaattatctctgaaccgtctcattttctctccttcatttacttggtcaagtctagtctatttttcctaaatacaaatgtctcttaaacattctcctttttttccaccctcactgacattaccttaaatcagtagcttccttattaggcagttgcaccagctttctatctggtctccttgtcactaggcacttgctggttcatcatccatacggtcatcagcataaatcttgaaaaataaatttggtctttcttttctggttatacttttttttgatgagttacattatttacagaaccaagtctacattcaatagcatttattgcaaggtccttcataatctggccccaatttctaccacttccttcattcaccatatataccattcacaataagctgtttcctctctgaaaacacactaattttaaatgtttttatattgttgcatgtactttccccttacaactatcgagctctctttttacgcatcatggtccatctcccaaatgtcatttctcagtgaatctgcactttgcctccctcccttttagttcattttcttctctatagtcagataattatgtttatgcatattataatactaacatagcactcattttatgtcattaccattttatgtgtttgtctccaactaccctgatgtttgagggcatagacgttgtctgttcatttttgtatctcttgcacaatgccatccatgaacatgagagtcattgattgaatgatctcccattctcctaacaggcatttatggtcttcatggttgctaaagatttgcaggcagtttgcatgctaaaaagttccagagattagaggctttatcttcagttgctctgtgtataaacatacatgctactttttgtttatctgagcatatttgaagactagcaaaccactctcctttttttttttttgaaatgaaaatttatggtagtgatttaaagttgaactgctttgatgatatttgcctatttctgccatgtgctgcatttaccacctctgctttgtgtgtgtaaaaatgtcagttgaactctcaatatatgccatgaaccgtcaagtctcctgaattcagatcaaatgtggtgcttgttgggttgtgtggaactcatacactgaaatttcatttgttaagttcatttatttaaataatttaatatgtttcagattgtgaagctcctccaggacaagcaggataggatatttcttaagtcaatggacatataacaacctatgaacgtataaaaataatgagcatgttaaaaattaattacagttgtaaattgattttcttttgttggcagaaataacagtttattagccgagaaacaggttcacactgtttttacatcaagcatttccagctgaagcttgttagtagctgcctctcagattaaggaaaaaaaaatcctcactgtggtacatgaactcctattgttacaacataaataatcagctcatcccctacacagatgagaacaaaggacataacagtacacagagcaaagattaaacaaatattgtataaccccatttaggatgtaaatctaaaaatattgtacacagaaagagatttttgtttttttatttttctttgtgaattcctcagtcataacgtaggacctagtcaaaggaaaaggaatatatactgtggcttttgagtcagatagattgattattttaagctaaggtgaaataaaatatgttaagcagtgtcagaatgctgctgatgtatgaaagctagggaagtactattctctttgataacaggatgcctcagatttttaggggatttgtttaaactgaggaggacaaaaaaataacaatttttattttgaggaaaaacatcagtggaaaacatgactaaaaatttagtagtaaaaccactgacttttaatacagttttttaaaaacaaaaaca

SEQ ID NO: 126589 - DNA, 1005 bp, Homo sapiens
tatttcgtacctggaggtaaattgctttttattagttataatgtgtctatatgagatgatcatgtattatttttgtattcacctgttttaagaatttattttatagtgatatgctatttttatagctggatttactgactaaataattgtttaaacttattttgtgtataaattgatcatgtatgatatagacattcagaattctcctgaagcaaaagtttatttccattgtatttcaaatctaatctattctataatgaagttataaaaatagtaactcaaggactctttaaagtttattaaaattccaattgagaataataaatttataatagtactagcagcaatattgtattgtagttggcattattctgaatttcttcattctctattgaattttaaataaaattctattcattagtctcacaagtaagtgaagagaatagtagcacatttaacattttatgttaatgttcagatttattgaacttaaatatgactttaaatttttttttagattattattttagtcttacctggtttttacctttagtacaattttgcagtcattatcttgggtcatttttaaaattttcattccagtaagataaatgtagcccttctatgtatgcctgaacttcatgggtgacaaagcattaattctggtatttcattcttttctcctttcctttctgctctcatcataagatagaatggaatacatgcagtaaatgggtaaagtttataggtattctttctaaatttttaatttgatcagttatgattttgaagaccatttgtcagcttttaaagaaatagtattgtctttttttccagaaatatattaaagccaagttatgctttttaattctttttttcttaaaagaaaaaaatatgggaatttccgaattatctgtttcattctttttatagttctatgtctcctcttactcattcttacctcccctacccaaatactcttgtagttaggtcagagcaatagga

SEQ ID NO: 126590 - DNA, 1061 bp, Homo sapiens
tatggtggctcatgcctgtaattctaacactttgggaggccaaggtggggaggattgcttgaggccaggagtttaagaccagtctgggcaacatagtgagaccctgtctttacaaaataatttgtaaaaatacccaaacattgcggtgtgtgcctagagtcctagctactcaagaggagaatctgacataggaggatggcttgagcccaggaattcaaggctgtagtgagccatgattgcgctgccactgcattccagcctgggtgacagcggaccttgtctctaaacaaaacaaacttaaaaaaaggataaatcatgatcatatcagttaaacttttaacttagagtttgcaggttagatttgttagcatttttaggggaactatatataacaaaaatacattgttactggcagttttgtagtacagaaagtgagtgctctggtataagaagaaaatccatgtttttgttttgttttttacagacaagcaatcatctccttgggccaaaaccatttccactagacagattattagcaatattatatagtatcgtggacagcagagttgctccaacagcaaatattttttcccaggtaagcttaatcatagattattatctgtcatctttgtgggattcttcagatagtagagtcaatagaattccaggcattcagatttttgttcaacatatgttactgttttaactatataatgaaccatgtttttggtaagtaattgaaaattacgtatatagaatctttgggggtatcactaaatttacatatgtttacaagtataacctcatggcaaataatttaatttggctctttttcaataaaggaatttttaaaattaaataatcataattatcttgctaattaaacaagtggcttgatgaccaagttgatgaattgtaatttaatgaaaacaaaattgaaaaatttttttttgtaacagagtaatctacaatgttcttattcctcatctatgtactttgcagatagatgtgcttttattaaaaaatgctgttttccagaataattaagttctcagaatttc

SEQ ID NO: 126591 - DNA, 1048 bp, Homo sapiens
atgctctcaatcagtgtttattatgtgaactgtgcttaactaaaatgccctccgtcagcgtttattatgtggattgccagacttatgggatgaataaaaatccatatctctggaagtttcatttttatagcaatgtatatgctgaactaaatcaatataataagctcttttaggaaatgtcattattttattttagaaattctttttttacatgcaaaagtaattttatatccaatccaagtctaaacgaaattggcctaaaatatgttgaagtctaatatatatacaaggtgataagaagaataactatttaaaaacctgagatatacagattagtattatgtgtgccatgttttaaataaataacgttttctggttttgtggaatactgtcttttcaacttaaaatttgttttccttaattgcagcatcatggaaaaatcaagaaaaccaactttctaaaaaaacacgaaaaggtatttacattttaatttctaatggaagaaacttaggaaatgaagataatataggaaatagatacatctgtaattgtatttgtcatttgaatataggaacttatttgtgttgatatggtaccgttatactgtaatagaattttgttatattgaatatagtgattgaatgcacatttaggtgagctgctgctggagtttaaaactgagttgacaaagttttttagtgacttagtagatgaagaagtttaccctggattatttagttaaatacagccaattgaatacaggcattttcctcttttctttcccctttgaagcacccacaacaaataaaaaaggtaaactcataaatactaagcagatgagagacccccagaatttgcaattgcatggtaggtagatattgaggtgaccaagcagattagagaaaacgctaaaacctaagcctcaaacttagctaatttggccttaggaatctggaaaaaagcttagggattagaagcactaagtacttttgaaggtggggtcagataaggttgaaactggtgaaagaagcatttagactatttagat

SEQ ID NO: 126592 - DNA, 1106 bp, Homo sapiens
gtgtttggttggaaaaaaaaaaaaatctgtagacaagtggaccctcacagttcaaacctatgtcgttcaagggtcagttgtttattttgattagccaaattgtgtaccagttgctgttaacattatgacactttagtgttattacaccatgcttagatctgaaaatctaaaattaaggtaagaaagtttggctaaagcgaataatttctttttgattcttcttctctacacttagtagaatttggaagatttttctattttaaatcattgttttttatgaagtagaataggaagaaattattttaatgatttggttcttagttttctgttatctagttatatgttatatagttacacatttatatatatctttttctgtgccttattgaattattttgatatgaaatacttgggaacaaactaatatatatatattttttttaaataaatggaattagtatgtttttaaccagtttgcttaaactgctgttcagtagaattccagtgttgattcatggaaaactactaagtagttataattagttaattagtactcctcaaactttagaatacatagagtttctagagagatcgttaaacatagattcctgggtctcatcctcagagattctgatttggtatgcctgagatggtgccaagaacttgcatttataacaatcgcaggtagtgctgccaatccaaatactttgagtcatacgaaactcaatgatgtttagtttatgagaatgttcagaccttagaaaacaacagttaattatttgtgcttgaggtttttcattatatgttttatggttctatgtgacataaatataacctaaaagaacaaattatgctttgttactgtagggaagttcacatttttaccctgcagttttgataatttgaatctataaaacaaactaataatagattaacgggaaaaaaaaggcatacaaatttattttttaattttaatttaattttaaatttaattttatattaagttccaggatacatgtgcaggggcgtgcaggtttgttacataggtaaaatgcgtgccatggtggtttgctgcatctatcaacccctcacctaggtattaagcc

SEQ ID NO: 126593 - DNA, 1171 bp, Homo sapiens
tgatattgaaatgggaatatcaaagtattattgccattcaaatgggaatatcaaagtattaaactgttaaggtttgctgccaatctcaaataagatgtttgtatttctgcacttacaaaatttttattttggaactgtgagaggttattgtataattactacatttttttggatgagcagctctcatatttgtgctaatgtatcttcatttttttagtcactacattaagatgtatatttatattgtgattatgacatctgtacgaataatcagactagacttgtaaagcatattaagagtgttgaaatcttcatttaccatatacttgggttaagtaccatgttgcgcttatatcttttgattttataaatctcattttctttactgtaactcatacagtaccaattaccagcccttgtgtttcttattttcttgggggctctatttaatcttaaatttcatagatcctgatgattttggtctttggaagaacacaatagctttttgtgttgctgaatagctttgtggattaagactgggctgtcatacagagatgatacttgggattcagagattataactgtgaagtataagatggttagcagtctataaaaaaatagcattccatgaccttggcctcattaacactatccctctgaactaatcagctgtaaacataccttaagattaacacatttttgtctgtttccaccagaacagcagtgaaataacaccttctgtcatagccaattagctgagtttttttttaaacagcaacccaaaatagatggagtctttattgtcattaatttctcatccataaaaatcccaaaataaaaaagggtaagaggaaaagtgataaaggattttatttaaaaaaaaaaaaaaaaggctctgtacctgtgtcagcactgttcatagttcagtttttcatgacccattttaagtactgaaaaattatttagaatttaagaaaattattaaaaaatgttgatattacacatttcagtcaagttgaattaatgtaagtaattacagaattaaatttttaaaattctataatttaaatttatagatttaaaatttaaaaagtaaagatacaaagcagcatagatgaaagtttgaggacaaaagtaaataaaatggtcttactaattttagtgagtatag

SEQ ID NO: 126594 - DNA, 1022 bp, Homo sapiens
ttctgagccctccatcctgttccaacctctgcctattactcagttgctataacagactaccaaggactgggtaatttataaagaaaagacatttatttctcacagttgtggaggttaggaagtcaaaggttgaggtccctgcatctggcaagggctttcttgctgcctcctctcatgatgaaagtagaagtacaagagaggatgagagtgagagcaagaggtggcagaagtcccttttataataaagccattctctcaataacccactcccttgataacaatattaattcattcatgaggacagagcccttatgacttaatcatcttttatgcagcttctcttcccaatactgccacactggggattaagttccaacacatgaactttgggggacatagtcaaatcatgtcattttgtaaaggctttgtaaatgcatttctttttgttttgtttttttgttttttaaaggttctagataaagcagagtatctaagagatatggaagcaaatcttttgcctggatttcttagattacaagaattggtaagtaatgtgagaaagtgctttctccccacaacttaatcaatggattgtgttgtaaaagtttttcattttgctatttgataggtgagaattagtattttaatataattttagtttgcatttcttttatcagtaaagctcagtgtttttttcatagtaaaatcagttggtgatttgatagcatttattcttcaattattttagctttttctctgtaattatgaagtcactgctttctattaaaagttttagatgttgctagaataaatggcagagggccagactttaaaatctcaaggattttaaaattttctttgcatttcaaaataaggataatctaaaataagaatagcatggctattctggatcatctggatttctaccttataatcactcagtgtcagagtttacttttgtatttcagtttactcttgtgttggcttcacaaagtacagtaagtcctcacttaacatctcag

SEQ ID NO: 126595 - DNA, 1176 bp, Homo sapiens
cttgggattacagacatgatccaccatgcctggctgatttctttataagaattctttataggaaaatacaaatttgctttgaatttccataagaaagaaatggcaagctgaaagaaataattgaagtgagtttaatgaagggacagttttataatggaaattttatgggaatcactaagggatgatggtacaccagggcctttaccacctccaggcctgaagggaccatagaaaggagctgttattggaaccaaacaagaggtgtagccttagaagaggggctgtccaacttgatctttggtagaagagtatccactgccaagctagggccactgaggggtcatggtgggagtcaaggaaatcaatatccaaacttctctcccaccattctcccttagtctcctgctggttctttccattggcttctccatccagagacagaaaataagagagtccaggtgatgtaattctgtagctgtcaggctcttggggcatggggtgggtttggtgggatatagatttagaaaggcaaatggagactatccagcacagccattattgtgtttgtgtgttttcttctttacttacagtgttttggttttcgttttcagctcccacatgtgtttgtgaattgtgttgaatgctttacattgaggctgcttttggaacaaattttaaacaaattgaatcatcttagttcttcagaggatggatgttctactgaaataacctgtgaaacatttaatgactttgttcgcttgtttaaacaagtaaccacagctgaaaatcttaaagatcagactgtatatattgtaagtaatttcatttgattagatcatctcttatcttgaaaactgataatttattagatcaattttcatatatttgttttgagtctcattatgtacagtgctctgtgccaggtgcttttagtatacagaaatgtattaaatatattccttatccaagggaagcttcatttaatagaaaaggtatgacacatacatacgactacatgcagaatgtgataagtgattgtcaccagatgcaaaatattgactgtgtgtgtccaatacagcttcatgaggtattagcatttgagacagacctaaatgaatcagagtattctaggaagaaattgaagtagaggaatttcagatagaattatataagtaa

SEQ ID NO: 126596 - DNA, 1127 bp, Homo sapiens
cagggtctggaagctacagcttgttcgtctaatcaaggctgttgcctgtttttgtcaacgaagctttatttgaacacaattgtgctcatacatttacatattgtttatggttactttcatgctacaatgacagtagtgagtaattacaacagagaccatatgggccagaaagcctaaaattaaaattcggtatctagccctttacagaaaatgtttgccaaaccctgacctagagctttcttgtttatttcggcctgcctggtctcctccattagactgcagcctgcttgagaacgtgtccatatttcccccagtgcaacttgtaatgcactccatacagtgagagcattggattcctgattgaatgacaggcattcatccaagaaacatttttaagtgcaccagatgagcagcaaaacctagagattatttatattttatgtggtgaaaaggctatttctatgccgtttcttctcaatacattgatttttttctttgttttactccacaaggtcattttaatgtaatttttaaaaaaaccttcaaagtatgttgagatttttaaggagacatagtctctttgaggaaagggactatctagttcactgttgcagcctccatcctactacagtgcttggcacagagatgctcaacagacattagtcaaatgaattatgaataaatgagcttccttttctggttgcaaataattttatttaaaatatgttgtttgaaaacatatgtacacttgaatttcacaatgttcatagctccatggttaattaaataacaccccggcgtatgtttgtgtggatgatgccaacggatttgcagggagatgatctaaaaagcaagcattgataaaaggagcccattaggccaattctgtatattgcgaagaacccctcccactccagaacaaataatagtattatgattaagatgaatataagcagtctccgtttaaaaaacaggtagtgtttcagaattgtgtttgtatggcaagactttgacctacatttccttacataaacattctcagaaggaatggctagattctactccaaagaaattattgtggggaaagggctttgtttggaagaaaaggaatctgggttcaatgattc

SEQ ID NO: 126597 - DNA, 1127 bp, Homo sapiens
cctctccagaattctccaggacctgaggagtcatggacctgtcttggccaaatatctcctgattataagaccatttgcaaacatgttttattttccttttaacacattatgtggacagtctaattatccatatgggcatcttcacattctactgtccttttaaagaaagatcgtggtgtatagcactttcctttggaatccatgttacatctgttttctgaacttttggttgttcacaagcccacacctgaagaaaagcatgcctagctggaaagaaggtcatggcctctcatttactttcttttgaaaggtatttctaaatgcctggctgactttgatggctcaatttctccacctatccctttttacttattttcaatcatgtataacctaacagaagataatacatgctaagcggtcttataagcatactaattgatattacgaattcctctccaagtggttcttaagcatcaaaatattcaatcaccaatatgttatccaactctatatattcttaaacaagtagcagtttgtacaacctgtctttgaagcattcagaccaaatgaaatgctgctgaaaggaagcctgcttcccaaggcaggttaagcctgcttatcagtagtatcagctattctgagccatgtgtagctaatggcattggaaaggccaagtccaagtttgattcttcaggcagaaggtcactggttgaaattcattctgaaaataaaaagtctagatttttaaagtttctgttggatataccaatgtcttgttttaatagctgccatttctttaatgcctaatatgtgtagagattgaatcctcacagcagccctgcaaggtagacaatgttaccactttattagagaaattgaggattgtgtagctaattactttgccagatatgtgaaggtgcctggatgtaaatactggtctggttccaaatcccacatcctttgcagtccagttgctgccctccctctgtgatgttcattctccccatgcatctatccctccatcttccatctctggagcttccttcaacagacttccccttcccaactcagaagtcatagctttaaactctctttcccactctattgaaaacttccacaattgaatt

SEQ ID NO: 126598 - DNA, 1032 bp, Homo sapiens
tgtgagtgaagccatcttagaacctccagcccagcccagtcattagctgaataccatgcatgatgccatgtggagctgaagaattgccctgcggagccctgcctgaattcctggtccatgatattataagcgtgatagaacggttgctgttttaggtaattaagttttggggtagtttgctgtatgataatagataactggaacaattttcagtaataaagtcacaaagaacatgaatatttaagtggcagacagaggaagcaaggccttcaaagcaaaataagtagtaaggaggaaaacaaggagagtgtggtgtcatggaagccaaaagaaaggagtacttcaagtaggaaggagtggttatcaatgtcaaattctgctgaaaagtagaaaagtatagggactgaacagtatcctttcgatttaatgccacagatgtcactggtgacattgaagaaagtctgataagttcagaagatggtttgcaatgagaaggtagaggcggaaggagaaagtaactatgtcaaggagcttcatgatgaagaaagagggtagatgcaggttgagaaaaggtttttattttacagttagtagatgcgcaaatttcagtgatgttgggaaaaatacaaaatgcaggagagggtgaagagaggcactgggcaaatagatacagtaagtattctgcagaaagcagaggggatgtcccagtgtgcaagcagaggaatttggctgacacagaaggagggacccctcttccactgtgacaggagagatgggaaaaatgatgagatagaggaagataaatatgtaaatgtgtagcagccataaggtgatgggctactttatctgatggtgcttatttctcctgtgaagtaggaaacaaggttgtgcactgactggttggggagttgttgagataggacatttaggagaagaaaaaagacctgaaatagccactgggtgggacagtaggggaccaagcagagaaacaaagaaaatttgtatccttgggaatggtacctatttctgtgg

SEQ ID NO: 126599 - DNA, 1044 bp, Homo sapiens
attacaggtgtgagccaccacacctagcctatgttgtctatagttttatcaaggacagactaaggtatattggaattaaaaaaaaagtagattttaaccatgaaggtttatttcttgctcatctccatcatgggctgactgggggctctgctccatgctcctcatttggggatgtatacagaaggagcagctaccacctgagctgctctgcattaattagtctctaatgcagaactaaagatagctaaggaggcctcatttggccattaaagtttctagcctgatggtgacatgtgccacttctgctcactactcattgactgcaacaagtctcacagccccacccagccactaagagccaggaggtacaatcctatcatgtgccaggaaggtgggaattcagaaatgctgggtgaacagcattagtgatgatcacagtggcccatgcagtgtgcatctcctctttctttttcctaggagattgctgactttggttagttttctatctctcctccatgctgaccattaatttaggcaaagctaatcccattttctgacaccaggagtggactttgatgcacttaagccaaacaaaataatacaaactaactgtgattgtttcaggaaagaagacgagatacaattcaggctaatgagatgccatgcaaggtttgcagaagcttttgggaaactttcttttcatttttttaggatatgttctgggagtaactcccctgctttccctggatgtgtgcgagaaagcataggcatccactttctgaccaacaggagacccagtctcaggatggagcagacaccatgcatggtagagcagagagacagatacaacctaggtccttgatgaaatgattggccactggatcagccacagttaaagactgcctacctttggacttctggttatcttaggccaaaaatgtcctttttgtttaaggcactttgagccgggttttctaagacctagcagtctcaaccatccaaactaataagctgaattaactagatttcctgtcatgtccttcc

SEQ ID NO: 126600 - DNA, 1051 bp, Homo sapiens
gtgtaaacattttatagaacaattatcaaagctatattggacttaaatattggtcatgaatgtatgcacaccccataggtagctgccctccttgggcagcttttgactcctatgccaaattttaaaataaaggccgtggccaggcgtggtggctcatgcctgtaatcccaacacttcaggagtccaaagcgggcggatcgcgaggtcaggagatcgagaccgtcctggctaacacggtgaaaccctgtctctactaaaaatacaaaaaaaaaaaattagccgggcgtggttgcaggcgcctgtagttccagctcctttgggaggctgaggcaggagaaggatctgaacccgggaggcagaccttgcagtgagccaagatcgcgccactgcactccagcctgggcaagagcgagactccatctcaaaaaaataaaataaaggccatatgtttaatcacattccccaaaaggagaacttcataaggcactaatgagtaatgtttattttacgaatgattttacgggaaaaattacagaggatgtttaaattgcaaaaatactcctccccttttttctcctccaccgccccccaaaaaaaatcctttgcagttatcacctaagctttttgggtgtgtgatttaaaaaaaaaaaaaaaaaaccacaagacctaccttaacaatttaagtatgcagtattgtttcttctcagctgcccagtctttgtaattcttatttcttatgcagaacaatttagcatttgaccctactatcaccaaaaaaaaaaaaaaaagaaaaaaatatatagcagttgagggcagtatacaagcttagtaagtatattctggtacttgcttaggaagtaggaaatgtgatcagattctgttctctaccatatgacactgatttgcaaggccccgggtacaggactactggtaaaaagaaccctgtaacttcctgtcacagagggacacagcaatatatataaaacagcatctgccgtaaatctttggggaacgtcttactagatttaaccagctaattttactaggtatt

SEQ ID NO: 126601 - DNA, 1019 bp, Homo sapiens
tctcccacgctggagtacagtggtgcaatctcggctcacagtaacctcagcctcctgagtagctgtaactacaggtgcctgcaaccacacctggctaattttttatttttagtagagacagggtttcaccatgttggccaggctggtgtggaactcctgacctcaggtgatccgcccacctcggcctcccaaagtgctgggattacaggcgtgaaccaccgcacctggccaaaatttggtactttataactcaataattgcaaccagaccagctaactttttgaaaacttggggctctgtaatgttcagatgaaggtaaatgtagggaatagaccctctttagattgagggagtaggagttttgacatcacaggtcgtttggacttaaaggtatgaatttgaaagtagtttggttatacatgtcctttgcaacctagcctctctttcattagcggaattaattttggtggagggattcattcatattgttagtatgtatcgagggaggcattgtataccagaaggctttgaactggttgggagaagtgttcttataagaacagggtaattattaatcataataatctttgtcaaggtgcctaagtaactcccttatgtaatagcagccagtgattagatagcttcacatcaagcaggttggatttgttccttttgaatcaaagaaccctttgcttcataatctaggtcttgtgtctcaccgaatcctttataatatagaataaatggttgaaaggaaaggctcacattctgtattcctgaaattcaaataggataactttctcaaagttttaggatagaccaaataatgtatgtccatgtagctctaagatatgagtcaacaaagcaaaataattatgaaactcttgtgggatttttggtagagtttttatggagatccagtgtatatgagaagcaaactaaagagagttgccaagggttttagagccagtcaaattcctagactttaggatttgttgaatgaattgaatggaaaccag

SEQ ID NO: 126602 - DNA, 1090 bp, Homo sapiens
aattacttttctttgactgccttcatacattcatatattctgcctgggcaatttcatttgggcctattatgttccaatacctctccaattttcacctccatcttagctctgccagcttcagtgccacaggtaggcaatgtaaaagtttactggggaccacaggctttctgagctcaataaaaatactaagcttggtacttgttttttaagaattttcttcccccatcccctcacaaagattatttgagtaaattacaccccaacctccttttccttgtttttgttgaaattattgtctcttaactttggaacattgcagttgcggtaagcttactaggttcacatagcatatcttctggtgtgttaaaattaaaatgcacaccatctcaaaagtgctatgccatttcatacctttgtgcttttgtcctgctacctggagtgcgtctttctcacttctggataatacaatttgaaccttttctttgcctcttgaaactgcaaaatccctactcgcaagtaaatgtgtcattctttatgttgataacccagcctagtgcttgacacttgatgggcattcaggtatacatggttttttagagattgataagattaactgtgcagtctataaactgtaaatactggcttttaaactcttttaaaggagctcttttgataaacaatttggataagagatgaaaggttagggaggctccaggcaaggcagaagactgctgatggcccagagatagttctgccccaaaaaggtgggaagaagaaaaaaactgagctggatatttttaaggaaatatattttatagcatttttctttaatgcctagttttgctgcaagcactgaagtttatcctgcatttgtatttcttatttgaaaaagaaatggcctttggggtttgttttgttttttgttcctttgtaagcacactgcaaaagcggcgttgtcagcgttgtcttttgaggtatcaaacgtgctttcagtcagcaaatatcttgtatatagtaccattcctaataaactaaattggttatcaacctaatacaaacggtacttcatacaacttaagcctaaactaga

SEQ ID NO: 126603 - DNA, 2509 bp, Homo sapiens
ccagcgctgggtgaacccggttggggtgtcactcgacgcccactaggggctgaggaggctccagtgcgcaggctccgggcaccggataaaagcggagctggcgagtctagtgctgtctcgatggaggagcaagaaacggaagaggtcggggggagaagcagccggaaaaatgcagccaccgtcaacgccgcctccctgccaccgtgcttcggggtaaaaagctgccgttgccgtcggtgcagttgccgtcgctgcctcctatacttctcttggcctcggggaaggatttccccaccggtgggacaatgtgcggggaggggagtgggaattcctttatatggcggtgattaaacgagggagggacagacagtgatctcgaagaaaaaagggggagaccaaagaataaaagaagggtttccccactaaaatgacacggcgattccggctcttgttttgggggtctttccccgaaatggtttccgtcttccccttgccccgcagcgacccagagcgctgggggaagcggagtggggagaggcagaggcggtctcggcagccaatcagcgcctgatgtgtcctgtcgggcgcgtcgtggttggctggcgatgacctcatcctgcagcagcgggtggggccaaagccgtagggggaggctgttgcaaaggtagagagggagaagtgacgatggtgatcgttgctgccgcggccgatatggaacccaagcagtggcgaagggaatcgcaaggctcttccctgaccattttctactgtccctgcgcgaggtgagggccccggctcggcctctgcaaaactttggggcgctggcgcggaggaggagacaggatttctcccgtgacttttgtaactgcgtcagggcaagatggcgctgggtctctttggggcgcggggggagaggcacgtccaccgccgcagcgcatgtgaccgggctgcattcctgtggggtttggctccgacccaggccggggcgggggaggggacagggcttgggcggaggagactgtggtgcggtcggcgttggcggcctgaagaggaagagatgactgttggaaagcgttcccctcccccatacggcagaacagctgcggctcccaggggaaagcccccgcaggacagtcctcgtggggtgtgacggctgttggtggagaaggtttggcgccctattttcttatctgcctttctccccgcaaagtatacttatgtaaggtggtagttccctgacgtgggactcggaatcaactaggagtccttgagggcctctgggaggcctagcgaggggtagaccagcttctgggggtacaacgtcaaggaggatcgattactttctgaggaaacagtttctcagattgaaatagaaaagtatttccaaagtttggaaacaaatttaaaggtgtaaataacacccaggaacactttaattgctttgaaaaggcataagcagccatctgaatttaagggcccttttcagactcttccttcctcctgtgattcctgttctttatttcagttttctgtctgtacatcccttaagaatatagttttgtcggtgggattcgctcttttgtgcccaggctggagtgcagaggcgagatctcggcccactgcaacctccgcctccccgggttcaggcgagtctcctgcctcagcctcccaggtagctgggattacaggcgcccacaaccacaccctgctaattttttctatttttagtagagacggggtttcaccccattgaccaggctggtctcgaactctcgagatccgcccgtctcagcttcccaaagtgctgggattataggcatgagccaccgcgccgggcctgctttttttttttttttttttttttgcactgggcattagtaatacggaataaaagccgtgttttaaactgtattaagttgtaagacttttcagtactttcaagtctgctttctttctgttgcccttttgtagtttttaaaaataaaagatgcaattataagcacttccggtgaatattattccttaaggttcctgcatcatcatgaaatttgaagcacttttatagtagtacaaactatacttttagcttttgaaatctcgataggagaaaatatccagcagttttaggggctattttggcatattcattaaggtagactaagtttgtttttcgtttttcccacttagccaaactagttaaagtagtcaaaactagcaaataatttttaaagggcttctccttttgggtggtgtagagggtggggagttattcaacaaacacatttgcagccaaaatctggcctacttcttggcagagcgcttatacttggtgctacgagaaaatgattgctggacctgaaaagaacctgaggtcaaggttgtgctatttccttaagtcttagttgtaggctcttggtagtttgaaaacaagattgggtttttaattcatttgtgtatccttaaatcctcactagtttttgtggatttcttttttcagttataagcaact

SEQ ID NO: 126604 - DNA, 1135 bp, Homo sapiens
caccgaataccgacacttcctcaaaccttcggtggattgttgaatgcatctgttgtcagaaagacagagattccgtccccctcaccgcctccagtttgctatcttcgagcctccgcggagaggcaacggcgggcggcagcccacaagcaaaatggcgccgggcagcttcatcccctccccctctgcccctgcggagcgggacgggcgtaccccgtgcacttgccgccgccgccgccgccgccgcggccgccgccgccgccgccgccattttcccagagcgagaggcagtgacactgagcgggcgcagggggccgagtcggagaccgtgccggagttcgggagcggcaacagagtgggcatagacactccgagcagcctcgccgtcgtctctgcgttcctgttgactgcctggctgccccctcccctactcctcggttcctggtgaagaggctgcgcgctgctgtttggggagggggtgtgtggagccgggtcctgtgtccgcagtggctgctgtcggggggtcgcctgttcgcggaggtgcggagagactccttgggggtcgagcacataacggggttcgggtgtctcgtgtgtgaacatcacaggttagtgcctgtcgtctccatgggagttcctggggcttgcggggttggggtacttgtgtttcaagggggagggaggtctctcatctttatccttaagctgggggagccgacgttgactctcaggtgtctttgccggcgcaagacgttgcttgcttaaatcgaatttattctttcttctccctgaccctagaaatggagcattatggcgggttttagggttgggaaaggggtaactggcagttaaacccccttgagagtgggggagttagggagggggcgcactcctcattggcagcgggttaaggccgcttgagtgaagacggaggcttgtgactgttagtagggtttgtgtcgaagtggtcccaggagctgccagcgctcccttttctcaaccgcgtcttgttcaggtgctgaaaagccatataggccccattttcttcttccatttcttgacgggcagtctctggtataatgtgcacatgaatacgaagggggtaagaagaacgccctgggcatctctctttgtggga

SEQ ID NO: 126605 - DNA, 1250 bp, Homo sapiens
tttggtttaatccaaccatcttttattcaatatgccaaagtagattaaaatgtttagtaactgtataagtatcatctattttatatgattaaatgtttcaatctagagtaagacatttcccaaccacctcttgacccattttgtggattttggtttttgtattgtgttttagcttaaattttagggagctgtacaaacaagcttaaacctgttacttcattgggtgtagagatgccattatattttgccatccatttttcccatgtatttaagctttccttaagaattttcaaagtttattgtgtatttggtaaagtgaagcttcatgctgcctttaacaatcgtcttacagcatactatcatcattatgtaagttaaaagtaaggctccgattctggatttttttcctcttcaaatatgcccatttacctattataggattgtggaatttagtctgttttaatagaccttaaataaaaacattaccataatagggtcttgaatccattttatgctattttcagaaacttacagactgagactgaaaattaaatggtgtcaggtgtcatttaactgaattttttaaagtgtgaaagattagaattcactttcgtagtgggagttctttttgggttgaactaagcagtgagatgtgagtgggccattaatgacatttaatgaccattctgattgtggagcaacggaaagatgagtgcttttcaatccagtagtactttaaaaggttgaagagtatacactgtttcatgattcttttattccattgtaaatattttagagcagcatttacttcatatggtgactgtatcaactaggttgataaggttctagcctacgaaataattagagaaataactggctcaaggattttctacataccagtgagcttcatcatggaagactgagcacacaaccttacttagaatatttgaaatattttattataaagtgaaatgttggtgggtagtgggcgaaatttgtgtagggttttggggtcagtactcatttgtattttgatctgagcaagtatttaagtccagatcattcactgctgtgtaaagattgtgcatttattttaaaggctgggtgattaaggtctgtggttcagaagcttggtactttaaacttactattcaatatacaaaatcagtgtattcttaaaaatttgatttatgtggccataggagggaacactgcctgtgcccgatggttttcttcatagagaccttggt

SEQ ID NO: 126606 - DNA, 1626 bp, Homo sapiens
agagcctacattttgatcatacatcctttcgttgtcagtgtaaatgaaaggatctctctgattccagtttaagtgtagagccttgacaggtctccatttcccgtcaactctgtaagactgataactgccctacaattttggctcgtctgacttcctcacagcttccagagagaaatcattgccatatatgcccccagtaagctctaggacttcttgagtctattgaggcagtagggagaaaagctaattaataggagaaaaatttcccctcagtacatatcttagtggtcttagggaaattataatttcttaaattggcttcttaatttccaagaataatgtactcgttttcattcatcaatcttctaaagaaacctgtggtttaatttttaaaggtgtgttttatgtaaaccctaacagctctgcatttctggaagctactactactgggacttaaatgtgtacaaccatagtgtgtttaaaatgtgtaaaactaacagaactttgaagagctatcaaaactggttaggaaatactagtatgcagttttctcaacagatgctattttatgtttactattttaaaaatattttaataatgtgtaaaagcttttatctccaaaggatttgtttttagcagatggtaggtgcttaattatttcttggatgtgaatcttttattgaagcaaacacatttacatctcaaatatgtagggtgatcagggactgttccctgttatgtgttagaataaatgttaaatacttgtattctgtgagacttgtttcccccaatttcatgatagattatctatgagactttttaatattgaaaatataattattttatggtaaaattaatttttatgttgactggcaaattaacgagtggaatactatttgaaatattactctgtgaatgttactggcttttaggctgggtttaaaattgaagtggctcgtatttactacctgttctgtaatgtgcagatgttgggaggagccttatttttttcttgacattgaaagaataattttttgtattacctacaaatttacttaacatggaggaacagtatttgttgttgaaattgttttctacactaaactggaagtggatggtatttaactaaaaatcttgcaattgctattaaacaatgagtattttgcattatataaaataaacagtattttactttgtataatataaaatgagtattttactttatataaaatactctgtttaatagcaattgcaatatttttaatagcaattgcaagagataagaattaaccatattatgatgcaaacaaattgtttttttgttattgtgaacttccatgctaagtgctacattaaaaatcaaatgaaggtgacccagagtaagttaattagattttaattcatatctttaaggataaaagaagtttttattaaccattggtaactaggatgctttttacttaaatcagagtcaggaaaagcagttggtcttatatttcacgagataacatgttttcacttgatatgaaatcagttctttttttccctcatgaacagctcataattggattttatttttggacagaaaaactttttttattgttaggtgaattttacagttttatt

SEQ ID NO: 126607 - DNA, 1286 bp, Homo sapiens
gggaggagggaaatgcttaaacaatactaagaattccattctttagagacaaattacttagaagttgatagtgacatattgaaagggttgttgattgttggattattcaggtgatgaagatgatggtaggggccatggcggctgagggagaatgagtcttaaacactgaggaggcacaaaagattgggtggctggatataataggaaactggaacgaaagaaggagaagagaatggcgatactgataaaaaatagaatgaaagaagatgtgtggaaaagaaagtttcactttgaaggcttgatttttgaagtgatggcagatatagatatacatccaatagatgagtgggaaaagtaaatcaaacagaaatgaaaaattgagtccaagattgatgggagactaataatggggaggactgagcctgggggcaactacattagtaacagtggcaggttttgttttttcatgttcatttaaaggaaggaggagagatttatgtgttagaaaaagggaaattgtggtttaatcaataataatttaggtgggtatcctagccactgaattacaggctttgaggtaatatagaaatacctcagttcttgctatggagtcaaatagatgatctaattgtggaagctatacatttagcagctgttctagaacaatgtctgtcaaaatataaaccagtagttaatgtaagtagtgcattctttaggaggttaagaagggaagacattagtgtagaacaagttttatagctggagaagtcttttgagataaagtctagtcaaattgttatttacaggtgaggaaacagcccttaggaggttgatttgccagatatcttaaaactatctaaaaaaattgggaaggcttcaaggaagcattggttcttgaaggtctaatatgatttttattgggtgggaaagaaaaggaaaagaaaattagtgaatttgaagaggaatgagcaaggatatgccaacaatagcaaaaaagacttgcataatcaaaggagttatagattggattattagtatggaacaagataacctgataaaatgtcaacattaggaacttgactggaattactgtgaactacactttttttgaataggtcaaagttatgaggaaactagtggcttttgaagtataatattctgtccaatgttgtaaccagtactaaaatagagcactggtgtgaatgcccttttagttttttgataaggcattcaggccacatctcagacctactacatgagaatctctagggtaaggcctaggaacc

SEQ ID NO: 126608 - DNA, 1010 bp, Homo sapiens
ttaacacggtcttaaaggcagcttcagtcttccagtttttctgataaactgttttctactttaattgctttttttgccttttacttcatttttcctacttgagagtcttgtttgtttttattgtttttgttttggtattgttgcctttgctaaatctgtttttaatattgtattaaaatttatttttcagttaaacatttttaaatattaaatttaatattgtatcccagtgtttctttttccagtttgatttagtatttagctttgattgttgcctttacttgtgtttacattcatttgtgtaaaaagggaagagtaaatttatccttttaagaattggctgctttgtgtgagtcactttggttttaggtaccatgtcagttagaagtaattataattttatgccatttaaaaatagctcaaaactcctatgttcacttggtttctaggtctattctggataagcaggttttgtgaagacatttattctttcttggacctcagatttaccagacatctcatggtatttccttttctattatttctttaatggctgccatttattctcaatgtattttgtacatattttacttgtcagctggatgaccagttttttgattcacacataagatgtgaaacattgtgttaattgttaaggttgtgttaaaaaccttttccctttatttataacttttttttttttttgagacggagtctcgctctgtcaccaggctggagtgcagtggcgcgatcgcagctcactgcagcctctgactccctagttcaagcgattctcctgcctcagcgtcctgagtagctgggattacaggcacatgccaccaagcccaggtaatttttgtatttttaatagagacagagtttcaccatgttggccaggatggtctcaatctcctaacctcatgatccacccgcctcggcctcccaaagtgctgggattacaggcttgagccaccatgcccggccagtttttgactgttttttaaactcac

SEQ ID NO: 126609 - DNA, 1692 bp, Homo sapiens
ttaaaatgaataatttttggttcttcactaaatatgccgtagtaatcttcttgtggcattctaaattcattccctcagaaagattgtgatttagaaacttttcttttgatcatgatcacataactcaattccagaaaaattaatgagagagactctaagcaaatttcaatttatattgagattttaataaagaatgttttcttcatgttattttacttactgttatagtgtgactgttgcttttttgtctccttttcttttaaacagggtttgtggatgcacttagatgtttgcaatgagcactgtggctggcatgccccagtgttttggataccaatgcataggactccatagtaatcgaatttaccagaggcgaacgtcatgagcatagtgatcccattgggggttgatacagcagagacgtcatacttggaaatggctgcaggttcagagtaagtatttaaattggttacataagcaaaaaaaaaaaaaaaacccttctggagctagaaagtaggaagaagtataagtggaaaatattaaatttcttctttcctagccattttttaaagtaaaaaaaaaaaaagcgaagttacctttctttctcaaacactgagaacgtgattgctatctttgttttccttttaaatagcattaccactaatattcattattggattgaggtattgacatgacttattttgactccaaatttctgagaagcgatacattttttaccaactgtattttcctatagtatttgatattgttattccagtgtcactagagccacctgctgacaggagtcattaatttgttggtgcttgggttccccccacccccagcaacagatggagttttgctgtgtctcccaggctggaatgcagtggctctatctcagctcattgcaacctctgcctcccgggttcaagcaattctcctgcctcagcctcccgagtagctgtattacaggcgtgtgtcaccacgcccagctaatttttgtgtttttagtagagatggggtttcatcattttggctaggctggtctcgaactcctgacctcgtgatccactctcctcggactcccaaagtgttgggattacaggcatgaaccactgcgctcagccggtgctcgggtatttttagtttgaatttgtataattgaagattctaaaatattttgtatataatgaaacattttcagaaactttttacttgttcttttttcatccagtgcttaacatttttgcttgtgatttcttgacacttaatcgactatgaagaaactatttttttttctgctgcttttaaagtgagtgttgatttgtttgtactaattggaggtgctttcatttaagcgtggctttgtttttgtattcaaaagcctgctttaaagtactgtccttgcattgtttacaactgttctttttttgttgtttgttttgtgacagagtctcactctgtcatccaggctggagtgcagtagggcagtctcagctcactgcaacctccaggctcaagggattctcatgtcttagcctcctgagtagctgggattacaggtgcatgccaccacacccagctaatttttgtatttttagtagagacagggtttcaccacattgaccaggctggcctcgaactcctgggctcaagcgatctgcccaccttggccccccaaagtgctgggat

SEQ ID NO: 126610 - DNA, 1047 bp, Homo sapiens
tggagactcttcacaatctcctttagaaccattagataacctcagtttgtatctcctctttttgctgattctggcacacagcgcttacaacagcagccactgagagctaaattgagacttcgtgaagggatgacagtatattaagaagcagttgactgtaaaaaatgttttttatgctgctagtctcatgactaatcagaatataaccactaaatatccttaaactaaataatagtgcaaatagtactaagttctaatgtaaagttttaataggaggtaggataaagattgtcatgaaaaatttttcaagtgatgttatagttttgtaaaataaaggcacagaaacaaatcatgttattgagtatttgcaagggagagattaattttagtgtgaactgacctcagatgtaggttcacaaccttgttgatcaataggaattaaccaagtagagctcaggaggattggtaagagtaaagaagttgggaaagtgatgtatgtaaaatgctaggccagggagcttgtaagtcaacaacagtgggcaaattgtatcagtagttgatcagtctccatcatctaagaccagaattgctcatcttacagatagctgtttatgttttttttcaggtataaatcctggtttattttgaaacttcctattacttaagtttactgacatttccaaggctttattatattaatatctggtcacactcaacacatgcatatatttttgaacactgaaatgcatacttcagttccatttgaggtccatatagattctgtgtgttttagtcttgcttaaattatttctactacttctttgcacccctttgctagttttctcagtgccgtagggtttattaaataataattggactctagtaattttttttaatgagagagagggaaactatatttgaaattggattgggacatttattttacttaaacagaagtttgcttatgacacataatctagatgggatatatcttatctatagtgtatccacctgctgtaagtagatactgtatttgtatagccatta

SEQ ID NO: 126611 - DNA, 1029 bp, Homo sapiens
cagcaggagctgtgctgtttttttgttgttgttttttgtttttgttttttttgaaatggagtgttgctgtgtcaccaggctgcagtgcagtggtacgatctcggctcactgcaacctccgcctcctgggttcaagccattgtcatgcctcagcctgccgagtagctggaccacaggcatgagccaccacaccctgctaatttgtgtgtgtatgtgtgtgtgtatgtatgtatgtatgtatgtgtgtgtgtatatatatatatatatatatatatattttttttttttttttttttttttttttaagtagagaacagggtttcaccatcttggccaggatggtctcaatctcctgacctcgtgatctgcctgcctcggcctcccagagtgctgagattacaggcgtgggccaccacgcccggcctgcagttttgaattccaaacagtaatggataagcatgcccactttcccaagcctcacaacagagtgtttgacagacttgcatttttgccagtttaattaggtgagaaatggtaatctcagcatagttatggtgtgcatttctcttactttgagtgaggtgtctctatgtggttttgtttccctttgatagtagtcttttgccagataatttttgatggggtaaatatctgatgatgaattcagtaaaagttggttaaaaagttaccattaggaggccgggcgcggtggctcacacctgtaatcccagcactttgggggaggcccaggcgggtggatcatgaggtcagaagattgagaccatcctggctaacatggtgaaaccctgtctctactaaaaatacaaaaacaagagttagccaggtgtggtggcgggcgcctgtcgtcccagctacttgggaggcttaggcggcagaatggcatgaacctgggagttggagcttgcagtgagccaaggtcgcaccacggaactccagcttggcagcctgggcaacagagcgagactccgtctcaaaaaacaaaacaaaaaacaaaaaaacttaccattag

SEQ ID NO: 126612 - DNA, 1063 bp, Homo sapiens
ggtaataatggaatagattcaattcagtgtcatacatttgctttaagaaatttaatttatgattttaattacatgttaacattatgggtttttttttttcagactttttgctttaaatattctgtttgaaaaaaatactggtttcctaagtaaattattttcttggccattcactgtggctcacatctgtgatcccagctctttgggaggcaggggtgggaggatcacttgatccaggagttcaagaccagcctgggtaacccatctctacaaaaaattaaaaaattagcccggcatgatggtgcaggcctgtagtctcagctactcaggaggctgaggcaggaggatcccttgaacctggaaggttgaggctgcagcaaactgtgattgcatcactgcactccagcctgggtgatagggtgagaccctgtctggggaaaaaaaaaaaaaaaaaaaatcagagtgaaatggagtcatctatctggcatctactgctactattagattgtatgtaaactgtattgcaagggattttgtatatattttatactgttggtttttcactgagaacattaaataaattaaaaagtttatcacatttaagacagatctgcttcatgtatttgataaataattatgctaattttttaatgtaggaatttggataaagagagggcagtgctactacaacgccggaaaagggaaaatatgtcaggtaggtaaaaaggacctacactaaattaaaattcgtgtgattgagagaataaacggttctctcaacttttagttaaatgtaaatatttttagttaaatgtaaataccttgttgatgaatgttgattgtacagagagtatgcaatctctggtatagatttcaagtattttttttttcacgtattatagaataaatatgtactttgggaaataaaatggaaatgagaggaaaataaataatttaaatcagccataattttcctacacatagctaacctgttggtttaaaaaagtaaaatatgtttgttcttcagaaagatatgatccattagtttatcatgtagaatagt

SEQ ID NO: 126613 - DNA, 1010 bp, Homo sapiens
agttaaaaaatgtgcttatttagaaagatggagacgacaatactttgtcatatggaatgctgttttatttcattgtttaaaatagaagtattaaatgtgcaataatttttattttgtctgaagatggtgataccagtgcaactgagagtggtgatgaggttcctgtggaattatatactgcatttcagcatactccaacatcaattactttaactgcttcaagagtttccaaagttaatgataaaagaaggaaaaaaagcggggagaaagaacaacacatttcaaaatgtaaaaaggtacgtttttgcttgtttttaggtgagtggataggatagcggatagggaactgaattttataggagaggcaggagagtgagaataatcgatgatagctaaaaaggatctagcagaagttttttatttttaaacaattaaacttacttgaacattttaacgtgttttaaagattgaagcagattagagaagaaactttgcaaactgctttgaaatcatttaatgagattagtcactataatgcagaagcaaaaataaaatagaaagccttcatagttttctgtactaccaggattgtattcctttcacttgtctgtctgacataatccacttagcttttcttccccatgttttacataacggttctttgcctccttttttttttttttttaaaccttgctctcttgtaacgtattgtctacacacaaatttatttatttggatctatattgctagctgtaggtttgtatttgttagtcactctaaatggagttcacactttttagggggttgagggggataggaattaagtcttaaatacatccttcagatctggcagatgagtgggctctcgatacatgtttattgagtaaatacagctctgtttaccacagtgcatattacttaaggcccattatgggctcaaatattacttgctagttgcttagagaattaaagtaatatcattattttactccctcccaaaacatgtctta

SEQ ID NO: 126614 - DNA, 1025 bp, Homo sapiens
aagcgaggctcctcgcctctgtctgaccccaaaacataagtttgtctggggtcacagaggtcagctgtatgctgttactatagttttctggcttaggtagaaaaggataacaaatttctaaaattgtcacattaaataggatgtggggagcatgttacagtgtatcttttgtccctgtggtatttattattccacatttctggaaaagaaaccgttaaacagcagtttctagtttatattatgttcttttgtatagattgccgttaattttgtgtgtgtgtgtgtgtgtgtgtgtgtgtgtgtgtgtgtgtgtgtgtaagtccgtaagtccagatactaaagctcagtttatgattttagggttcagctccagagattgatccttcatctgatggttcaaattttggatgggagacaaagatcaaagcatggatggatcgatatgaagaagcaaataacaaccagtacagtgagggtgttcagagggaggcacaaagaatagctctgagattaggcaatggaaatgacaaaaaagagatgaataaatccgatttgaataccaacaatttgctcttcaaacctcctgtagaggtaaatacatcatttgtccaaaaattgtaaagcagttttatattgtgaatttttagttaaactgaaaacaagcaagtttatttaatctcaacatttactctgattttagagccatatacaaaagaataagaaaattcttaaatctgcaaaagatttgcctcctgatgcacttatcattgaatacagagggaagtttatgctgagagaacagtttgaagcaaatgggtatttctttaaaaggtatattcatttattttcccatgttcattttctgtaggtaaatattgaacttttggctgttttacctagatgttgtgattatatgtactttttttcctacatgatcatttcagtatttaaagctgtagtgtggttgaacagtgactgatgataatttttgaactacgataaactaaaacaacataaaaaaatgc

SEQ ID NO: 126615 - DNA, 1051 bp, Homo sapiens
gtctcgctctatcagtgaggcatgatcatggctcactgcagccttgatgtcctgggctcaggtgatcctcccacctcagcttcccaggtagctgggactacaggcacatgctaccatgcctggcctttttttttttttttttttttttttttttttgtaaatacggagtgtcgccatgttgcccaggttggtcttgatctcctggactcaagcaatccacctgcctcggcctcccaaagtgctggaattacaggtgtgaaccagcatgcccggcctaaaatgttaatagcttataatgtttctttctttgtagaccatacccttttgtgttattctactctaaatttcatgggctagaaatgtgtgttgatgcaaggacttttgggaatgaggctcgattcatcaggcggtcttgtacacccaatgcagaggtaagcttatagaaattttttggggagatgtgggtgctgggggtgtgttggaatctgagcaataagcacaaaactcaggtcactgacctaagacactttccacctgttggtgcattttatactgcccagcctgtttttttgtgaaaatttatgtgataactggctatgaagtcttttttttttttttttgagacggagtttcactcttgttgcccaggctggaatacaatggcacgatctcagctcatgtaacctccgtcttccgggctcaagtgattctcatgcctcagcctcccgaataggtgggattacaggcacgcaccaccatgcccggctatttttttgcatttttagtagggacggggtttcaccattttgaccaggctggtctcgaactccggacctcaggtgatttgcccatctcagcctcccaaaatgctgggattacgagtgtaagccaccatgcctggccgctatgaagtcttaaaaattactttgcaccttgaagaaatgatgatgctccttataagaggaaatattggacttccttttttttttttttttttttttttttttttgaggcagtgtctcactgtctcccaggctggagtgtggtgtca

SEQ ID NO: 126616 - DNA, 1015 bp, Homo sapiens
tctcaaaacaacaacagcaacaacaaaaaaccctaagatgccaccagttataagactcctgatttcagagatgctaaaaggtgaaaaaaaagaattgatgaggctgggtgcggtggctcacgcctgtaatcccagcacttggggaggccgaggccggcacatcatgaggtcaggagattgagaccatcctggctaacactgtgaaaactcgtctctactaaaaatacaaaaaaaaataagccgggcatggtggcaggtgcctgtagttccagctactcgggaggctgaggcaggagaatggcgtgaacctgggaggcggagcttgcagtgagccgagatcgcaccactgcactccagcctgggcgaaagtgtgagactcgtctcaaaaaaataaaaataagaagaattgatgaaatatagtatttttattattattattattattattattattttgatgccacattgtgggctctaggggttggggtggcagtggatagcagtatatgattgaaaaaccttcccagttgataaccaccaatagatagttataagccttgtcattaatgacatattttccaggttgtgtttgtgaaataatttgaaaagaataattttcaaaattgtaagctgatgcttctgaaggcagaaagtaatttatggtaatgtacaattattttaacttttaggtgaggcatgaaattcaagatggaaccatacatctttatatttattctatacacagtattccaaagggaactgaaattactattgcctttgattttgactatggaaattggtgagttcaagtctataaatgtaatctgttgtttgaaaatagttccataatgtccctgtaataatttaggtattgtcattacttttatagctttttatttttatctatcatgaatcagttaaaagtacttgaaaaccagaagtttagtatcagcctctattacagcattgctacttttcatttctacattttccttaattattattgtaatgtaaa

SEQ ID NO: 126617 - DNA, 1048 bp, Homo sapiens
tattatagtctagtctggaatttttataccaccacaacataaacttcatgagggaaaaaactttcagttttattcattgttgtagccctagctcctaggggaataaaaaatggtgggcaaaaaagtagaccatcaataaatgagctaactgaatgtttataacaaccacttgaggaaagatagacagacagatacaggcccatgaatgtgaactgaatgaagcttccctgtagttcaggtaatggatgatctggaggccttgccctgaattgtgcaggattccccacaattttctcggctttcatccttcacatcaagtattccacgcaagtataatttgagatgctttgtgaaaaagagccgtgaccagtttactgtgatgagcactatactatattcttccttttcagattaccagtgtacatgtgtttaaaaacttgacacaattgtcagattttcctaaacttgtatacccttgcagtttcttgtggataacacctttgacccccacagagtgttattcagtggaacagactctgtgggaaaacactgcagaatccatgctgttactaaatgtctctaggaaaacttgactgacttcatttagaaaatcactttagaatatgcaatgctttaataataaaataggataagtttgttgccagaaaagtcatctggtgacaggatttgagatgttatccaactccctgttctgtcctccgttgatgctgattttttttgtaaggtcctgttttctctaattgtagagactgggaattttatttctaaagataagtaattaatgacattgtggtgttagtgaaagggaacctgtttattatttttttcattttttttgagacggagtcacactccgttgccaggcctggagtgcagtggcacaatcttggctcaccgcaacctctgcctcccgggttcaagtgattctcctgcctcagcctcccaagtagctgggattacaggtgcccaccaccacgcctggctaattttttgtatctttagtagagatggggtttcaccatgttgg

SEQ ID NO: 126618 - DNA, 1127 bp, Homo sapiens
ctttggaaaggatcagcacagccaaaactgaagttaaaactgaatgtaaagatacacagattgtcagtgatgctgaagttattcaggtattatttattcaggtcgttttattttcttaaacactttaaaataaaatgtctatacttgcattaattacttataaggaatttaaaataatgtctattagctttttaatagcatttttcagatcctatgggagtttcagcttgagataaaagactatatattatctctgttctttattatatatcagaattcaaaaattccagaaagttggcttctgaagtagaataatgctattatatttaaactttatatatatgtagtataaaaacttccattcgcttgtattttgaattaggaacaagcaaaagaagaaaatgctagcaagccaacccctgccaaagtaaatagaactaaacagagaaaaagtttttctcggagtaggactcacattggacagcagcgtcggagacacagaactgtcagcatgtgttcagatatccagccatcttctcctgatatagaagttacttcacaacaaaatgatattgaaaatactgtacttacaatagaaccagaaactgaaactgcactagcagaaataattactgaaactgaagttccagcacttaataaatgtcctaccaagtaccccaaaacaaagaaggtatgattctaatgaatgtaagaactgtttttctaacagtttcttatattaattatattgttgttttaaaaattggatttttaagacctcataataataagaggcagtttttatacttgcagattttaaaactaagaatgagaattccaaaactgtaaaattaatataaatgtttgcattactgtgaagataaagttacattcagtttatcaggacttttatggtattgcaattcatgatttctttaaataagtttgtctactttatgtacaaaatatatacttctctgaaactggttttagatgtgttatcctttatatttttataaatttcattgtataggtagattataagaattaaatgtgaagaaattgatttccacagaatgtactatgaaaatttgtaagaaagagtagttttaggtgtaattattaat

SEQ ID NO: 126619 - DNA, 1108 bp, Homo sapiens
atatataaatgtgcatatgtatatatatatacacacacacacacacacagaaacacacacattttaaaaatctacccatccttttttccaaaggtaaccactgtaaacattttagcatcttttctgtccctctctgtatatagaactccattcctaggactgcagtagtgaaacacatggagtctggagccagactgccaggagggtgaatcctggctttgccatttacactatgaccatgagcaagttaagtaacttttttatatctcaatctttatctgtaaaagaagggttgtgatagaacctagttctataaataggattgttatgaagattaaaagttcaataacatacataaagctcttagaacagtatctggcacagaaaaagtgacatgtattattaaactgaatgaggcctttaggggaaatcatgataatttggtactctgtcaaacagtatgttgtttaaaataacaaaatctgcaggcaaaagaggctttttaagagaatcagataggatgtagaagcctacatctcagaccagggatttaaataaatttatcgtaccacaactttgttaaaagtttaataaaaggtagggattatgtcatatttgtaattgagaaagtagtttcacttcttttaagcctgaggttttttcttttcactttacaaagttagaatttttttgtccattgttacaggcaaatattgggttgcttaagctatggcggtgcagtaaggagagtacagacttttaattagaaacaactgtgtttagattgtctctaatgaaacctgcgactttggcaagtaaattatttaacttgtgctattaaaatataatcctgggttcatactagaattttactaaatgtacatgtcatggtttagcagcatgcctacaaactgtactgaattaggtaagaacaaagacagaataaatgaaatttcaaagtaaagtgtgtgagaagtatacattcatgatctacccctaaacagcataaggattaccacactttagtatctctgccccaatctgctgtactccagtcagagtgggagacaaagagcagcttcattaggatgttctgttatttctgatc

SEQ ID NO: 126620 - DNA, 1008 bp, Homo sapiens
ggttgttgtgaggataaatgagataatgtatgtaaatcatctaagtacaatgcctggaatatagtaggcatttggtaattgttaattatttgttcagaatcaattaaaataattttcctaatgtaaatatagtaattctctttagacaaaaaagaatgcattggttctgacataaaaaacaagaataaaagatttgctttttctcatctttcttgcttaaggtttctctattagaataccgtaagagacaacgtgaagctaggaaaagtggctctaagacagagaactttccactcattagtgtatcaccccatgcaagtggaagcttgagcaacaatggtgatggctgtgccagcagtaatgacaatggggagcaggtggaccacactgctagcctacctttaccaacaccagctacagtttataatgccacttctgaagaaactagcaataactgccctgttaaggatgctactgctagtgagaagaatgaaccagaagttcaatggtaagcccattgtgaagtatgctactctggaaaaaacaagcttttgttcaagtattcttcctatttgttgttctcccaaggctaagctgatagtgcttcgtggtcacaattttaaaagattctctctgctaataggattttaagccagctgtgtatggcctgtgttcttaaatgtcgattgtatttattccttggtaatttattcatactttacacacacatatcctctccaaagaatttttatcagattcaacaattctgcagacttcctttataacccctaccagttaccttgaaagaacaaccagggttagtgcttcttcagaaggaataggagcagctgcatataggatggatcttggcaaatggcaggcagccacactcactttgctccttggtcccctttccacctgaaagcatgcaatcctgatagcagtttgttaggggcatgttttggtacctttggtaacctgaagtgacattctcaatgtcaatatatt

SEQ ID NO: 126621 - DNA, 1023 bp, Homo sapiens
ttgagtccttcaaataaggataataatctcagttctgggagcagtcagcaaaataagattaacttttttttttttttttttgagctggagtcttgctctgtcgcccagtctggagtgcagtggcgcaatctcggctcactgcaagctccacttcccaagttcaagcgattctcctgcctcagcttcccgagtagcgcccgccaccatgcctggctaatttttttttgtatttttagtagagacggggtttcaccatgctggccaggctggtctcagactcctgaccttgtaatctgcccaccttggcctcccaaagtgctgggattacaggcgtgagccactgtgccctgccaagattaactattttcaaaggttaacaccaaagtattttcccagtagatcaaaagccttggtctgacagtacatgttgactatgaagcaacaatgtaactagcagtagtttctttcaatagaggataatgtgatttttctttgaaaggactgcctcaacttcagtggaacaagtcagagaaaggagttatcagagagctttacttctcagtgatcaccgaaaagataaagatagtggtaagtgagcttgttccttcaccagaaagtggaatcagttaatcactctgcatcctcgttctttgcagctctaatgttctctttgggtctgctctgcttcatctctagggggagaatcaccatgtgtctcatgttcaccgagtcatgttcagtcttcaccttcatctcattcaaatcacataccccagttgcaagctaagggcccagtcccttctttcagtgaacttatggaaggtcagtaagcagatgaccgataatgttattcttaacaaattttaaaatcagacaagagagcctttataaaaagttggtttggatagtagaatgtatgttgctttgtggtgttaaaacagtgtttattgtgtaattttatacttactataggtttcttctgctttatagaccctgatcctgaaaatccagaacccacaacta

SEQ ID NO: 126622 - DNA, 1123 bp, Homo sapiens
tatcatttaaaaggaatgacatcttcatcctggttcatgaagatgtaataatctagtatggcatgtaaatcattggaaactaaagacaaggaatgtgagatttatctttttttgatgattgacatttaaacagtcttatacttggtttatttatatctgaacagtgtacaaggaaaatgaaaaggtattaaaaatcaaaatggtttgagggagcaagttcatttacccaaatcaatttatccttaggttgggtatagaaatttcaattataaaattgaaacttgctattggagttcttcagagtgaggctcaaaaacaggtttcattgcttaggggtaaaaaggcagagtaaagtgaaagaaaattatttcctcaacttgtcttcaataaaaattaacccagagaattcactttaagctcacgctcataactttttggaacaactgaaaaatattggccttttaacatcccaagcctccataattgacgtatccaggatgttatttcctgccccccattaaaattaatatttaggtagtattaaataccaacaagaataaacctcaaggtacacaaaatgttccttgaatgtatataatttgttttctcttcatagcctggttcacctggatctgtaattcctgctcaagcacacgggaaaatattcacaaaaccagatccccaatgggactccacagttagtgcatccgaagctgaaaatggtgttcacctaaaaacagagctccaacaaaaacagctatcaaataacaaccaagcactttcaaagaatcatcctcctcagacacacgttcgtaattcatctgagcaactttcacaaaagctgccttctgtgccaacaaagttgcactgtcctccatcacctcacctagaaaatcctccaaagtcatccacgcctcacacacctgtacagcatggttatctttcaccaaagcctccttcacagcagttaggatctccctacaggcctcatcattcacagtcacctcaagttggaacacctcagcgagagcctcaaagaaacttttatccagcagcacagaaccttccagccaatactcagcaggcaacttctggaacattatttacacagacaccctcagga

SEQ ID NO: 126623 - DNA, 1124 bp, Homo sapiens
catcaaatcagcatcagatctgccagaaaaaaacagctggaatgttcacttacaaaataaagatacctaatactggcttaacagcacattttttaaaggaattttaaaaagcaaaaatgagaaaaatacaacgaaagagcactggtgttttttatacaaaggttcatgtacaagctttaaaaagtaccttaacaggtacatatgaaatatacagtttatcttacagaacatttaaaaaaatgtttttggagtccattttaatgccaccctgacccatggtaattgttttgaaatgttggtggcacctgtgctctgtgaattggaatctgtccaggcactggagatgcctgctgaggtccttgaaccccatgtggcagggccacagagccaggatgaggacagaaccctgaagcagtaggtgttggaatactgtttggtccttggggctggagatgaggacctgtgacaggtaatggacaatgtggccctgttccagaaggctggtgctggggtcccggtcccaaagtggtatgatgtgtagcttgtgagggatacggtggtacagttggatgagcactcgaaggaaaaagtggaggtccttgatgaggtgggtggtgtaaggcttgagctgatgtggtatgatgcccagaagccaaaacactggaaggtggcggcggagggggtggtgggggtgctgaatttacaacatgctggtgttgtgcttgtagaccttggagtcctgtggatggatggggtggtggatggtgatgaggggcaggaccaggagggggtgggggtgggggtaagtggtgtccagcagtttgagaatgaatatgcgacccaggggtgaccgcatgaacaggccctactacatgtgctacagagtgttgctgatgggaattcggctgttgtacaaggtgcggtcctggagcaggtggtggtggaggaggaggggggactacggcagcagcagtttgatggtgaatggtagggttctgagagggcaaaaaatgccctggagtcacgtggtgtcctggaactgtttgctggcttgtggtgccaggaagtgcttgatttggtcctgatgtaaacacagtttgttgagaaagactacctttgagctg

SEQ ID NO: 126624 - DNA, 1429 bp, Homo sapiens
gtatccctcacaagctacacatcataccactttgggaccgggaccccagcaccagccttctggaacagggccacattgtccattacctgtcacaggtcctcatctccagccccaaggaccaaacagtattccaacacctactgcttcagggttctgtcctcatcctggctctgtggccctgccacatggggttcaaggacctcagcaggcatctccagtgcctggacagattccaattcacagagcacaggtgccaccaacatttcaaaacaattaccatgggtcagggtggcattaaaatggactccaaaaacatttttttaaatgttctgtaagataaactgtatatttcatatgtacctgttaaggtactttttaaagcttgtacatgaacctttgtataaaaaacaccagtgctctttcgttgtatttttctcatttttgctttttaaaattcctttaaaaaatgtgctgttaagccagtattaggtatctttattttgtaagtgaacattccagctgtttttttctggcagatctgatgctgatttgatgctgtatgatcttttttttttttttagttaaattcatttagtgaatgttctattattttatacatacacattaagtactcagctaagtaatggcactatgaggattttttttttctttcctgtcagcagcagttctgtgaatgcatcttaggtataaaaatgcaatacagatttttatattttggtgtggacatggctcattttgttttaccagttatttgcaagcaaaatgtaatttaatgtatagatgatttctaatgtctcctgacaaactgtaaatactgcatttcttttgcgtatataattgcttacagcttttctcatttgatatatagcattgtacatatgacaagtcttttgcaaaactgtgtgatctttgtgaaagtagtacagtatatgacctttaatttcttttttattttaaatatactgtcacactgaagcactggttgggcattttaattcatgttaataaatcacaattatgtcagttttaccagattgtcctgtacaacttctaagatcgggatctgtgtgtttctacagaagttctagttttcaaatatagattgtaaggagccttcaattttctttagcgactactacctcagcaacaggaggcagcaaggggctgttcctgtggtggtttctgtttgcatttttgcaggagccataggaaactactgaaatgattgtgctgggtaaattaaggatctggcatcatacaaaatgaagccagaccactaatgcattacagtagttcttgaatacaaggtacaacaactgtttgaaaatatgggtagtttgcccaaaacaggaaaatttgtcttgggtgtaaaaactaaagaaaaaaggcattattcctagatctctca

SEQ ID NO: 126625 - DNA, 1235 bp, Homo sapiens
tttcctttctgtagtccatgtgaaatcttcatggaaaatgacaagcagtggatcacatatgtgtttatagcagatacaggagctggctatctagaagttggcagacagaactgcccaaaggcagagaaaaggtggatataagatcttccgagtcataaacttcttaggtgaaaaccgatttactaacttgcttcttcccatacctggaccatacataactagttaccacgataaagtaaggaaactttccattggagtagagaacttcttcagtttctatccatagttcaggttatttcctaaattctccttttttctcccccttttaaataacttgaatgaaattttggtagaagactgtattttagagtatatacttcatcaaggaatcaaaatgtataagattctgcagttcacacaaaagcttctgtatgcatatttctgtagtaggcacatttcaagccagtgaagaatttaaaatgcttagaaggacaaaccttttaagaagaatatttttatttcacatgctagttacctttattctgtttgaaactatcaggatagatgatgtaaaaccatttcttctcagacaaatgtttctttactaaataccataaatagaattttgttggacaaattgaggatggcaaacttggcctatatgttcttctaaaatttgaagctgtgattaggattgagccctaagtgagctgcgttaatgtaccatcattagctaattttcaaaaggaaataaatagaggttcaaagtgtaaaaacatgactgaatgaggtcacgcagtcattttagtgtttactttctctgatgcacagaatttgtatcctgtgccaaattatgtcaggtaattggatgatgaaaaatatgttgattgataaaacagtatcattattattggatgtacttactgaatcctcagaggtagaagacaaaggctgggaaatttttaattttttgaagattaataattaataactaactagcattttatattttagcaataaaaacgttcacttaagaggccattttcatttcactgagagatctaggaataatgccttttttctttagtttttacacccaagacaaattttcctgttttgggcaaactacccatattttcaaacagttgttgtaccttgtattcaagaactactgtaatgcattagtggtctggcttcattttgtatgatgccagatccttaatttacccagcaca

SEQ ID NO: 126626 - DNA, 1938 bp, Homo sapiens
gtctggtctatgttacccaggctggtctgaaactcatgggctcaagggatcctcctgcctcagcctcccaaacggctaggattgcaggagtgagccactgccctcagccctttattgcagttttgacttaaaaataaccttttttttctcttatgaaatgaccattacagctcgtaggccatttactagcttgttagtcattctgttatgtcaaccaaagctgcctgtaaccgacacttttcatactgcagctagcacagtttgtgaagtataacttcaaggtttacaaattaatgtcctaggatcttagatcttacaacaaatgcgtagacatgaatggtgtttgatttgggttggcctcaagtttgcaaattttacggaagatcccaggttgaaatgagagtggcttgcttcaacctttggaaaagaaaacactctgggcaaactgagcccactccacttacttaaagaagcttagaactaatgtgaatgaactattaattaacctctatttagatccaccaggcttacttgaaatatgccttggtcatatgtacatgtaatgattattgcttagtggggaaaagctggtgttctttgttgttgctgtacaagtgttgagcaggtggttgtccgcttcactgaaaagaacctgactggaccaacaatggggaatgcagatttggagctttcttgacattggcctgttttttcccctgtaggagaactgcgacacatcaccaagctgaagccctggagcctctttgatgtacttgtggaaaagtatggctggccccatgaagatgctgcacagtttacagatttcctgatcccgatgttagaaatggttccagaaaaacgagcctcagctggcgaatgccttcggcatccttggttgaattcttagcaaattctaccaatattgcattctgagctagcaaatgttcccagtacattggacctaaacggtgactctcattctttaacaggattacaagtgagctggcttcatcctcagacctttattttgctttgaggtactgttgtttgacattttgctttttgtgcactgtgatcctggggaagggtagtcttttgtcttcagctaagtagtttactgaccattttcttctggaaacaataacatgtctctaagcattgtttcttgtgttgtgtgacattcaaatgtcatttttttgaatgaaaaatactttcccctttgtgttttggcaggttttgtaactatttatgaagaaatattttagctgagtactatataatttacaatcttaagaaattatcaagttggaaccaagaaatagcaaggaaatgtacaattttatcttctggcaaagggacatcattcctgtattatagtgtatgtaaatgcaccctgtaaatgttactttccattaaatatgggagggggactcaaatttcagaaaagctaccaagtcttgagtgctttgtagcctatgttgcatgtagcggactttaactgctccaaggagttgtgcaaacttttcattccataacagtcttttcacattggattttaaacaaagtggctctgggttataagatgtcattctctatatggcactttaaaggaagaaaagatatgtttctcattctaaaatatgcattataatttagcagtcccatttgtgattttgcatatttttaaaagtacttttaaagaagagcaatttccctttaaaaatgtgatggctcagtaccatgtcatgttgcctcctctgggcgctgtaagttaagctctacatagattaaattggagaaacgtgttaattgtgtggaatgaaaaaatacatatatttttggaaaagcatgatcatgcttgtctagaacacaaggtatggtatatacaatttgcagtgcagtgggcagaatacttctcacagctcaaagataacagtg

SEQ ID NO: 126627 - DNA, 1042 bp, Homo sapiens
ctgtttctgtctgcgcgggcggtggtagtgtctgcatgcagtgtactgattaaactgtcgtgtgtttctgttttgctggcaatgtttcccaatgcagatcacatagcattgatcattgaactgctggggaaagtccctcgaaaatacgctatgttggggaaatactccaaggagtttttcaccagaaaaggtaacggtatttatgcaacactaattttcagcatagtcttctcccaaaaggagaaattgtgcattcgtgattgggcagtggagaaagatctggagtttcacaactggggaattcttccgaagaaagctctcaagaaataaacctgacccatctgatacctggagtaagaattttgtaagagaacagccttcctaacagcattttttcctcctccgcttctctcttttactccaagttaccaatctgtatattatttataaaaaggagtttaggtgattgttaaaagccagctagacttatctttccatttcatggactctctgtagtagaacagaggtggcctagagactggacttagggaacgtccagggacattgcttttggtctgcctgggttatttctgtagtgggtgtaggcctgtgaaatgctgcgtacctcacattcttaaaaatgacatcctacattcccattgtgttatgccacactgtattaaggtgattattttcatgttgtagttcttactgatcttccaactgtttatttgcccagtatagtccccagttagtaatttataaaaacacccaagagccctaggagtatttttaaaagaactccttctaagtgctatattcttttttttttttttttttttgagatggagtcttgctctgttgcccaggctggagtggagtggcgcaatcttagctcactgcaacctgtgcctcccaggttcaagcaattctcctgccgcagcctcccatgtagctgggattacaggcacaccaccacgcccagctaatttttgtatttttagtagagacagggtttcactgtgttggccaggctggtctc

SEQ ID NO: 126628 - DNA, 1065 bp, Homo sapiens
gtgtgaggtgtcggtgccagggaccctgatgtcttgtggcgtccaaggaactgtgtgtcactgagagtgatcggcccccacagcagtgttctttctaccttcatgttccttgtaataatgcatcagcaagctcgatctgggccgtgaagggatggattgacaccatgaagagccgccacaaagctgcagacagggggacagcaaggctggcttgttctagggctgacctggacccgaagaaactggggataaaaagagaaaggtcaaggcagtgcccttggcgtcctgtgggcagcccagtttgctcttttctggagtattttccagaggtggagaacaagcaattttagttctgtcaagtttaatttacagtattccaggcctaagtgatcattccactactcttgaggaaaggagactgaccctggcaaacactgtgctcacacatgcaaaccacctatcccgatcactaactgtcctgctgtttgctcatgccagcaaaaacccgggcagctgacttgttggtgaatcccctggatccgcggaatgcagataaaattagagtaaaaattgctgacctgggaaatgcttgttgggtggtaagtagagttttctttctaaaacctttggtcttgattctgtgtgcgaagacactttttgaatgtctgtgttgctccgtggtaatgcagcctgttcccttccagcataaacacttcacggaagacatccagacgcgtcagtaccgctccatagaggttttaataggagcggggtacagcacccctgcggacatctggagcacggcgtgtatggtaaggacggctgtgccctttgctgccatgggaattggctcgttcctttcacactctggatggggctgagtctctctgaggcatgcgacctcagtttttctgactgtaagggtcatccaccgtgggctgggtgaggggaaggttgctgccgcaggcatcttaagaagtggaaggatcctcctcaggcgggccctgggtgtttggtgtggttgtgggcttgtgagagagacatggtctcttcttaaggccctgc

SEQ ID NO: 126629 - DNA, 1200 bp, Homo sapiens
tcattaactttttacctaactgtaatgcaccacaagtctgtttctgaagattatagagggtagaaatggaagtgcaactttatttagaaagagttattttcccttaaagctaactttttcttataagagcaggccaattactaaatgaatgaaaaatgagatttagaaaacctgaaggttttaccccaaaagccaagaggtgtttaccaggtggtacataagcatattcaaaatgtattttattgatggagataagtacttaatgaggctgtattaaggagagtaacaagttctaattcttgacccatcaaattcttaaggtgaagctgaggaccaggaagagaaagaagatgctgagaaagaaaacattgaaaaagatgaagatgatgtagatcaggaacttgcgaacatagaccctacgtggatagaatcacctaaaaccaatggccatattgagaatggcccattctcactggagcagcaactggacgatgaagatgatgatgaagaagactgcccaaatcctgaggaatataatcttgatgagccaaatgcagaaagtgattacacatatagcagctcctatgaacaattcaatggtgaattgccaaatggacgacataaaattcccgagtcacagttcccagagttttccacctcgttgttctctggatccttagaacctgtggcctgcggctctgtgctttctgagggatcaccacttactgagcaagaggagagcagtccatcccatgacagaagcagaacggtttcagcctccagtactggggatttgccaaaaggtaagtgtttcttcccatcaactgtctgccatcgctgactccagggacgtgcctttaacaaatgctgtgaaggaattggctggaagtggccaagccctgtgtgtgtgtactgatcagttttattacttttatactcctgaagaagtaatgtgatttaaataaattttctatgccattaggctatttcttgctctctgcataccaaatcttatttctgaccagttttcatttttaatatatttagtcagcagcatcatttgcaaaaaccttccagttttagcaacttacacctttctagaatgtgtagtttagtttaaaattcgtatcttcttccatctaatgtcattatatttagtttagtttagttttgttttgtttctattcaagaaaattatgc

SEQ ID NO: 126630 - DNA, 1082 bp, Homo sapiens
gtgactcacgcctgtaatccctgcactttgggaggctgaggccactagatcacttgaagtcaggaattcaagaccagcctggccaacatggtgaaatcctgtctctaccaaaaatgcaaaaactagctgagtgtgctggtggacgtctgtaatcccggctactcaggaggctaaggcagtagaatcacttgagcccaggaggtaacggttgcagtgagctgagatcacgccactgcactccagcctgggcgacagagtgagactccatctcaaaaaaaaaaaaaaaaattagccgggtgtgatggtgtgcacctgtagtcctagctacatgggaggctgaggcatgagaatcacttgaactcaagaagtggaggttgcagtcagctgagatcacgccactgcactccagcctgggcaacagagactctgtctcaaagaaaacaacaacaacaacaacaaaacactatttttactgagacagctcttgatttggaatgtaagttctggaacaagagggagctttaataattaagcttcctggcctgctgagaagctcaagttgtttcccatagttcttccctggcttgagctgcttgaatttactgattgattgaaaggttggaggctgtcattgccagtgctttgcaagtcaggtaaccatgacgggaggcagacaaaagctgtagctttttcttttttccctttgcagcataggcttatctcttacagttcatgttgtcttggctgctaagagcttcatatgtgagacccaaacacacagtgacatacacctgctcgggcacctgtttcatttttggcattgaggagctgggatgttgttactttgtatatagacagcagcaaataaaacttgcaagaggagcttctcctttaaggccaagagaatttcgaacttcagttctcttagagtttgaatggtgaagacttactggatttaagctatatccctctgagggcaggacctggtagtagacctagtacgtgatatcagtcagcactgctttccctttgattttatcgtaagccttaccacaaagtggatctgtctgggtttgggattt

SEQ ID NO: 126631 - DNA, 1017 bp, Homo sapiens
acctgagtattgggatatctttatttctggggcggggtcggggaggtggtgcagtgaagtgtggactgtgcttctcactcttcgacaccatgatctgtgcctttgtgtgttgtcaggcaagcatggatactaaagggctgaggctcctgggactgcctggggctctcttcacatctcctttactgccatcagggtgttgtttagatcatggacccagcctgttaagcttttgaccctggtgtaggggtttaatcatgtgattcctagactatttgctgcataccaactgcagtatttgatttaaattatagaaagcttgcaaaatagattccaaatatcgatgtacatctacattgttcatttcattatattttaaacaaatttggtttaatgactgtgatatgtattcttttccattttcttaagtgatctgttggtgcttgagcttgactgtgtttgagatgtattagtatttcattttagataaataagagaaatggctcagtatgagtaacttctgctgtgacttcaggagtcactcatttgtttcagtggcataaacttactctagatccttgtgattaagaagctctgattaatagtttttgaagttggatagccattaaaagacaataattatttcactttgcaattcgaatgacctacatgaaggcatgtgtctgttttctgctaaatacagattttgtttgattttattttagtgagtacggctccacagcagaaacctgtaagtacttacgcatattactttatatgcaccatgttaaaagagaccgtttattattgagttgttcaaattataaaaaagttgtgtatttaaagggtagacacatttataaaagctgtgtatcctcaaataggtaagacttaatgtcttgttaattttttttttttttttttttgaaaactgagtttcactctgttgctcaggctggagtgcaagtggtgcgatctcggctcactgcaacctccccctccctggttcaaacgattctt

SEQ ID NO: 126632 - DNA, 1614 bp, Homo sapiens
tattttaacacctgttttgttaattatttctcatagtttcaaatgttgaatgtttctcatgccttttatagatcatatgaaaaagcaaaacaataagtgattgtgatatagagaggatatatttgtttgtgtataaaaccaaatggaaaagctaactgacatgaacgagaatgagtagttatttttgacttggggaacacttcctttggcaataccatacatatttaaaatgcatgcacatgcacacacacacacacacacacaatcccagacaacgtagaagtgaaaatgctgcatttcagaaaactgactttagactaaagagatggctttactgatgagtacaatgatggtaaaggtgcatgtgataaagcatttgaaataaacttgctttgtgacaatgggaaatacagtctttccaaataatctataacatgaatttaaatacatatgtacttgaattaaacattaaatattataagcaaacatttgactattttatctctattcctacaagtttacaaaattttggtgggagccgttgccaaataatacttgtagtttccaaaaaattacattaccctgtctgcctcagatggtctcccacagaggtatctaatcttttggcttctctgggccacattggaagaagaagaattggcttgggccacacataagatacgctaacactaacgatagctgatgagcttaaaaaattgcagaaataactcatgttttaggaaagtttgtgaatttgtgttgggcctcattcaaagccgtcctgggctgcatgtggcctattggacaggcttggtctaacacctctttcttcttgtggaattcatgtgttctttgaaattctgttaccatcttctccatgtctgtgatgccctcttttcttacccacactgaacctttttttttcctgcttcatatagcatgtggtgaatcttatatcagcacacctatcttcattgctttggtgcttttctgcttgctgcttttcttcttctaatgtgtaagttattttaaggctgcctctccaacgcaatacatagctaagtgcttaagatcctgggctttgtagacagtctttgttttgaaggatggtttagttactatttagttatataccattgggtaagttacttaatgtttctcagtctctggacgttgataataattagtttgttggctgcattattttacgggttgaagtggcacatagtaagcatcagtatagcctattattaaattttgtcttcatggtatttagcacatcgtagagatccaggaaatatttcttaaatgagatagtagaagtttctctaatgatcttttggtagattgaaaagcaatagcaatccattgatgaaatattagtttacatttcaaaaatcttatttactggttaatatatttgcattgttttaaacagtatttaattctgtccctttgtttaaaacaaacaaaaaacacccacaaccgcattttccagtggcaactactagtataaatctttgtagtctttttctttttacataactgaaattactaaaataatcagtctcatttaccttattataactggtgcagcaaaggtgttcttaatgt

SEQ ID NO: 126633 - DNA, 1281 bp, Homo sapiens
atgctgctttgctgttgtttaccctgcacgattcagcctttacttagaagcttttgtcatttgtctggttgggggagtatggaatagttattttgacagaggagctgatttagatatatgccttgcctttaactctaggttattttgctcatgagttgtgtcaaacttaataataatgtggcttttttagtgctctgtcagactctactgctgcttttattgcctgtttataaacatttaaatgttttcccctaaatcagtcttaagacttaaatgtttataatgcacctataaccaagcaggaaaaatagaaatatcttgagttaattgccctggatggtgcttccttacgttcttcatgtttggcttgtagctttaccacagcactcagatgtctcatgtctggttgtagaccctatccccattcggtctttgtgataactctgcttatctgtcaaggtattcaagttttaaagtatgtatcatggtcacagcaaaagctttgtgccctcttctaagtttgttttttcatttttctagttagaagttgaatttgagatttaagtagtatttagagttccttttagagatgaaaactatctgggctccagaataatgatcagtttagactgttcgctcctctgagctttgagttgttttaatgaggaaaatttgtttgatgaactagaatatctgcacattcttctcctaggaattagaacatgtcattgagccaagtaaaggtgtaatgtgcttttcagaatgtactgagaagattgcataatttagtgtatcttttattagtagacttgcagtggggagtaggaatatgcaggatgttatgacaaataataatggttagattttctattctgatttttcctttaatttttcaaaataaaaaatcatctggcagcctacagaatggtatttagaacatcacacctttccagacagggtttggtcagaagctaagtttgtgggcttttgagaggtgttgcatttgatgctgctgcagtatcttgggtttctagtcatctttcagaaagctggtcatgtatggcattctggcctctggccactctccaggcccagtgcctgtctttacacaaacttgacttcctagtatcaccaactataatttaaatccttaagctgatgtctgttgctttggagatgttatgtcacattctgcatctctcagcactgcatgaaacagtgttcccaaactagtcttttgattctatctctatatttgtggaggtggttcattgtgtcttt

SEQ ID NO: 126634 - DNA, 1024 bp, Homo sapiens
agaaaaaaaaaagaaaagaaagatgataattggaatgtttcactaatcattttgttgcagaaattcttactcaatggatatataaagtatcatttctataaattgtttaaaatacttaggccagtgctgcctaagtggaatttctgggcagtctgtcttccactgatggaagatagtataatatcagtaaaacctatgagcattttaaatgtggctaatatgattgaaggattaaatttttaattttacctaattttaaaattcaaaaaccactcaactttttcttttcagatgagaacgccagtgaactgttattttaacctttctttttaaatttagaaatgaagattgtttcctttattgttctttagttcctaaatgaatattgcttccttttgccctttgtttcctaagctccaccctactctgtttttgtttttttaaaattcttttgccctttctatcctgacagtattatattttacaggcaagagtttatttccttcattgtaactcaaattagtaatttaaaggaaactgcactcagttatttgtccttgtataaagttattttgagcattttttattttaaggagctgcttaattttctgtcatcatttaaggagaaaaatattcagttatctgccatcatattacttgcctggtgttatatcctctttttaatgttctactaacataaaacagttttaaagtaaaaggagtgtagtttcttaaatgttcagttttaaagggaaagataaattaatatagacgaactctgtgttgtctgataaaagagataaaggtcagtagagaaattatggtttatgatggtagtcagctccttcttccccctcaagccacgacactgaatttagcctcagtttgttgttgccattcagtctagctagagcttacaaaaaatacaaaacccccaaatttggattcaaatttcaattcttgtacccatcaccagacacacccccacatggtgattactaatgattattaaaatactctttgg

SEQ ID NO: 126635 - DNA, 1008 bp, Homo sapiens
gggttctggtttaatatttcattcttaagtgacaaaaatgattcactgagccatattttttagggctagtgaaatagaaacagccaagggttgcatatctgtttattacagcctgtgacgtgattacccaggcttctcaaattatctagtatatttaattcagatgttcaagatttcttgtttgtattttattttgctaaattgaaaatcatcttgtagaaccatgctagttctaccttaaaaaagaaaacacccctctgctttaaagaaatggtacttcctgctttcataaacagtcatgtgcatagtttagcaaggcctgatgcctctggagctttttccctttatagcaccattgaatcccagtcctaacagaagtactgcgaatcttgtggcctcattctgaacaaaagggattagagaagaaaaatctcttgatataaggcttgaaagcaagggcaggcaatcttggttgtgaatattttctgatttttccagaaatcaagcagaagattgagctgctgatgtcagttaactctgagaagtcgtcctcttcagaaaggtacagctacatctcttgcatgaacaattaatggtgtagcattgctaagaaacaaaccaggacatatttttttttcttgtcaagtttgctatataacgtattgtcctgcatgctggtattgtgctgtattgaagatgtgtattggggcaagctgttctgcttttgcaaagggtgattgatttttttaagaaaaatagtggagcctgatcagctgcagcatgcacaccataacacagcagaccgctggttcatgtgtgacagctgttgaaggctttaaaaataatttagctaaaaagcagaaaagaaaaatcttgcttttttaaagggaaatgctgtgaggttttcttcctatatgttgaggttgctgctctacagaattacgaaggttatttgtaaaatgtaggttaaaaatacttgattttgggttgtaataaatatttattctt

SEQ ID NO: 126636 - DNA, 1068 bp, Homo sapiens
ctatctcctgaccttcgtgatttgcctacctcagcctcccaaggtgctgggattacaggcgtgagccaccgcgcccggccgggaaagatatttcaaatgagattgggggaactagcctgggatccctcaaacatttcaggtttggtacggcaatggtgttgctgttcactgagatcaggagtatataagaagacattaggcttataagtttatgggttcaattttagacatcgcattcaagccatgcagagactgtctaggtgaaaatggaggatatgtggttctgggttgtaggagagaatattgggctggaaactaagttaccgttatcatcaatgccctgtagttcttgatggcaagggtgtatgtagacagaaggatcagtgagtgaaaagagggtccttacaggtattaccagcatttaagggctgcatggaagataacggtcttgcaaagtacccagagttagaaggagaaagcaaatgtaaaagcattaaaaaaaagccacaaaaacttatgtcctcctataatgttatttagcagttaagaaacaaaattatgactaaaaataaaagcaaccataatttaaaatatatttattcaaactacacaggaactgcttgcctgttttctgtgtgaaataagcaagtgtggtcttgaggtgggagtagggcagatggtaaaggattgattaaaggctgagatgtagaaggagctgttgagtgtactgtcaagcattttcagattacatccatagggaatacaactgttaaataatcaggttgatggacttttttttgcactcactggtctaaatgtatacatggagacagtgggtgctgctttggaagaaccatgaagtggtgggcaagagagtcattttagaattgtgaagatgtgtcattttaaaatgacaagagagtcattttaaaatctgacttgtaaaagcagactggatctctatatcaattaatgtaacaaaatctagaaggttctaagatttacatgcaaatactattataaagcatattagaggaaaattggatgaaaaatttaaaaactttggtg

SEQ ID NO: 126637 - DNA, 1248 bp, Homo sapiens
tattcatccgtctttttatacttttttttttgagacggagtcttgctctgtctcccagcttggagtgcagtggtgtgatctcggctcactgcaacctgcagctcccgggttgaagcgattctcctgcctcagcctcccgagtagctgggattacaggcatctgccaccacgccaggctaatttttgtatttttagtagagttggtgtttcaccatcttggccaggccggtcttgaactcctgacctcaaatgatccgcccacgtgggcctcccaaagtgctgggattacaggcatgagccactgtgcctggccttcagttctttgagagagagagagagggaatttattgttaatttttttttggaggcttgagggtcctttgctgaggaaggaacttagataaaacatacttgtattacgctttaagaccagaaaggtcagtttctgtgtttatccaaaagaacagcctatgggactattgggtgggttttactatttgggttgttgaagttcttggaaattttactgtaggtctcagcaacagtaatcttctggagaagatgaagaatgtgattgcctccagtatctttttgccccttagatttcccctttataaattcatgtggttcagctatgagatgatctgaggatcagtctagttctaaaattgcttggatctttggttaagtgtatctggaaatgtatatttaagaataaattaatgtagctcaattgtaactaacattagattgactgtaacaggctgagaagactatgaaggtgtcaacaaccagtgtctgatatgccaggctgtctgaattgaacattcaggtgcctgtcgttagggaagcaatggtctcatggggactgaaacaagtaatttatatattttagtaatttggtaatgcaaatacagagacgtagaggaggtgaacttaattctgggaatgtgtttgtgtggaggtaacatttgggactgagattagaaaagtgagttgggtagctaggcgtggtggtgcccacctgtaatcccagctactcggggggctgaggcaggagaatcgcttgaatttgggaggcagaagttgcagtgagctgagattccaccactgcactccaccctgggtggcagaacgagactctgtctcaaaaaaaaaaaagaaaaaaagaaaaagaaaaaacgagttgggtgtacaagggagacgactgaacggtggtattccagggagaggaaactgtatacgaaa

SEQ ID NO: 126638 - DNA, 1058 bp, Homo sapiens
atttgtttgtcatagtctaaagtggctccagataaatgtaaggcacgaattaatttttaaaaatcttccttatgggccagaagtggtggctcatgccttcaatcctggcactttgagggggccaaggtgggaggatcggttgagcccaggagttcaagaccagcctcggcaacatagcgagaccctgtctctaccaaaaaaaaaaattagccaagcatagtggtgtgcatctgtagttgtaactactcaggaggctgaggtagaggattgcttgagcccaggagtttgagatcccagtgagctatcgttgcaccactgcactccagcttcggtgacagagcaagactctgtccctctaaaaaaaaaaaatatatatatatcctcctcatgtacaccccaaacaaaattaagtttgtggatgattatgtaaagaatttggcaagtgaaaggaagtttattaaatttgccagaatgattcccattgaaaaaggatgtagctctaattatttaggtagaataatctgcccagttattatgtctttttaaatttccacttgacaaaagtcagggtcctcatgcccaggtttagtgatctgaatgacaaaggagcatatcatgcccacagcttctgtgtgttcttatgttcccctcactcctaggattctaggttgattcagggcggctccgtttttctcctaggatgtctgtatctttgaagcaccaccccatgggacatcattttgagtagagttactggtaatctgctactcctcatcagggttccaggggcttggcttagtgctgtactgatagcccttagttagtggtctgggagccttaaacttacagtgtgttacaacgtagacaggtgaagcattagagctcctaggccattaactgaagagttaaaaactgttcatcttcataaggagtttgagtatcttttaaggtgtgagtaaaaacaagaataaaagagttatgaggaagatctgtaggttggatgcaagagaatgaatgggggaaatcacagtgaattgttggctttgagggatgtataa

SEQ ID NO: 126639 - DNA, 1820 bp, Homo sapiens
atctcgctgtgtcgcccaggctggagtgcagtagcgtgatctcagctcactgcaacctctgcctccgggttcaagctattctcctgcctcagcctcctgagtagctgggattataggcatgctccaccacacctggttaatttttgtatttttaatagagacgggttttcaccttgttggccaggctggtttcgaattcctgatctcaagtgatctgcctgcctcagcctcccaaagtgctgggattgcaggcatgagccccaccgcgcctggcctcaaataattattcttgagccacttagcatgttattgtccttgttgatttttctcttcatttacaaacctcataacctgctcctctatcctcatttatcattgattttgcctggctttctagaatttctttagtattttctgtcaactttgtcacttttttcatcctttgcagattttaagttttcacttggctctagatttgtattttattgaattgttagactgtgtgattattaatgagagagtgacaaaggattttgatgggtggggataaaagttagtgataattggggatagttttttgaatgttcagtttaccaatgatgatttttatgttttgcagaatttctgcttttctgtgaattctcataacagaggacttcagtaatgaacactgggataacagggactcccttttaaggctagactggccttagcagatgttggtcagttaatcatccaccctcctagattacgcagaggaattgctttattcttgcacctttgtgaacattcacttatgagtcagtcagttttgaatcaggacctcaatacttggcttcagatagcagtattagaaattggcacctgagccagaaaagcctttgcgggccttttgcatttcagcgagaagtctcttaaaaataccaagttgggccgggcgcagtggctcacgcctgtaatcccagcactttgggaggctgagctgggtggatcatgaggtcaggagatcaagaccatcccggctaacacagtgaaacaccatctctcctaaaaatacaaaaaattagccggacgtggtagtgggcgcctgtagtcccagctactcgggaggctgagacaggagactggtgtgaacccgggaggcggagcttgcagtgagcggagatcacgccactgcactccagcctgggcgacagagtgagactctgtctcaaaaaaaaaataataataataagttggagacaccaagaagggctccataagcgtgtatcctgaggcagtagaatgtgtaaacatgtgaaatagagagaagaagcagttaattggtagtggcaggagaagtagagttaggatgggagaggtgttgaaaccctagaatagtggagcattaaggtggagaaccatcccactgaacacctggaaatattgatttgggagctgctctgacttctgaagaagcgtgtggttttgaagcctgctgaggcattttcctcttaacttctaggtatattcttgcagtattccctgtcatttcaggcaaccttaacacgtatttgtttcttttcttttcagacagattcttgctctgttgcccagagtggagtgcagtggtgcagtcttggtaaactgcagcttcaacctcttgggcccaagtgatcctgccatctcagcctcctaagtagctgaaccacacgtgcatgtcaccatgcttacctaattttttttttttttttaagagatgaagtctcactatgttgcccaggctggtcttgaactcttgggcttaagcggtccttctgccttgggctccttaattgttg

SEQ ID NO: 126640 - DNA, 1015 bp, Homo sapiens
aaataataacatcttaatttttgacttttttttttttttgaagacagtctcactctgtcacccaggatggcatgcagtggtgtgatctcagtcttcgctctcactgcaacctctgcctcccaggttcaagcgattcttgtgcctcagcctctccagtagctgggatgacaggtgtgcaccaccacacccggctaatttttgtatttttagtagagatggagtttcaccatattatccaggctggtttcgaacttctgacctgaagcaatctgcccacttcagcctcccaaagtactggggtacaggcgtgagccactgcgctcagcttaatttttgactttgtacatcccaatatcagtgaaccaagtagtttcagttgtctgttaatatctggtatgaaaaaactgtctcttaagattataaaaatacttattttttctgaatattactctatgatataatctgtaaaatttatgtattttatcagtaaaataaatgatattcatatattaagaataatgcaggaaaagctttaaaacttggcctcctgctgaacacagcattgggtttcaccttgagtttggtaacagctcacagttatctaagaacttgtgttacttctactgtctacttgacagagtcagggtaaaagaggctttgttctgttgaggggctggattaactattaatgatactttgtcatagtgagaaacctttagatagttttcagagattggtttcaccacatttcattgctaacgggagtaattgtgaggctaataaaattagaaatttatttaatacattgttgtatttagttctcaaattttataccgaaacactggtaacaaacagttctggtgaactgtgaggttttagtgtatccatgcagcctttaggctgggtggtctgagcttcctctctgtcttcttgcttgttggcttttgttcacaccctcctgggggtagggggaatagggatcccacttttggagagaatgactcacttttcttgc

SEQ ID NO: 126641 - DNA, 1012 bp, Homo sapiens
taattttttatatttttagtagagatagggttcactgtgttggccaggctgatctcaaactcctgatttcgtgatccacccgccctacctcccaaagtgctgggattacaggcatgagccaccccacctggccttgtttgtttgtttacttacttatttatttattttaagttcagtgatttattttagcaattttgttatgttgtaagatcctactatgggtggaaatagaagggacagactgaatttaagtttttaacgctagtctctttagaatgccagttgtacaacttccataagacttcctttttaaatgatagaatagtgtgagaagaatttagttgttatttttttcctttaatataacactctcagaatcccaacagagcattgctttgaccttgattaaagtgtgaattttatttaaaagtgaaaattggcattttggaggctatttataatggtgtgatggcagtgtttttgtgtagtacccatttgaaagccatataaccacaaaaggcatgtattttaaatggggcatcctttggtaagacaagattatttaaaatatacattttagttacacaaataatatctgtaaaaaattaaagtgcaaataaaggtagatcttcctgcctatgtttcctctttctacactccatccccagaataaggaatatcattttatagttattttttatttttattttttgagatggagtctcactgtgtcatccaggctagagtgcagtggtgtgatctcagctcaccacaacctccacctcctgggttcaagcgattctcctacctcagcctcccaagtagctgggattgcaggcatgtgccaccacacctggcaaatttttatatttttaacagagacggggttttgtcatttggccaagctggtcttgaactcctgacctcaagtgatctcccctcctcagcctcccaaagtgtggggattacaggcgtgagccactgcacccagccatttcctagttatttaaga

SEQ ID NO: 126642 - DNA, 1053 bp, Homo sapiens
aggcaatagtctgtctgtaaggaataaaacagaaaaacaatagcaagcaaaaagcgctgtcccaatatggcaccattggtgcagaagtagcagatcttcaggtgcgtttcagaggccctgagaatatctgagtagtgccaataaggaaaagcctggagttagccaagaaactttatattatgctcttttttttttttttttttttttttttgagagtcttactctatcgcccaggctggagtgtagtggcacgtctcactgcaacttctgcctcccaggtttaagcgattctcttgcctcagcctcctgagtagctgggattacaggcatatgccgccacacccagataatttttgtatattttgtagagatggggttttgccatgctggccaggctggtctcgaactcctgacctcagatgattggcccgcctcggcctcccaaagtgctgggaattacaggtgtgagccaccacacccagcctaatttactttttaaccagacatgaatagttcaatttaggatggcttaaataaagttaagataggtaacctttcaactcatgaacatatgactgtcaagaatcattgattccttgaagtgttggtagctgaggctcatgtgtatttcagagaaggaaatatggaagggaacacgtgagagcaacgggaaaactaggaggtgactaggccatcattttgggataaacagcattccattttgctttggcacatctttcagttattcttctgtttaaaatatttgaaaattgtgaatttttaaatgtatttaatacaggaaattataagcataaagaataataaaatagtcaatccctaacttgagaaatggaatgctaccacaagtagagatattttttctttatattcatgctgttaatttttcctctcgctttactttctgtatgttttttattttctctgcctttattttatttatttgagaccccctccccctgaaaaaaaatctcgttctgttgcccaggctggagtgcagtggtgccatcttggctcagtgcagcctctgccccc

SEQ ID NO: 126643 - DNA, 1316 bp, Homo sapiens
ttcaaaaattaaaagaaactagaaaaagtatcatgtataaagttcaaataccagcatttaaatttctctgaagcaatttacggttcagtaattaagcaaaagaagagatgaagactttatttaagataagaagcctattaatatggattgcactatggagtaactgttcactgagtacttggctccaccaggatgatagtttgaaaagggcttcatactcctttaaaagacagcacatccaccaggataagatcatataaattaacactgattcttattccacatgcctgtccatttacaaagctcaagaggcttcataaagtatactaaactgtaacattttcaccttttattaaggcaagtttgtgaaaataatttaatacaactggatctcttcatgaactttcaacttacaacctttttaatgtaagaaacatacaaaaattattttataaaaagccacctcaataccagaaaatggtaatgaaagattttgaacccagttttactttttaaagaatgctctttccttgtctcaaattccaagtgctactcatcatccttagagccagttttgcttaaatgcttcacaacatcaacccagttccagcctcgaggaagttctcctttgtgatctgttttgtctgccagcttacgcttctgggcttttgaaagttattcttttttgtcttttttcttacttgatggggctgtattaggagtttcaattgagatgatattgcttatcgatgttgtggaattaatgggattgtgattctccatgaactgctcttattgtctttggcatattcaaacaatgtacaggtcatagcggttccaagattagcttctactgcttcctgtaacttggctaatatactctgctttacagctgatgatacggtgttgttaaaaaaaaagcgttcatagatagaattggaggtgtttggggatatgtttctgtccaggaaatctctattaagaaggctttgggatcaccattttcacctatcctatattgaaaagaaactgaacttaattcccggaaactttcatctccttcataaatagagcgtaatgcttctagttccatctcctggtcctcgttggcactcgtcacaccggttgcggggcgcctcctgagtggacggtgcttgcaacaacgaagacaaagcgagggcagcggcccagaggcccggcgaccccctttggcgccttggttgtgggggcggcacagtcttggcactggcaggtgccaatcgtgcgtgcccctggcctcggcagcgcccagctgccagcggtgggctgtgggctcg

SEQ ID NO: 126644 - DNA, 1539 bp, Homo sapiens
cctgcctcagcctccccagtagctgggattacaggtgcccaccacctgtaaaaatacccggctaattttgtgtttttagtggagatagggtttcactatgtgggtcaggctggccttgaactcttgacttcaggtgatctgcctgcctcagtctcccaaagtgctgggattacaggcatgagccacagcgcctggctggcaacaggatttttgttaaataatcatcctctgttgtctccaagattttagaaatcccagaaaacatggaaacctatgaaaatatgaacttgacctaaagtattttgaataatatttattgctgtggttctagatgcttctaaagtttagactagaggatagtttttatctttgttaggtcaggatatttagctgtgtaatagtttggttttaaagctgtatgctttttgacttctatttaggctaagaaggcttttagtctttcttttagtgaagagggtgtccctagtctgagggcatctgtaggcagcatgtatcaatcagtgattgtagcccggggccagggcagccctgcggttttcacagtggattgtctatatatcatctgtttcaagattcctgtagtcatgatactaaaacggaaaggtggaccaaatattttgtttttcagtttatcagtttttctttgagtcatctaagtaaggctcgggatactgtctaatgggaaatgaacagttaagacaaaatcagggcaagtctttgggcaagacaactctgtttactttagtatgcatacatgcatagcctgccttgttccaaaaaggatttaaggtggcactgctgtgcactttctgtggtttatggtctgagacttatttataaatacagttactagtttcaaattgaaatgaatctggcttccaaatggtgtgtagtgtacttaccccaacaatgctgccattgtaccccaaggtcttctttaggatttgaatatgttcattggtcataaatctttatcctttgatgttagaatcaatttttggaaccagctaaaagtcattaagtgccgagtttggtgaataacctggataggcaatctgggttgttagagcttttggtttattgtttttgactcatggactgtgagccaaaataggatgatgaaactagtttctaagccacagttaactccttgttaacattcagcagtcttgaacaatgggtccaattgactcttggtcttgtgctacattagcagtgccattgagatcaaataaacaagttaacattgtcctcacttgtgattttgagatggatgttttcttgggtttgtagtacagcaaagtataccattgcaaatttcatgttttcaggtcgtaatgaaaacttttgaagtcaactctaccgattttctcaaaatatttctgtttttttcagctgttaacaaaagatccaaaacagtgaacaggttgtaactgctctttatcacttggtgaaaatttcttccaaacgttttcactagcttttcacatagtttgaccctctgccacatattcgtgt

SEQ ID NO: 126645 - DNA, 2624 bp, Homo sapiens
tgctacctatgtttgtcttcagtctctccctgttccctgaacttcagttggttcagctgttcccctttccagtacctcatggggtcttagactcagcagtattcctcccaggctcatctccctagccttacacctttgtgttccatgttttctctgctgcagcctggcgcctctgtgttttcctttctgtttggcttagacctactaggactcatatcagatctcacccccagagggaggatttccctgactccttctcccccatgcgtgaggagttcctttgcctacctctgtcattgtgcagaccacagtgcttatggcattatgtctgtgtgatttttttctcctctactggcttatgagcccctcagggacataaactgagacttcttgtttatgcttgtgtaacagagtgtgtggcccagggttggcaccagtatctgtctgcagaatggataagtaagatctataatgtcacaggaggcaaactggtggatgtgggctggatcacttctgtagatgtgatcatgtggttgacagtgctttaaaattggagatattttacatgaaagtctctatggtttccatagtctgaaaaaaaatgtgactatttggccactctgggtcagcatgctttcatgatagttgttcactaggtatttttggtggtttgccacagattggtgtttttgtaaaagatggggttctggtttctggcatgtttttgcagttctggctttctgaatggctaattaaggatagagccttaatgcagatactcatgtgtatgtgtagatacacatgtatatgctaaaatatacacaaaatgctgatgaattgaattttcaaggcctttagctgaataactatcctaggatactttaatgatgaaggctcccataaaatgaaatgtttagtgactgggaaagtttatcattctgaagtttgtagattccttaaagaaaaatggacatattgtctgtacttttaatgtattttttttcttttaggtaaaatgagcttttttttttttcttgtaaccttcagcaaatatttatagacttgcctgaagaagtttttaattcctttttgaaattaaagattgagttttgttgcttatgtttggaattttaagagcattaagtaaatagtattcttgtgagtgtatgcaaagtttgtgtgcactttttttggagacattatggtccataactcccactgtatttttataggggagtgatcacaagcacatcgaagcaaaggactggggccataggaaatgaagcagcactgaagggccctaagcaggattctgcagtggtgtgggttgaggattaggaaagtatgaggggtaggagacctagtaggggccagaaatgatgacggctccaaccaggatgaaagattacagagagagaaatcctgtttagttttcgtggagttttaagtaatctaagtacttatgttaattatgaaactgtgatactgtggctgacaatatcctcttaataagctactatgtagattgaattagacaaaatggtaaaatagtctcatagctctctgtaggaaaagaatctttagttgaataagcagaaaccactttccaccttgtgatacattaaagctttaggtgtcgggtgctttaggaactgcagaagtggtcttgccaattggaaaagtagtactaccataagaattttggattatagtttcttggtagtcatgagaatgaaggttatattaaagtccatacaattatatgaaaatgagtacatgcccatcattctttaaggaaatcccctccctctgttggttgccctaaataagagttctaatatacagggctttccaatttttataaataacaactgcctgaacatttttgcacataaacacatccagcctgctcaagaatgggttttctagagtgctcagagaacataatcttttcaatgcttgggaggtagcataagagaagggagagcagaagaaatattcaggtgccaactcagtctgttttacagttggttgttggcaaaataaggtcagagtttgtttccagcatgtttttgaaattccccttagtgcaaacttttccatgaaaacaatgtaaactgttaggacctccaggtagagcagcaaaaactctaacactaaactgctaattttggggtatatttgggtgacgaacccataactatagtagtaaagctatcagttaatattactaagttctcccattttgccaagcactttgcaaaaatactttcgcatatgttattttgtgttaacctcaccacaatcttaggagatacatgatggaatccagaattagagatagaaagtaatttgaatttcaggagctatcttttgagtccaagtaatgtaccaaagctcatactgttcatcaccattgtatatcccacttcactgttaagttactatgatgattataaaagataaagcgtatgttatttctgattataaaatatatacttaaagttaaacttaggaaattcaaaaatgtggaaataagggggaaaaaaccccacccacagtcttaccacttatacacttttaacataaacttacctggattctgtaggaagtcatatttacta

SEQ ID NO: 126646 - DNA, 2013 bp, Homo sapiens
tattatgggtgtgtattgatatttcattatggttttcaattgcattttcctgagtaatgatgttaaacatcattttttttttttttttgagacggagtctttctctgttgccagactggattgcagtggcatgatctcggctcactgcaacctccaccacctgagtacaagcaattctcctgcctcagcctcctgagtagctgggactacaggtgtgtgccaccgtgcccagctaatttttgtatttttggtagagatggggtttcaccatgttggccaggatggtcttgatctcttgacttcgtgatctgcccacctcggcctcccaaagtgctgggattacaggcgtgagccaccaggcccagccaacatcttttcatatgtttcttggtcatttgagtttcctgttttgtgaagcgcctttttaagtcttttgccccctaccctttaaaaaaaatattgtgtcgtaagtttttcttactgatttataaaaatttgtagattttcagatgacttctttttcggatgtatgtataagttatgtatctttctaatcattatggatatcattttgtaatctaaaagcaaactggaaatcaggagggcattctaaactggttctggaagaaccagtaattctccaagtaaaataagggggcagggcaaggaccttccatgccgaagaaacactgcagttggtgtcaacatgtggggtttaaaatggcgtgtagtcttggaatgtcaagcaggttagtagggctggagtgcagggtgtggtaagcaataaatagggctctgaggaagtcaaacgaaggactggggagctgttaaggggtacacactcaggtttttagaaagattcctttagctattgtgtggggagttgcttagaggccaggggctccattgggaggctattgcatgaggcttcaggagactgatgtatattaaggggccagaatccactagacttagtgtccagtttaatgtgagaggagagtgggagggttctaggattaattccatgtttctgaattagctaaatttatgggtggtgttgccattttttgcaatagggaatgcagaatgtgtttcggaaaaattaatggtgactttggccaggcttttctctttttttcttcttttttttgatacggggtcttgctctgttgctcaggctggagtgcggtggcgcgatctcagttctcactgcagcatctgcctcccaagttcaagcaattctcccacctcagcctcctgagtagctgggattacagtgccactaccacggctggctaatttttgtatttttttttttcagttgagatggggtttcaccatgttggccaggctggtcctgaactcctggcctcaggtgatccaccctcctccgccccccaaagtgctgggattataggcatgagccaccgcgcccagcctggccagcctttttgaggtctctatataaattcctttaagagctgtttggtcagtgtttatagctagagcactgggaagagctctgttgagggtgatatatattgggagttgtcaggtatagctgatggtagggaactggctgaatgaaggtgcattaacatgtgaagagaaggctacaggtagggttggtaaaggaggagccagagagatgggagacccaggagaaagttgtcttacagaaaccaagggaatacagcatttcaagaagggcgtggtcagcagtgttagtctgcagataaaattcaagtgagatgagccttaatcttggcctttgcttttggcagttagaaaatcattagagactatagctggaactatcttagcacagtgttttaaaataaaagcaaccttgcagctgtaaaagtgaataggaagatagagcagggtcctttttgttttgtttgtttttcttaagattagttattgaataagctttttagtgtgtgtgtgtgtgtgtgtgtgtgtgtaaaggagaaaaggtgctttttattaaaaaaaaaaggggggtggggg

SEQ ID NO: 126647 - DNA, 1031 bp, Homo sapiens
agcttgcagtgagccgagattgcgccactgcactccagcctgggcgacagagccagactccgtctcaaaaaaaaaaaaaggttgctatgtggagaatagattgtggggatgggggtagtagtggaaacagaagtggcctgcagtagtgcatgggaaaccgggtgacgttgagtgtgtgaggagtggcacctgagaagtggtaaaagaatctccaggagactagtattttcagggtaccccgaattttacagacagctctgacaggttaagcccacaatagcttcgtttggatcagaattcaggtctcttgaagcacggtttttgctttttgattaattttccagaggaggaaaaggagtaataggtataattttaaactattaatatgatgactggcaaacttgaattatgtgactgtgggtctggcttggtataatatgatttacttttgtcattatctacttttgtatatacaagcaggcttttaattaattttagttcatttcaaatctgtgagcttttatgaattgagccagttcctagaggctacttttatggtacactggaaattgtagttgtcaggaataagattaagattatttagtgggtcaaaattttaatcctgttagattgtcctgtgagtttagtttgcttattattaattgtgctgctttgtgagtaacaggcagaacggaaggactgtagtgctgtttagtcacaaatcttaggaattagctacatcacatagcttgggataaatttttgccttatagtatgtttatatggaggtacaatttttaaaatatctctttcatttatttttttcataacttttattgggatatagttcacataccataaaatttaccttttaaagtaggccatttacagatttttagtctattcattaaattgtgcagccgttatctaattctataacattttcacttccccagaaagaaactccatatttatttcccagttattctccattccccttccccctgcgttggcaacaactaatttacatt

SEQ ID NO: 126648 - DNA, 1395 bp, Homo sapiens
ctgtcatctgcctttttgtgaaagttcctgggcagaatttctgtaaccattcagcaggttcacactcacagatctcttacttccatggtctcattctccaaggccccctaggaagtggagtctaaggaaagcagcacagttctttgtatttgcttagagattatgtgactctcgctggtctgtctgcagctgccttcattttctgactgttttctttcttgccttgcagaaggcaaatacagggctctgaaaatggatttttctctacccccttctacttacgccaccatggccattcgagaagtgctaaaaatggataccagtatcaagaaccagacgcagctgaatacaacctggcttcgctgagcagtaccttgtccacagattagaaaacgtacacaagtgtttgcttcctggctccctgtgcatttttgtcttagttcagactcatatatggatttcaaatctttgtaataaaaattatttgtatttttaagtttttattagcttaaagaaataatttgcaatatttgtacatgtacacaaatcctgaggttcttaattttagctcagaatataaattagtcaaaatacacttcaggtgcttaaatcagagtaaaatgtcagctttacaataataaaaaaaggactttggtttaaagtagcaggtttaggttttgctacattctcaaaagacagcaggagtatttgacacatctgtgatggagtatacaacaatgcattttaagagcaaatgcaacaaaacaaatctggactatggataaataatttgagagctgccacccacaaatataaatacagtactcatgctgactgaaataataagacatctacaaatttataaacaaaaagtgattgtcattatcctgcttatgtactagattcaggcaagcattatagactttttggttgcggtggcttttgcatttatattatcaatgccttgcaggaacgttgcattgataggcccattttatttttttattttttttttcgagacaggatctcactctgtagcacaggctggattgcagtgcaatcctgcaattctcaatcttgcactgcagcctcgacctcccaggctccagtgactctcccacctcagcctcctaagtagctgggagtacaggcgcgcaccaccacgcctagctgatttttgtatttttttgtagagacgggggtttggccatgttgccgaggctaactcctgggattacaggcatgagctgtgctggccgggtttttttttcttgatgtaaacgtgtacagctgttttattagttaaggtctaatttttactctaggtgccttttatgttcagaactctttccactggactggtatttgctcaaaaataaataatggtagagaaga

SEQ ID NO: 126649 - DNA, 2080 bp, Homo sapiens
tataaaaaagactctacatcaggtgcgcgggtgagccagatggttttccaaggtctcttatttttatacatttatttataactgcctcttccagagagagtttgaagcctctgtatatgctgtcttccaactctcagcccatataaaatgcagtttagcaactttggatgaaatggccttttgtagttggcttgggaaccttacaccacaggtactatgactggttgcaaaaataactgaaaaattggccaaaccaaagctcagtacaccctgtagtcctagttactaagtcactaaattttgattccagggaacagattttggattataaattaaggtgactaattttattagggcagtctaactgaacttacattgttactctctttataatctagttcaggataacttgactgacaagctgcatttcaactaactttttgtattttatattagttcaagaagcctacagggaaatgctcacagctgacaatcttgatattgacaacatgagacacaaaattcgagattattccttgtcaggggcctaccgaaagatcattattcgtcctcagaatgttagctggtgagtaatcatctagaatgagatagaactgaattaccatataagttgtaagcttttgcttcactttatatagagtcatgtactgcacaagaattttcagtcagtgacagattgcttatatgatggtggtatcataagattataacaccatatttttacttaccttttgttttttttttggtttttttttgagacggagtttcactagtcacccaggctggagcacaatagcatgatctcggctcactgcaacttctgcctcccaggttcaagcgattctcctgtctcagcttccagagtagctaggattacaggcacctgccaccacacctggataatttttgtatttttagtagaggcagggtttcaccatattggccaggctggtgtcaaactcctgacttcaggtgatcctcctgccccggcctcccaaagcgctgggattacaggcacgagccaccacacctggccttaccttttttcttttcttttttctcttttatcttcttttcttttccttttctttttcttttccttttctatctttttcttttctttcttttctttttttttcttaatagaggcaggttctttctgtcacccaggctggaatgcagtggcataatcatggcttcctgcagcctcaagctcctctgctcaagcaatcctcccacctcggcctcccaaagtattgggattacgggcatgagccaccacatccagcctgtgccttttctatgtttagatgcacaagtacttaaaccattgtgttacagcagcctccagtattcagtacagtaacatgctgtataggtttgtagcctaggagcaataggctatagtctgtaaccaaggcgtgtagtaggctataccatctgtgtttgtgtaagtacattctgtgatgtttacacggtgatgaaatgcctgacaagggttagaacatgtccctcttgttaagcagtgcatgactgtactttttcagtgcttacaacctagcatctaagtgtttcataagtgttagttattattgttattactactattgttaccactactgctactactttgtatttttcaaatcatcaagaagtaaatgaagctaagccgggcacagtgtctcataagtaagcccggagactccagaggctgaagcgggaggattgcttgaggtcaggagtttgagacaagcctgggcaatatagtgagaccctgtctctaaaaaaagaaaagaaataaagaagctgttttgaatataaacagttatgggaagtgagttcatttacattttattggcatcactgaattattgaagaaatgtgtagagtgaacttttttcctatttctaaaaacttagatttgcttacagagctatctctgagcaaattaccttacttagaattagctgtgagttccaaacaccgctctggttgttttaatatcatgtttctagagaggaaaatatacttatgttagttcgtttaaaaatactttatt

SEQ ID NO: 126650 - DNA, 1055 bp, Homo sapiens
tttgtagagatggggtttcgccatgttgtctaggctgctctggaactcctgggctcaagcagtctacccacctcagcatcccagagtgctgggattacaggcgtgagccactgctcctggccccagcttaatttctttttcctttttttctttcttttttattttgagaggagtttcactcttgtcacccaggctggagtgcaatggcttgatctcagctcaccgcaacctccgcctcccgggttcaagcaattctcctgcctcagcctcccgagtagctgggattacaggcatgcgccaccatgcctggctaattttagtatttttagtagagacggggtttctccatgttggtcaggctggtctcgaactcccaaccttgggtgatccacccaccttggcctcccaaagtgctgggattataggtgtgagccaccgcacctggcataatttaagcttttaagtcactgaacctgtaccaacttgtacttctgacttgcttagatgtatataattttagaagattgagttcataacaatattgcctattttcttaatttattgttcacttgtgaatttacagccacagccacctatattgaggaagatgatgttaataattactctatccatgatgtggtaatgcccttgcctggtttcgatgttatctacccaaagcataaaagtaagttccctgtatggggaaaatagttaaaacaagtttaacataatgaagctactatttcaagcatatataaactttggttatttatgacagtctcccagaaagggatgcattcacatggaaaatttaaattaagaaactctacctctgaatctaaaataaaagttgaaattataaaataaaataaataggtcaggcacggtggctcacgcctataatcaatcccaacattttgggaggctgagatgggtggatcgcttgagctctggaattcgagaccagcctgggcaacctggcaaaaccccgtctctactaaaaatacaaaaattagctgggcctggtagtgcacacctgtggttccagctacttg

SEQ ID NO: 126651 - DNA, 1369 bp, Homo sapiens
ggagtttgagaccagcctggccaacatggtgaaaccctgtctctactaaaaatacaaaaattagacaggtgtggtggtgtacccctgtaatcccagctagtctgtaggctgaggtgggagaattgcttgaacccgggaggtggaggctacaatgagcctagatcgtgccactgcactccagcctgggcaagagagcaagaccccatctcaaaaaaaaaaaaagtacagcactttttatatttagaatatgttttcttgcctatttttttccttccctccagatacccagaaataatcgcttaatgtatattcatagctaccaaagctatgtgtggaataacatggtaagcaagaggatagaagactatggactaaaacctgttccaggggacctcgttctcaaaggaggtaaaaaggcagatgtctttgttactcagctaagctagggttcagttagttgccactagtggctttaaaatccatcctggctattaattaagaaagagagatgtggtgaggcacggtggtacacgcccataatcctgacactttgggtggccaaggtgggtggatcacctgaggtcaggaggtcaagaccagcctggccaatatgaagaaaccctgtttctactgaaaatacaaaaattagctgggtgtggtggtgcatgcctataatcccagctactcaggaggctgaggcagaagaatcgcttgaacccaggaggcagatgttgcagtgagccaagatggtgccactgcactccagcctaggtgacacagtgagatgccatctcaaaaaaaaaaagagatgtctagtaagtttgagatgaagggaccatgcaaacttacattggctagtttgtatctgtatttttaaagaaaaaatgtatatctggtttgagtaagcacctcgatctcgaactccccacctcgggtgatccgcctgccttggcctcccaaagtgctgggattacaagtgtgagccactgtgcccggcctgagtaagcacctctctctgggcctcccttttctcaactcaaataggatttgggctaaatggatggctgaaatcactttcgaaacttcgatctaggtctagcaaataaatacacctctggatgtgtcttgttagccaaccttaaagagtttcttcaagtcactgggcgcagtggctcacacctgtaatcccagcactttgggagccaaggcgggcagatcacgaggtcaggagatcgagaccatcctggctaacacggtgaaacgccgtctctactaaaaatacaaaaaattagccgggcgtggtggcaggcgcctgtagtcccagctactcaggaagctgaggcaggagaatggcgtgaacccgggaggc

SEQ ID NO: 126652 - DNA, 1033 bp, Homo sapiens
aatgttacgggtaagcattatgttttccattttattctttttttgaaagttcttttggcacttgaagttcttttacatttcaaatctgtatcatattagattttctgcctacttttaagtttaatgagatgatgtaggaccaggtgtaatggctaatacctgtaatcccaacactttgggaggccaaggtgggaagatcatttgagcccaaaagtttaagaccaatagtgagaccccatctctacaataaattaaaaacttagccaggtatggtggtgtgcgtctgtagtcccagctactgtcaggatggtgggaaagctgaggtgggagaatcactagactagagcctgggagtagagcctgggaggtcaaggcttcggtgtatagttaatatgatttgttgactcttcaaagatttgtgcatataaagttttatctttatgcaaaatttagtaaaataaatgttgtttaattttagagctatactacaaaattcctggacagaagtcatggatttaatattgaaaccccgctctggaggtgagaataaaattcatgttaagaaaataaatagaatgtatggctaggtattcatgaaattgctttgaataaaagcttttgtgcaaattgacgttgttgtttcagtattttatttgtttttacaataaaagtataagtttatttatatttttcaacagttgtatatgtatatttaagatttataatttatatcctattttagcttttttttttttttttgataaggagttttagtcttgtttcccaggctggagtgcaatggcatgatctcagttcactgcaacctctgcctcctgggttcaagtgattctcctgcctcagcctcctgagtagctgggattacaggcttgcagcaccatgcctgggtcattttgtatttttagtagagacagggttttaccacattggccaggctggtctcgaactcctggcctcaaatgattggcctgccttggcctcccaaagtgctgggattacaggcatgagccaccat

SEQ ID NO: 126653 - DNA, 1039 bp, Homo sapiens
agtaatctgttgggtaactcagacccagagtagccagacagagatgtcacattttctgatctgtgttaacacgtttattaaactttgatctgcccttccctcgctcttaattttattttattttttatttttattttttgagatgaagtcttgctgttgcccaggctggagtgcagtggtgccatctccgctcactgcaacctccacctcccaggttcaagtgattctcctgcctcagcctcccacgtaactgggattgcaggcatgcaccacctcacccagctaatttttgtatttttagtagagccgaggttttgtcatgttggccaggctggtctcgaactcatgacctccagtgatctgcccgtcttggcctccctaagtgctgggattacaggcatgagccactgtgcctgggccccttccctcactctttaaagaatgtaataaatgataaaattagtgacatggaatttaagaattgtcatttacttttaaacaattaagaacccctctagggtaacctacagtgggaatcccatcaataaatagttgggttcctaaatctacttctggaatcctgttgcccagcagagactctgttacataaactaattattcgcgtgggagttagaattgtggtagttacaagctggaagttatctaagcgtccatgttcttccttgtctttcagacccttcatgttagcaaacttaggctttgagaggtctgcctgaactcatcaattgcttggctttagtttgggagtagagttttccgggcttccagtccattgtttcagcatctaaactatgaagttgcattcatttttgtgattttaaaagcgcaaaatgataaaaatctatatttcctctgcctctttgaggaggttaaaaagctcaggtgaaaacagacttgagttctgaggcttaaattactcatctgtagaatggagataataataccaattcacagaatggtgaaaatgaagtgagatgatgtttatgctacatctatttttatgcctagaatatagtga

SEQ ID NO: 126654 - DNA, 1049 bp, Homo sapiens
agaaaaagcaaagcaatagttacttgtctcactatcaaaaaaaagataatcacaaatagcattttggtacatgtcctcccatatttaagtaaacagatctctttttggggaagcatttactatccttaaaccttttgcttcatctcatgggtacagacagtgcagctttgagcgtgaactaacatgcccattgtgaagggattgagacaaggaggctgcacctgtagaagagttttctacttgttcactgtttgcctctaaaacattccattgttaatgtctaaatggctgttaacccaccgcataactaccgggtgctgtagaagtcctcagtgtaaacttaaccatgcgatcatttgcatgttcacctctaaagcactttaatattataaattaaacattgctcttttgtgctctttatgctgtgcatttggacagaggtcagaactgcagcaggtaagagcatttggcatttcatgtagataaagtgaaatgccaaagattttgtcacaagtgctaagtatagacaactttgcttaactgatagtgagctggaaggaaaaccgaaaatgatattcctgctcaacagttttctgaagaacttgtgaggaattcacaccaaggactaaagaaatacttgtaatacttttctgtccaagacagaaaaaactcacatatttatcaagaaggaagggtgattcactaagcatacatgctatggcagttttctgaaatggtttatggagtcttttgttcttttcattgtaacttatcactaacttaccaaacagtgcttttgccttgacaaagccaggtatccaagtaccagcttcggtaccagcagtatcttaagcctctgaagataagggattcatgagttcatgaaaaaggattatttttaaaagaagaggactctttctaggaattgttgtatgaaacattttttcagtttttctttcatggagttacagtaatcaaatgaactagatgtgttgtttaagtaacaactgcagctctgtgccacacaggactcatgaatgttattgtac

SEQ ID NO: 126655 - DNA, 1110 bp, Homo sapiens
tctcactttaaaaagaagcaagaaggaagtcagattggatcaactccctcttgtatagagaaccacacttcttgggcttgtggtgttgtgacatttcttcaaagatggactaaatctctgccatctctcccacctcctcatggaaggccacccctggcacagatgggcacttaggagcctgcattcatttttatagaccccactctccccaagctgagagtggcctaaagtgaacacccctaggaaaggaggaagagctggtatccaaagattattgttcatggccctctaccagcgacagcttgtcctcctgagccatcttgcctagcatttgaatgatttagcttttaaagtatcattacaaagctttgtaatttacagtttttttttagctgtattactaccagatcctgatagaaattgttattatgcattatctagcagattcacaatattcttaacctgaacttttctcagatagaactgtgcatcctaaaacatagatgtggtggattctaaatcattgttcccaaacaccacaaattaccaactatttaaactcagacattattttatgtgttaagccagtctgatagggcacattgctttacctaccaaaatgtatatgtgatttttttttaaaataccatctaaactatcataacattactgataaattaatttatattttgagacagtatacattccaaatgcttctaagaacatagtttttaaagacttatgtaaaaaaaagaaaattctgccatgtgataggtacaggttctctatactttctgaaatgaatggtccccaggagggatccctgtatgtaggaatccatagagactcaggaggaagagctagacaggtacaaagaagctctctgggaaagactggtgttatagaatccacaggaatagggaatcccaataatcagagtgatcaatggactaccattgcttccattcctgtggcaatggaaaatgctacagataggtccagcaagataattactctgaaacctgtctatcagtttagcaacatggaagttgttggtgtcttttcaccggagcattctagtggaatgatgaggttggaaaccagtttaca

SEQ ID NO: 126656 - DNA, 1012 bp, Homo sapiens
agaggttgcagtgagctgagatcactccactgcactccagcttgagcgacagagcgagactgtcaaaaaaataaaaataaaagatttttgaaatcgtatgcaggcacttttgttattttgcgtagttaataaggtgagcagtgtttttactaattcactgtattacttccctatttaatgtttgttaacttggtggtattgctatctgttttttttaataggttatcgaggacaccaaagagaaaagaaccatcatccatcaggctatcaaatctctgtttccaggattagagacaaaaacagaggatagggaggggaagaaatacattgtagcctaccacgcagctgggaaaaaggctttggcaagtaggtgtctgtgagcagcttcctcctgccaggcagccgtgagcggcaggccccgctcctcgttagccttgcccgttcgtgttcaagggctactatagtgctgctcagagaacaatattgatcatgtccctccttcagagagggtgagtattgtcacttcagatgccagcgcagtcctgcagcctgcctggcaaggggcattaggtcttttatgtgagtaaagatttgctgaaattatagtagtgcctgagagagagtcttagggatttgatatgttccctgaagagcagagcatactgagtggcaattcaagaagaaaatagaaggattattgctcattctgtgttcttcatggaggaaagaaagctttcagatgaacaaaaaacgcttgtcacctatcccagtggcacattttttgcaaggcccctatatatatatatatatatatattttttttttttttttgagacggagtctcgccctgtcgcccaggctggagtgcagtggcacgatctcggctcactgcaagctccgcctcctgggttcatgccattcttctgcctcagcctcctgagtacctgagactccaggcacctgccaccacgcctggctaattgtttgtatttttagtagagacggggtttca

SEQ ID NO: 126657 - DNA, 1037 bp, Homo sapiens
tggcctcccgagtagctaggactacaggtgtatgccaccacgcccagctaatttttgtatttttagtagagatagggtttcactatgttggctaggctggtcttgaactcctgacctcaagtcatctgcctgccttggcctcccaaagtgctgggattacaggtgtgagccactgcacctggccttgataaactcttcagatatctgaattgtttataagggaaatatgccgagggatttatattagaaatagggatcaaattcataagcaggtagagcacagttatttttctgtctttaataatgtgttatttccctgaggtcttttatgataatctctccatttccagctttcctttagagcttctgggattttcttcatctctaaatttttttataatggcctatttttattctgatgtacattgtctttttttcaagtagtttcttcttgctagaattagcatccttacattagctctgtttcttggatactatagtatagcactatcactctgagtgaaccttgtttctctagcttttcctatgttgtaaatgtcattcatactttagtgttgtgaggaaatctatttcattccttccttaaaagcagtactcctgccgggcatggtggctcatgccgtagtcctagcactttgagaggctgaggtgggcagatcgcttgagctctgaattctgtgaccagtctgggcaacatggcaaaaccccatctctgtttaaaaaaaaaaaaatcagccaggcttggtggtgagcacccatagtcccagctactcgggaggctgaggtaggaggatcgcttgagccccgagaggttaagattgcaatgagccgtgattgtaccactgcactgcagcctaggtgacagagtgagactcttttaaaaaaaaaaaaaaggcagtactcatattctgtttgtacatttgaaattcttctgtaatatttgtatatatatatatatatttttttttttttgagatggagtcttactctgttgctgaggctggagtgcagcggca

SEQ ID NO: 126658 - DNA, 1033 bp, Homo sapiens
taggaagatccctcctgcggcagatagccccctgccctcgccagcagcccacatcaccacccccgttccagcatccgttttgcagcctttcagcaaccccagtgctgtgtatcttccttcagctcccatcagctcgaggctcacctcttcttacataatgacatcagccatgctctcaaacgcagctttcgtgacatcgccggacccgagcgccctcatgtcccacaccacagctttccctcatgtggccgcaaccctcagcatcatggactcaaccttcaaggccccatccgccgtgtccccgataccagccgtcatcccttccccatcccacaagccatccaaaaccaaaaccagcaaatcctcaaaagtcaaagacctgtccacccgtagcgacgagtctccaagtaacaaaaaaaggaagccacagtcttcgacttcctcctcctcctcctcctcctcctcttccttgcagacatccctctcgtctccactgtcagggcctcacaaaaagaactgtgttttgaatgccagttctgctttgaactcctatcaggcggcccctccctataacagcctgtctgtgcacaactcaaacaatggggtgagcccactcagtgccaaactggagccctcaggacggacctcgctgcccggcggccccgcggacatagtgagacaggtgggcgcggtgggaggcagcagtgactcctgtcccctctctgtgccctcccttgcgctccacgcaggggacctctctctggcctcacacaatgctgtgtcttctctgcccctctcttttgacaaatcagaaggaaaaaagcgtaagaactcgagttctagtagcaaagcctgtaaaatcactaaaatgcctggtatgaatagcgttcacaaaaagaacccgcccagccttctcgcaccggtgcccgatcccgttaacagcacctcctctcggcaggtaagggacctcctggcaccgccttcaccggctctggggggcagggggagctgggcagcgcccctgcttagccgg

SEQ ID NO: 126659 - DNA, 1854 bp, Homo sapiens
gaggaagggggagagctgcttttgagttatagagtcatttgcagacttgcctgagccctaaaccagccaaatgtcaccttctctgaggctgcttcttgcatttctgtctgctagccttccggttgccctaacatcataatcaaatgtttattaaacatctgaatgccaatatttcatccacatattttaagagagatagtgtgctttaaacattttgtggatccctgtctcccccatctatttgttagcccaaatgcctactatcctcatactaaggagaaggaagaggatgggctcccctgtctatacactgatagtcgaatcaggtatgtaggcatcctgtgtataacgtaaaacagccatgtcataagtccaaggcaaaatgtaataaagcaggcaatgggtgtgccatgggaattcacagtgggaagatcactcagatgagagccactggaaatgagagtcttgataagggaaccaggagagagagggggaaattgggattgacaaaaagaagaaggaaggagacaacagggagaaggaacagcaggagcaaaagcttcaaggtggtgctgtgtcccaggacagcctacaaagactgattggaggcagaaatgtggtcgagactgggaaacgaaggcatttagcctggctggaagcaaagtggctctgttgacatcagataggaaaggtgggacctgggacaccagcacaagcagtttccattactatcatgagaagcagggaaccaccaagttccttgagaaaatgtggctgataataggacaaacagatggtcctgaaaagtcaccctgggtgttggttgttgtttcttttttttttttttctctgagacagtctcagcctgtcacccaggctggagtgcagtggcacagtctcagctcactgcaacctccacctcccaggttcaagctattcccctgcctcagcctccctacgagctgggatcccaggcacgtgccaccatgcctggctaatttttgtatttttagtagaaacggggcttcaccatgttggccagactggtctcaaactcctgacctcaagtgatccgcccacctcagcctcccaaagtgctggcaatataggcatgagccactgtgcctggcattatttgtttcttaaccaaaaatgctggctcaatcccagaagtagaaaacgtagccccttctgtgccacagaaaattgaatgtagctattgttgagttgtaatatgaggttctgcagaaaatccagagctcaaactacagaactgcagaagtatttttggcttcagtacggtttgcttctttgagtaaaactgtgcccttgtatgtttttatgtaaatgttatttttctctgtatagtttatattagcttattaacctgtaatcaaaattaaaatttttttttcctcacagttttgctcatttgggagtcgcctcatgggacgagggtactatgtgtttgatagaagatgggatcgttttcgattcgcactaaactccatggtagaaaaacacctgaattcacagatgtggaagtaagtgagcagcttttgtgcaatataagatccaagctgccccacagttacctgaaacttaactttctaaataaatgtcagtggctgacttttcatagaacaaaatgattctgaagtcaggatgcttgattaattcttaaataccagctcttcttaatggtttgcctgaaggttttgagaaacacgaatgatgtgttacatgctttgtcttttttggagaccatttttgtgttggtaatctcctaaatgagaaggatgttagataatatattgtctgtttacctaagttaaagggcctttttattgctcc

SEQ ID NO: 126660 - DNA, 1027 bp, Homo sapiens
gtgatccacccacctcagcctcccaaagtgctaggattacaggcgtgagccaccgcacccagcctgcatttttaaaaatcagagtaagataggcacatagttcaaaaattaaactgtgcttaaataattagaatgaaaacagttcctgtcatcctggaacatgtctttgctctttctgtgttcaagcgcctgtttcctggatccaagtgactgcctccttcttagtttgtgcctttaaattttgatgaagtacctctttcattagcttcctgtgaaaagatttgtgggaggtcaatatttagaatccttgcacacttgaaaatatttttattctactctcacacttaaattgataatctatttgagtatataactggattgaaaatcatttccctacagaattttgaagacattttttcattgacttgtaacattgaaaattttatcaagaagtttaatatttttctgattatcatttctttgcacacgtccagttttttttctctgaagactggggactctgaaagttcacacaatagtcactcttcttctttttttttttttttttttttttttttaaagacaagattacattctgtaacccaggctggagtgcagtggtacaatcatagcttatctcagcttcaaactcctgggttcaaatgatcctcccacctcagtctcccaagtacctgggactacaggtgcaagccactgcccctggctaatttttttatttttttacagaggcagggtcttgctgtgttgcccaggctgatcttgaacatctgggctcaagcaacctgccctcagcctcccaaagtgctgggattacagatgtgaaccactgcactcagctgatcactcttgatgtagctcattttcattcatcatactgggtactcagtagctcattcaatctggagatacttatcctcttctgggatgttttcctgtgttacatcttggataattttctccccactattgtctttattctttctttcttgactttttattaattgga

SEQ ID NO: 126661 - DNA, 1641 bp, Homo sapiens
ggccgggctgggggactagctgagcagcggggggagggggcgtgattcagcagtggcacattgtcttcaggggacaaacggtatctcttcctgagcttcacaacaggcgccttgttctgcccaaggtgctgtgttggaaatggccaacctatagggcccgggaagtggggagttgcaggatctatggggacagctcagcacgggcggtaatcagtcagccctgatgccacccctgacactgtgccagcctcgcaccccctgttgatcctttccagggcacagaactctctcccatcaaaactggactcatgctgcttgcttatagaaggagtataaataagtgataaggaaatgttctgataatgataagcgggtatggttcctcagcagactagatgtatcaaagaagacaattgtgtgtgtttgttcatttatttttcagtgttccagttcctgtagtcagtttagagaaaattcctaacctagtgaaggcagatggtgccaatgtcaaaatgaactccacaaccactactgcagtttctgcctcctccacctcgtcctctgccgtctccacccctcctttaattaagcctgtcctgatgtccaagtcagtgccaccttcaccagagaagatcttaaatggcaaaggaattctgccaaccaccatagacaagaaacaccaaaatggcaccaaaaacagcaacaagccttacaggagactttcaggtatgtgtcagtgtcgtcagggtctgactcatgattagactgaaagggagtcgcagccataacgaaggagtgatgtgctgttatcattaagcaggtctgtttcattttaagggggatgcagagtttacctgcaaacaggaaccccacctaaaaatgcaagggaaaaccaggtctcttcttccccgggcagatgaagtccctcactcagttcagtgcttagcgggagttaccctagcaacccaggaggcagggtgctctgcaccgacctactctgtagattccgagggtcttgtgagcaggtgattctgtgtatctgtatcatacaaacaggttgaactagccctggcttccatagaagcttcactgctgggaagctggacaacacacagggatctcatggtgcctcaaggcatgtgagggacagccccgccaacagctgtgctgcacagggacacacagcctctgtcctttggcctcgggagtttccaggttaattctgcagttgagtttacaactgtcgatcccccataatcaggttggaattcccaaacaggaacagtagggctggcagtgccgatagggtgctggggcggtctcttgtgggtctactccttggttgtctgagcagacacttggggtgccagaagaggcacacaggatgatggttatttgttagaggcccctatgtgggtaatgtttgctttggatcgatctgctgtagaactaaacgtggcagtttttactttctccaaaagaccaggagaagctataaacttcataacttcttcttacatcatgggcactccctgatggtggccagagaaagtaaaatacagtgacagccaccctgtgacagagaaactgtcctcgggttaagcttgatttttaagcacccaaggaattgtgggtaatttt

SEQ ID NO: 126662 - DNA, 1045 bp, Homo sapiens
tgacttgttcacagtcctagggcactaggactccccaggaatgtcaggacacttagcactccttattctcccagcaggtttggagaccaccttctgagctccatgccctgggaagccatgaataacagaagtacaagagagactaacagaccagcagggagacatgcgctggggcctcctgcttccagaaaattggagcagcctagaggggggcttatagagttatttctctgggaggcatcttagaaccagcagagagccccaatgcctaacatacttcaggattgcaggagacaacatgtttgtgcatgaggaggctggagttcctccttactcctcttccagaatgtcctatacagatgggacctttaaccactagtccaggcttaagcagtgcctagaatactagagatggagaagcaggtgggcttgtgaagtagggctgacaggtcctggaaaagggccattgaatctggccccacctcgttctgcttttcttcctcactgcctcacccagaaggagtcctctactctgcatgaatgtggaaggctgctgctcccaccctctgctggtgcttctgcctccaccctgtccacccctccttccacggtgggaccagaagggactaaggaagcagaagttttctgatggtgaccatgatttgcaccccacatatatacctttcaagtatcggtggatgagagcagatgctgggatcctctgtgcccttttggtttagttagagtttattgagagtctgctatgtgcctggcactatgctaagcacttggtatctactacctcatttaatcacttcaaatatctcttattatcttcatttgactgataaggaaactgaggcatggagccaggaaggcctgagataagttaggcagggcagccacatatgtttgtgtgggctttgcactgcatgagaccaccccaccaaggcaggactgaaaccagcactcactccttgccaggccaggtgtcctctttctcattcttagagtcctgataagctcactgaggctctgaaaccgg

SEQ ID NO: 126663 - DNA, 1079 bp, Homo sapiens
cggctcccagtgccaaggtgccagccctgcctctctctccaactccagtttacttttggaagaaggccccttggaaatcagggtgtttataggcagcatcctgactgcagctacaaaagcagattgaacccactgataagatagaaaccggctaatgacttgccaagcacctgccctcaaaagtgggggctgaaggagactccatgctgtcaagtgagtaagccaggtgctggcctaagcccaagtgtgcttacacaaccatggcaggccacaagcgactgtggtgctcaaagtctattgggagggggttagtcccttaaaagccatattggaaaattctcaacaagttctttctaaaaatggtgcagggagccaccttgagtatttgcagccggctcagccattcatgaggcatctgtgctaaggttttaaatacaggacactgatgctgcaagtatgaaaatatctccatgaataagcgtatggggaagggaacactgaatttttactgaaatgggattgcctgagaacctgatggattttatcttcagagagtgaggggagcaaactggagacaccagggttccccgcgcctatcagatttttgggatgctgacagctggtgtctgcaagctccctgcttggctgatctccaggactgcccctggagttgcacctggatgtttaaggaggctgtggggaagcaggtggtcttgaaacagtcagctgctgaggccttggcctggacttcctgtggtggaaatgcacaaaagtaaaaggatttggcttttcatttctttggtactggggccccccaactctttgtgattgaggtcttaggcaatggtatgagctgctgactggtacctgccagctgcctaacacctaaaaagtgtttcttcctctccctaggggagtcaggtgccctgctgaaatgcccacagacagtgggaaaggagaggtcccgctggctctttcagattcctcctatctgtagcagaatcttccaggattccaaggtggtagagcccagagttaagacaggggctctgaaaacatccccagatctgatgttttct

SEQ ID NO: 126664 - DNA, 1067 bp, Homo sapiens
agacactggtacagatagaaataaagcagtggtggcctctcttatcagcctgtggtccttaaacagtgtgctcccataggattcttgtaagtggactaatttaattcaggggcagggataaggctgagaactgcctactgaggaaagctactacctgtgtgtgtgtttttaatggacattatcatgtatcaggggaacttaatgttaagcgtctcccatgagttggcactgtggtagccaccttctacatgttatcaatcctcccaacacccatttattccacagtgaatagagtgagtgctcttgagggcaaaaccctgtgctaaacgctggagataaaagagtaaacaggacacctgccctctgggtgtgtccaggcacaggacacttagaccagtaaaccagtaattacagcgtgtgatgtgcgctaagatgagggactcagtgtactcgagcacctgtcctgttgtaactccatgatgtgggtattattgtccccattttacaggtaaggagactggggctcagggggttaagttatttccccaagtcccagagctaatgagtgacagagctgggatttgagcccagatctttctgattccaaagacagcatgtttggtcggcatttccagtgactcccgaagctcatggagcatgaaaatcacctcaggaccttttaaaaaatcacagatttgggggccctggccctgctgtccaaaagtaaagaagtggctgctgcactgtgtgttctctgatgtggaagtgcagcctggcacctgctctgcctcctgcagccaggatcctccctccacggggcctggcaagccatgaggccttagctcaaggcaccagggcaaaggtcactgatgctgcctcaagacagcgttgggaagattcggtccagctgttcaggtatttttatgtatttattttaaaatttcagcttttagattcaaggggtacatgtgcaggtttgttttggggggttttttgttttgttttgtttttttgagacagagtctcactctgtctctcaggctggagtgcagtgtcgcaatctcggt

SEQ ID NO: 126665 - DNA, 1082 bp, Homo sapiens
agcgcagtggtgtgatctcggctcactgcaacctctgcctcctggattcaagcaattctcctgcctcagcctcccgagtagctgggactacaggcaccggccaccacgcccggctaatttttgtatttttagtagagatgcaatggtgtgatctcggctcactgcaacctccgcctcccagattcaagcaattctcctgcctcagcctcctgagtagctgggactacaggcaccggccaccacgcccaactaatttttgtattttttggagagacaggtttcagcatgttggctgggctggtttcgaactcctgacctcaggcaatccaccgcctcagccttccaaagtgctgggattacaggtgtgagccaccgtgcctggctgaggttgtgcttttagagtcaaacaactccattggcctttttagttttatcattgttttctctggaagcgccatagagggaagcaaggagggccgggccaggagttggaagacctagggctgtttgtggtttgcagtgtggccctggccaaatcacatagcctctccaaatcccagtttacttgtctgtgaaaatgggaataataaagtctgccccttttaagctgctttgtgaataatgaagctgcacaccagcgtacattatcggccatgaggctgagacccaggattggacatcagaaagctttcctgggtgtgtaacttgggaaagtcacaggtttctctgaaccctgtttccctccttcataatgggggtaataatagccgcccttcccacctcacaggatcaaataatgtaatgtgcatgaaagagacataaactgtggggttttaacccacagaaatcctggggctactttaacagttgctgaccccaaggacagggctgattgaagactcacttctcagccaggtgcagtggctcacacctgtactcccagcactttgggaggccaaggcaggtggattgcctgagatcaggagatcgagaccagcctggccaacatggtgaaaccatctctactaaaaatataaaaattagccaggtgcagtggcatgtgcctgtagacccagatactg

SEQ ID NO: 126666 - DNA, 1043 bp, Homo sapiens
ccttccctgtggccactggggttggacagtgcccacgtgcactttcttccccactcaggtatcctatagctgattaactgggaaggtgtggggctatctagcatagctacaggactcgatccaaggtgccgctctatcatgatttgtatgggtggtgttttcttattgttgctgttgttttaaaaggggagaggttttgacacagaattattttatctaatttactcttcactgccccttccatttcctctgctttaccaaaagaacgttttaatgcttttgatgatattaactatttcatagttgtcttaagaaacagttatagttttcaacttctaatttaaaaatattaatattcttaccattacaaaaattcttatagattaatgagaaaaaatatactaattagagaatgggtaggagcaggcaaaatggaggaaactcaagtgaaaacattgaattttgagtgaaacattttcacctgaaaaatgttcaacctcactggcagttaagaacaaaagttacaacaatcagatagtatttttcacttatgaaaatgacaagtgtttagaaattactgtaatacccagtggtcatgaggaaaaagcaaagcagactttccgtcaagctgctggttatgtaaattggggctcccttcatgttgggcatttgactagatgtatcaaggacctggaaccaaaatttatgcttctcagaatttatataaagtaaataaatcaaattgcgtacaagcatgcctttaagggatatccactccagaattatccataatagcaaaaaattgcaaccaatatgaataacaaacaatataggctacagagtagcctctaaaataatcttttaaaaaatattttaggccaggcatagtggctcatgtctgtaatcccagcactttgagaggccgaggtgggcagatcacgaggtcgggagttcaagaccagcctgactaacatggcaaaaccccgtctctactaaaaatacaaaaattagccaggcgtggtggcgtccacctataatcccac

SEQ ID NO: 126667 - DNA, 1040 bp, Homo sapiens
ttcttgtggttggcagtgtttatacaatgcctggctgagctagtactgtataaaaggtatccagcagatatcatcattattattgtagatgttgttattatagcccaggtcaaggggatctagtgggaaagtggctgaggaaaaaaggatttcttcgaggtatttaatttgaaattgttttagcccttataggtgagaatgcacagaggagaagtgtgagtctttgttcccatagaattatttcaccagctcagtctggcagcctccaccttttcagttaatgctgacaatgtcaggcactctatcaggaagggaaagcataagtgtggaggctagaaagttccagagcttatggagagatctgttcatggctccaggaagaatgttctaataggtattctctctttgcttgctcctttaccttcttgctttgtcccatatttgtattctctctcactctctctctctctctctctattcactttgattagagtttggaagacttagaatatcttccttttgaatagggcctggtctggtcaatgatgtttacatgtcaacattcaggaatcactttcatttactctcaagctccatcacgtaagaaactccaaagccagccaggttaaaaaaaaaaaaaaacatgaaaggaggttgctaaaacttcagaacagcacacaatagccaacagagcctcagctggagggcaaggagggcgggaagagctggtgcacgcttgagtcagatgtttaccaaagattattgatggtctacttaatctgcagaggatcaccttgacgggagctgggctgcctgtcctgatttctgtccaactgtggaatttctgagtgatggcagattggcctcgccagctgcagcagctgccccgggctctgaggcccactgagaggcagtctgaggaaaggactgtagttgggtttttttgtctgttttgtttgtttgggtttttggtttcggttttagcatttactgactgagaatcccttatatgtgtttaggacttcatgatgtggaaagct

SEQ ID NO: 126668 - DNA, 1025 bp, Homo sapiens
atcccaactcaactactagacagttgtgtagtcttggaaaaatcattgatcgtcaatttccccaattacaaaatagggataagaatagtacataattcacaggattcttttacaagttaaatcagttaacgaatatcaagtgctgacaagtatatgtgagtgctagtgtgatttagttatattgctggtaagtatatgtgagtgctagtgtgatttagttatattgaaagcagtatcatgacatttgtgctagaccttgaagtattcatcacattttgatattcagaagtggagaaagggcactcctggtggtgggagcaacatgggcaaaggcagaaagacagacatacaatgacatatagagctgggagtttagttcaactgacacagcagtagtgctgaggggagcagcagcaaatgggcttagaaagccacttgatgtcagttggtggaaatccttcaaggccacacgaaagagttgagcttttgttctggaagtgacagagagccgtcctggaagatcttttaaatctatcttttcatacaaaggttgcccagtgtgatgtggctgtgagtagagcataataaccactcaccccttttaggtggttgtggttattttcttcatccctattcgtgtctgctccatgttgctggtgtgggcctctcattgtctgagtgaacattcaaaacaagtaagtaaccttgggccaggtcaccaaaaggattacatagtacagaatcctccatctagacattggaactcatggccccaagtctctgggccactctttgccattggactcttgtcaccttccagccacaaaattcttaaaagttcatactccccgcttacgagctttgagcaggaacctgcagctccacgctgttgttactccttccgccccttcattatttttatgttttgttttgtttaatgagaatttggggttagctatgacatcacccccacctccaattaattttatacccaaggcagcacatcttaggacacaaggaggaga

SEQ ID NO: 126669 - DNA, 1241 bp, Homo sapiens
actggcagttggatataggagtgtggacctcaggtggaggtcagggttagagagacaaatttgaggcccattcacacataggtgttacctagagccctgggaacagatgggattagagcagcttcctgacatttttcacatcatggctccactctgggtaaacagagagtaagaccgggactccagggcctcctgcccctcccaacaggcccagcatcgtcccaaaggccaaggggatcggttgcacctgccactcctttgcagcttcttgcattgcgtggccatgcagtgtgaagtaggggaaagagcccctagaacacagggcagctcgggaactggtcagctgggtgacaacagccgtggacccctctcagcctggttgcagcacccagaagtttcaaattatgtggtctctgaggacctttccttccagctgtaatgttatttgcctgtaagtcaagtggtacgaggcgtacaaacggaattcccgtacacggcccacatgaaaaaatatattacaaggatgttaaaagagaaagaggaaagagtgtaatcaattgtggagtgctcctctggggagaggaagttaatttcaaacttaccgaaaagttgcaaaaactgtccaccccctcccctatatatatgtgtatctatacagattggttttttaatatatatttatatttttaattttttcctgacccatttgagagtaagttgcaaaactgtatcccttcaccccttaatatttcaacatgtattttctaaaaacaaagatattctcttacataaccagagtacaattatcaggaaactaacatcattgattaaagcttattcaaattttgccagttatcccttagagcaaaaaatagttgttggccgggcacagtggctcatgcttgtaatcccagcactttgggaggctaaggcagatggatcacctgaggtcaggagttcaagaccagcctggccaacatggtgaaaccccatctctactaaaaatacaagaattagctgggcgtggtggtgggcgcctgtaatcccagctactcgggaggctgaggcaggagaatcgcttgaacccaggaggcggaggttgcagtgagccgagattgtgccactgcactccagcttgggtgacagagggagactccatctaaaaaaaaaaaaaaaaaaaaagtaaagaaagagttttaatcctggagtacatattgcatttagttgttgtgtctcttcag

SEQ ID NO: 126670 - DNA, 1049 bp, Homo sapiens
gaatgagggggaaattggtcacttaaaataagtttaaaaggcatgcaaaaaatgggaggactgaaatgcagcctctgacgatacacgcgtgggtgatgacatcataaacacacacaaggacacaaagactgtggagccaggagtctgcttacttttggagggaggtgggtggctacaagcagaccagacacatggagtggggtgcttggcaaagttctgtgtctccacctgcatgacggttacctggatgttgcccttcccatccctcccaacgcagagcatctctttcgtgtggtgttcagtgcccatgctttattttacaatacaaagcttttcttttaatgagtctactcagggttcacgtaaccaacagtctttcgggaatttcactttagggattaggatctaataataaaatgtgtctcacttttctcactaagagggaaattgaaattccagctggaaattcaccagtaggattgtctgacagcttggtcagaaattagagaaaaatttaaaaagaggaccagtggatggggcttttctaggctctggctacagaagactcccctggtctttatttttttccacgttcatttatacagtgaataatgtagttatcacttatagtaatggaataagcccttgcaaactcacctcctctaaacaaaaacaaggaccctgatggcagccatattgctccctgcctttcccctccttaccttgagtaatgtttaaagagcacagagatttgcttaagggaacccatccctgctgccagcacccatttcctctatacctgttgcccctgaaagtgccattctgaaatgactaccctagtggtgtgatttaggatgtcctctaacatccctccagctggggtatcatttctttaaggtttttttccctgttaaattcagtgcttctagagaaggaaacaccttaatatgaatgagttaggtgagagttccaaaagagggtaaaaccataaagagtatgactctggaaaccggcgatgagggcacaggaaggaagacccaaaaaagagg

SEQ ID NO: 126671 - DNA, 1481 bp, Homo sapiens
gttgataccattcagcaaatgccaacaaagcatttactttccaaagggagaaagcaagacaacaggagaaatgaaggcatctccaggagtggaccagagagcagccaagccatagagaagcatcaggtgtgagaatggaaaacgcagaagagacgtacaacttctgaaagatctcagaggactggcattgtctggagacggcttcctggaagaggagactccagcagagccctgaagtgtggacaagcttccattcactgcaaattcgtgagcacactctggtgtcaggatctagtaaggaaatgggcttgagcagagcagggggtacctgtggggttcttctcttcattttcaccaccacaaagctggtctaagctgccatcaattcccacctggacaactgcaaaagccttccagctgttcctgcttccactcttgctcctctacaattcattctgcacgcagaagtcagaatcaaaatcaaagttcatcatgtcattctcttgacttgtggcttccctttgctcttaagctaaaagtaaaaatcattatcatggctacaaagtcttgtgtggtctgggccacatcctgtgccaggctccctttcattgtctatattccagtcaagctggccttcaaaatttcagcacattgggtctttctgccacaggcccttgcacatacatgcttttccctctgtacatgtgattttctttcatccccgctttccaaagctaactctgactcatccttcagactgcatcttaatgattacttccttctggaagactcccctaattttcacaactagatgagctctcccttatatgttgaaaacaagtatttcttgtgtgaacagaaatgtttaatgtctgccttcccaactcagccacaagctctgtgaggatggggactcagtctttgcatccctcagagcctaacatagtctcagttaatacgtgatagctggagcgtgacatttcattaggaacagtgaggctagttgagaaattatacctcaccagtatataggagagtaccattaggaattcttaatgggatgaaaacctgaattcatgtctagaccctgccacctgctggctgtgctgttttaaataaattgcagatcctctcagagcctgtttcctcatatataaaataatggggatcctaacagccccctcatatggttgtagcaggaatttaattaaataatatatggaaaagcatttttttaactgtaaaaccatacataaatatcctttgtcacttttcccagtgcatgacacactgggtcattaaacatctattggatgggtggatggttggatagatggacagacagattaacagttagggggccagtatgagtgacaagaggagaacttggcatatggaaagcatgatggaagccagaaaaaggagagacttcccagaagtaggaggaggcttgttgattcatccacagtgtcacatgcagt

SEQ ID NO: 126672 - DNA, 1054 bp, Homo sapiens
agctgctgggtttcaaggagctttctatcggagaggcagcagaggggttctgaaagagccagaccctggagccaagctatctgggcttgaccttagctctgctattcactggctgtatgaccttcagccagtcctcatctctctgtgcctcaatttcatcaagctcaaaatgggggtaataatagtacctgtctcagaggttgtcaggaggataaaataagtaaataggactgcaacatgtaggagaacaccagacatctatacacttaaacacagcaaggcacttctctggccttgtgaatttcagcacatggcagagaagaaacaagctggactggctgaggaaagctcacctccagaggactgagtgggttaaccatgaattacatagtcattcccagagaggacgcatggcgggagagaagcagcaaggatcgtagctggatggatacatggccttggctggaccaggggctggcgagtataggggcttatggagggccgggttttgctcaggtggaccctcttgaaactcccggtgggcctcccttctacccccaggaaagctggaatcttgggggcttctgtgtccccaaaagcggattccagtggccagcatcttggaaatttttgtgcacttatttcacttgtatcagtcttttctagggtcatttactgatattatactttctctgctctggagtcattcccctgcaaaatcattcccctgttatctgtctgcctcaacacgggaaaaatccctgtcatctggaacccttgcttcctgcccgccgtcctgcctcactgcagtgtgtgggcagatctgctctctgctgcacacgtcttcagaaagactgaatttcgggctttcagagcaagcgtctttgaatccactggtgaaaggagacagcagtcatctgctggttgatgtttgccaaaatgtggccttagactgggatgaagtgatggctcctggcacggaagctggttccccctgggtgtacacccagcctgaacagctcctttaaaaccagaagcaatttgtcatcttttg

SEQ ID NO: 126673 - DNA, 1047 bp, Homo sapiens
acgggtatccatttataggactcagctgttgaagctcaagggtagcattaggcttaagcttaatcttctgtatactgtaatttacagcgctgagtaaagcattgtatgtacaactatttcagtcatttgccatgataaatagctattgctcttggcagagcagaaacgccatctatgctttccatttatgaatattgaattgtctcaggcaggcttttgccgtaagtttttaaaggggaaatccccaactaatcacatcactgcactggcccaaaatgtcatctccctgctacatgcaccagtcagatcttgatccaggcagcaattctgcagtgcacgtgtttctggtgaagcctgcacaaagcacttgtaacaattccaaatgcaagtcctgctaaaggctgcagttttacgccgaatgccacgagctgttagggagaagattcagctggtggcagaacgccactggcaaggatcaggaaaataacttagaggtgacaatctgatgcaggaaaaatggaaggggcatgattctgtgggattcctgatggtgaaaagatgatgccacctattgaaactaaggagacaaaaaggtaaaagaaaatgcccaggctataaatccctagggatctactcttcaggaactcagagacacttatgccttctaccagtcttctcttcagatactgtatgccctgctgactgggaggaagcaaagtggatattcaaataggacatccaggtagaatgaccatcttgtcctgggaaatcccttaggcctgagtcagccggtcaccctacactcaggcttccagaaatttcccgtcttcgcccccattccttcccaccaacaaacttcctgtgctcgggggactaaaatacttaggctggcattccttaatttgtctcacatttctgatcacccactatgggccaagcattgcctgagtggtgggataagagagtcaagcacgaacacgagtagagacagcaaacacacaaaatagtgtgccgtcgcctgtttttgaataccgtgaggtagactgg

SEQ ID NO: 126674 - DNA, 1076 bp, Homo sapiens
acagcaccagtgtgaaaaatagaatgtcatagtggaaaagtcatgaattttggagtcaaacagaggcaggttagaatcctaacatttacgggctgtttgaccttgagctacttatatgaccttctgagccttcttttcctcgtctataaaataaggatggcaattcctgctttgcagagttcctgtgaagaacacagaaaaaggttgtatcgttttctggcacatggtaagggaataaagaaaggattgtcaataaattgtggctattttttattaagttgaatgtttcttatgaaaaatgggaaaaccaattcagtcaagtgcttcctgccttcatttcttgccctgtctcagaggatgtgcacgctgaggtcagcccacagactttcgcctgtgattcatcttttgcttcccacactcttggaggcaagaaatgctggcctgaatatgattacatttgctaggagtcctgagggcttggctttgcaaatattggtttacattcacattaggcccctatggcagctcttttagaaatgccgtgaagctccagtatctctctgcgttccctgccgaggtccatccagcctgtgccatagcgtcctacaggggtgacatggagccccccgcccagggctggccacagtccttctgctcctgatcgtgtgccccatgctggcatcccagatgtagaaagcaggtgcaaccactgctggggagaccctttgcctggcatggaagtggagtgctcttggagccacgttctgtgtcaccccattagggatggcttcctagggtctgtttcctaagtctgtaccaacagccttttagacactttttaaacttctccccacgagatctaggatttcaagggattagtttgtttctaaagtcccttaggtgaatggataagcttatttaggaatagttgtagaaagggggaaacagaaacaagaagccttaccttgggagtcccagttccactctgcaggcatctctgtccctcgtagctgtccatcccaatttgatgcattgacatggcgtgtgagcctagtggttgagtgtaacctctctag

SEQ ID NO: 126675 - DNA, 1018 bp, Homo sapiens
aggggtccaagccccatggacgcagccttctcctaacttttttcaccccccacctgccagggctccacagaacattatttgaactttgttgatgtagaggagacagcatgggctttggaatgagacaaagcaattcacgactcccccactaactgtgcaaccttgagcagctcacctcatccctcttcacctccatttcttcatctgtaaaatgggtactctgcctgcctcagggggttgctgggatgatgtgactgatgtgaggcttaaggttcattttctcttcccttctctccatggcgtctttccccatcgcccccagctggatgcagttcttcgtgctgaacagccacaaaactctgttctcctgtgccacttcccctcctgccatgctgtcatgtgtgccacctcccgcttctcccatgggtgcatggcagtgttcaagatcttggtatactagtcatttaacttaaattgaaaaaagtgtgtgtgtgtgtgtgtgtgtgtttagccagtcagttatggggacttcagaaatttgtggttaaaggaaaactgttgcttactcaacatttctgataccaaattgtgagttttccataccaaggggattctctgcaggtaccaattcagtgtcctacgatttaattcagttccgacaataactacctgtagctggggccgggcgcagtggcttacacctataatcccaacattttgggaggccaagggagggagggttgcttgagcccaagagttcaagaccattctggggaacatggtgaaaccacatctctacaaaaatatttaaaaattagccaggcatgttggcatgtgcctgttgtcccagctactcaggatgctgaggtaggagaatcacttgagcccaggaggttgaggttgcagtgagctatgatggtgccactgcactccaccctgggtaacagagtgagaccctgtctcaaaaaaacatgaaccaaaaaaacactacccagagttagcacagaccccacaggtt

SEQ ID NO: 126676 - DNA, 1041 bp, Homo sapiens
ccagacattttctccccctgaaagagggtcaggagagagtctccccgagacttacaaaaaggagggctgcggccaagcacagcccagtgtgtggcccactggggtgctgccccaaggaaatggtgcatcagtaaaaccttacattccaattcacctttcccaagaatcctccttgttaaaaaaaatcccaggtggggttgggaactgctttccgtctctaaacatccttgatgtaataaattccttcagttggtcatcaacaaaccatggacagaacagataaagtccacgtggctgccccaccccggggatgaataaacagccatttggccttagactagaagtcacttaacctctctgggtggaagtttccttatctatagcagggaattggattagacaatttccaaagctgtaatatgctgtgagtccagcacagtatctcccaatctttttatttaagctgtattcccttttgatgaacataaaatctgaatgccctccttaccattaaggtttcgaagtacattctattgtgcctaaaaaaagtcaaagcaattataatattgaatatgcttttgcaaattacgcacatttcccctttctcacgttccgaatttctgacttttccccacctcttcagttatcattattctataataaaataaagggagttgagcttatccaagctctttaacagtctctctatatacaaattatcaactgcaaacacgtgtatatgtatgtatatgatatatacatatctacatatatataatctgtatctgtgtatatactgtaggcatattttgtgtttgtaatgtgtagaattcaggcttacggagcacctctgggagtgagtccaggactttcaaaccagcacaaggcaaagcaagggccctagaaagcgctataggaggaggtttggtcagaggccaagtcttctgcccctccctgcagccagcactgtgtcctcgggctacttgcttgatgtctcagggctttggtttccttgtccctaccatgggaagatgacttctg

SEQ ID NO: 126677 - DNA, 1060 bp, Homo sapiens
ctgccctctgccgcagcatgagccacgcacacgtcctatttatcacttgccaagtgtactgtgggcttgtgagtctcgccctgtctcttttcatgatctgtgagctccttgagggcataaatcatcgcattcatttctctgtaccccagtgtctggcatataatcaatgacaataaataagtgttggataaatgagtgagtagatgagggcagtgggtgagaccaacaacctcctgtttcccacactgagtcaccccaggttccccactggcacaagtgccactagctgccagccccctgaacttcctgcatatccaacttaccaagtcctggagcagctggcgttctccttcccaccccacagcactaagggccctggcaagttctcgcctgcccccaggaaggccggttatagagaaagcccttggcaccttagccagagctcatggctccctcctctagcacactttgccctttctgcctgtttaatcatgtcactttatgccatcccattctctaactgtctggctcaggttagcccttcactacatcagctcactctactgtccggctcgttcgttgttttaagtgtgtatgttgtcatcctagctgatcctcattgtagacaggagcttctgttctttattggttcttggacatttggtaaatgctacgccacgggtgtttattcataactgacctcagagttcttgttacttccctgcctgcctgtctccctttctcccagctgccgtcctctttaaaaaggtacaacatcctaagagttaagatccagcagccttgagttcagattttggctccagcattcccaaactgtgagactgggagccaatagcttaacctctttgagcttctatttccttatctataaaatggagataatgtcacccctgcaggtctgctgtgaggattcaatgaaacaatcaatgaacagcacttagcacagtacctaacgtggagtaaatactcaataaatgccggctgctgtgattgatgttttttcaataatattattttatcaataaatcttctccttaag

SEQ ID NO: 126678 - DNA, 1012 bp, Homo sapiens
tcttgcagactaaagccctgttcacatatttgttgtttaaaattgaaacaagtaagtcaccctttcttggttgtacatccccccacagcaactgccagttgacttccacaccctattttttccccagagctttcactccttgtcagaggtgttgaacactgcagtgcttcccacgtggcttctctgtgcctctgactctgttgctgggtcctcctgggcacttcctcatgactcacctcctccctctgcgagcgttcctctcagcttccttcactggccccttccctcctctcatcttcttgttatttattggtgttccccaaattctagccttaaccctgttgtcagacaacactgtttcacagggagactgtgcacaaccccagcttggcccccgcttgctcatgatgtccccactctgtctctctggccccagcttgcctcttggactgcagatcagtttctcacacttagtaggctgcaaaacaaagctctcctccccatatgtcctcagtctgctcgggctgctataagaaagtaccatagcctgggtggcttaaacaactgaggtttatttctcacaattttggaggctgacacccacgatcagggtgcccgcatggtgagtggacgggtgctcactgggcagagagggccctggtgtctcttcctttccttacaagggcactaatcccatcatggagctccacttttaggtccccatgtaaacctcatcattccccaaaggtcccatctccttataccacctcactgggtgctagggtctcagtacatgaatccagggggacgcagttcagtctctagcaccatgtaacctgcattcccatctgtcttcccctcttcctggtaggccaagccagaaagctctaagtcatttcccacagtggtcagttccaaataaatgtctcttgggtcctgcgtcctctctgtccctgcagccccagaccctgcagcagccctctcacctccagccttgttccagcaagctcag

SEQ ID NO: 126679 - DNA, 2627 bp, Homo sapiens
tttaaacttgcttttcatttaccctgtcaaaggcattatcccatgaagacataatttgagaagtatcttcatagaaaatagctctcattgcataagccatgaatacccttgccggtggagtccatgtattgcttctttagaaattgtcagtgctcacagctctcatctccctcagtgaattttctagcttccaaaccctgtactttttctcccaccagttctttcttccccttaagctctgcctccaacaaactgtggactgtgtgcatttagcttcagcctcttcttctataaaatgagaataataatggtttctccctcagaaactttttgcatggaaaaaacatgatattgcttacaaagtgcttagtacagtagttggcatagagtatgtgtttgataaagagtagtcattatttctctttgttgcctcctcagttcttacattcatattcacctgtctccctgaccatatttacctggtttatctgggactttgttgtattttcctcatcccatgggattaaaagcaagcacagcccctttccaagatgctgtgtgtgcctggagcctttctggttcaagatcttctatggacaactccacgccttgggcttcctccaggtcattctccctgtccttcagggatgggaagcattgatgtcacctggctgtcttccatatcagcaggactctgcttggttctgaataccatgttccttaactacttgtgcggtaaaaatgtaatttatgccctctaaaccccaatcctaaactgtgagccacatacaaggaagcaatatggcaagggcagttaagaacctaggtttggggccacactgcctgggtcaatccctgacccttggggcaagttatgtaatttttttttgtgccttggttttctcatctatcaaatagggataaaaattctgatctgtatttctgaagagtgcatttcaagcactctgaaaacaaagttgttttttttcccctaaatttgaggcacactcatttggcatcaaagtctgccctgaactgacatatgactatttattatgcactttatccaaattagtgtgattattcctatgtttcactgcagaaatattagtgtttctgattataggatgcagcccgactgctggggtgttatataatgtacaccatatgaccttactaaaacctgataaattcaatttgggaaaaccactaagcccaagagctttggataagggattgtggatctatagtagctacttcatagggttgttgaaaaaattaaacaagatacagtcatccttagtgtacacggagaattgcttccaggacccctgggtataccaaatccatgcttactcacatccctcagtcggccttgcggaacccgaatatatgaaaagtcagccttctgtgcaggcgagtttcatgtctcacaaatactgtattttcaacctcatttggttgaaaaactttggtatataagtgaacccacgcaattcaaacccatggtgttcaagggtcaactatattttgcataaagctcttagaatggtctctgaactgtgaatactcaataaacatttgctattattctcctaaagacataaaagagtactgtgtccatgagaatgagtggtttattttaccacagtaaaaatgtttgttctctttttaagtgaatggtttaaatgtttaatgaatgatataaaaatgaattttactgcctggatctaaaggaagtttgctgtttgttttggaaagaggctccaaatccaacaagagaagtcagtttcagcaaatatggatgccactttgactgtcagattttcttctgtattcttgacccagagcttgcttatgccagcaaagacagagtccccatcctttccttttcaacctcgccttccgttctgcatacattaaacacaggttggagtggaatccaaggtggccttactctgagatgttgtgcttcctggacacctgtagttcaggtggtccctgctgtcttgtgtctttttcatacctttgtcctcgatggcaaaccgtatcagctcttccttctatatcccaaaggtaaaatatttgtaagtctcttgtaaaatattacagctactatctttctcatcatttttcatccccagtctcaagcttttgccaaaatcatctaccattcagacttctctgttcacctgtataaaaaccatgggaaggtcctatttctccactgtccagcctccttctcatttagacctggtctgggtctaaccctccttgtctatttgattattattgctttgtttttttcttggtggccatgttgttttatcttctttgacgatcctgtgttttcttccatattgcattcttctgcaaaatagtcacaatttacattcctctgtgtctggcaaatcacaagactcccttattgcacatttttccaaatgtctccattttttaggtatatgtctatgtaataaaatgctattttcttagcacagtgctaaataatattacagtccagtaattcaagtttggatgataccaccaacattggcagagaacccaaatttgcacattagaaccatgcagtcatagaattggacagttgggaaggactccaactc

SEQ ID NO: 126680 - DNA, 1043 bp, Homo sapiens
gaagcacggaagtcagaaagggaggcttgtgctgggatagtaatggatgtggttagcagctgtgaaggtagagctggctctacttcctgaaggattaaaggtgggatgtgggcaagagaggcgtcaaggaagattcttagattctttgtctaagcaactgggtgaatgatggtggtataactacgatgggcagacttgtgtaagaagcaggctctggggaggagagaaatcagtagttccgttctggacatgttgaatgcaaagtggaaacttcacctttcaaagctttccgtggagaagtcaggcaggcagtggctgggtgagcactggaggaagggaagaggccagaactactccaagttgttggtgcacagaaggtgcaggggcatctgcaatgcccttgggggcaggtgtgttttcgaattcagaattattcagactttggaaaagtaatcgatttacactcactgaggtctggggcgtcacctgtcatcaaacacataaggtatttctgtagcaaatcgtaatcttcacacttaaacagattaataaagactagaaatagcctcacattagttcaggtcaggtgttgttatgaaggcagtttagtcaccaaattaggtaaaacttggtttcagagctcttgagtttccgaattgcagaaaattagcaatcccctccctattctcaatttctactccccaaatgcaaatactttgaaaaaatttttcactgttcttttctgtttacttctataatgtcaagtaactgggttttcctgccatctcaagattcttaaaagctttatattatctactaacttgccaccatgaaaagtgagggcttatttcttcaataggccctccccactgcacaccccttttccatgcagccttccaatatagtcacatggccatttctcactaaatcagcattaggggcttatattattatgatcatgtgagtattactcacagctgaatgacctgccatactattattacatgtcctttcttaaacaactctgatttcttcagtctttt

SEQ ID NO: 126681 - DNA, 1057 bp, Homo sapiens
tttttttttttttaattatacaattaaggctggacactggctcacgcctgtaatcccaacactttgggaggctgaggtgggcaggtcccttgagcccaggagttcaagaccagcctgggcaacatggctagaatccatctctacaaaaaatacaaaaatgagcctatcatggtggcatgcgcctgtagtcccagcttctcaggaggctgaggtgggaggatcacctgagcccgggatgcagaggttacagtgagccatgattgcaccactgcactttagcccaggtgacagagtgagaccctttctcaaaaaaaaaaaaaaaaaaaaaaaccacacacttataaattattaaaaaaaaaaaacagcttccacaggggcatggagcacagaaagtgaagcccctcctgcaccctgcctctcccccagcattcatgcagcttgacctcattctgtttaagggtcaagaggattccattgttttggttcaaccaaaacccattcagtgagtcccagagaccacttttagccctgggaaaaactggccctggattcccagtaggcatctgaaagaccctggttttggctgctagattgcgtttcgtctgcagccctctcccctccactccatcacaaaaaggcagcctcaaatttcctgtaaagaagagtacctctccccgttctcagcagtgtggcaggattcgttctagtcatgttctctgaacgttattgaagttgtttttctgcaagcctacagtgtgtgtggcagtacgctcagcccagtgagggaggcagagcaaagcagttgctctctctcaagaaacttacagactcatcagaaaataagaatatacccatcagaatagcacccttcagcaaggtaggtgtgcgtatcaggatcctaaaatgttatgacgtttgaccttagtattgcatttctgggcacataaactgagtaggcaaacattaggcacacagatttatatacaaggattttcattactctgttgttgataaaagtgtaaaattgaaggtggcccatagttccaaagataggaga

SEQ ID NO: 126682 - DNA, 1986 bp, Homo sapiens
cctggcaacttcctactcatccatgaaggcccagttcaaatgaggtttccctgacaccaccctaaacctcagacccatgcagaattagccaagtcctcatctgtttacatagcacatttcaggtgtttctgttacagcatataataatattgtattatttcttatttcacctgtcctcctttctggtggactctgggtgcctttaacacagaccgtatgtctcatttatattcctctttcccatgcctggcacatagtaggtgctcagtaggtgtattttcccatgggtgttcatgggctctctgagtgcaacaaagtagatactcatcagtcctctctgccctgcatatgaggctggacctaaggctgtcatcccttgtggggtgtttaagttcttcctctcctctgggtatcatgagcagagatgcagggagaaaagggagaagactcatctcatctcaccttgtgctctaactgtaacagctgccattcagacaccccagatggaccattcagtgtaggctgaatggccaaacaggctcatatgtgctaatcaggtaccatcttgaacccagtccaaacggggaagctgccagcatttacacccatgtgcccagcaaactgggagtgaaggcagtaaagagtgcatcgggctgagacatggaaagcccagggttggatttggagtgtttaggccagggtgagatgccaaaccatcaggcaaccatcttccatgttcaagttttgattttcattttaagtgcacaaaatccacaagcttttttttttttcatgcagcagcaacagcttcctaaaaacgtctctcagctgagccattgcccataacagcatgctatttggcctttgtaaaaggaaaaacctctgtatttgtatctagaacacccacagctgaatgtgtcagatgctgctggctagtttgattggttgccttgcatgggtggcttcccgcaggggctggctttcctaaagttgagtgggcagtcccgagttcttcagagatttctgcctaacctgaggaatgcctggtttaagcagagatgatgcttcgtgaaggaatggattcctttgcttttctgttgggagtgactgaggttcctagagtctttctcgtgagtgaaaaggaagtagaggtgtgctccagccaactcttcagatgaggcaagtggattgataatggaacattcctagactcctagagacctggctggcagggtgcccggtgatccaggagttcgggtcatttccacgttgctctgggcccttgtttgggtgccagacgcgcagagtaattagaaaggagtggaacaatcagggaagatgatgtttgccagccacaggcctttttttattgtccctgtgggttggatactgggctgatccaggtgggacagagatcagtttattacccagtctctcagcccctgctcctggctggaatttcacagaatctaaccgatttctgcacaggccactcctcttatatcaaaaggctgaaatccctaggggtgtggcctatgcagcagctgtttctctcctggtttccaaggataatgtcaagtgcctccgagtgtgtgaaattctggctgaaagtgaatgattgaaatgctttttccattaaaccatctccctcctggtataggtattttcctaacaacgcttatgcaaatagctgtgaaaagtaggaaatggtaaaatgtcgagtgtcttcggctcctggcagcatgctcagccgaagccttctgattttccaccaaaaaaagaaagaacgacaggcagaccaccagcctttggtgtggcactgggcagacacagctgggaggcctgtgtcgttttcttgtctgcttcttggagggcaggattatgttagaacactgagccattatgggtctctaggatcacatattgcgctttattgtctacacagccaatgtaagttattgatttgcaaatgggaagcattccttt

SEQ ID NO: 126683 - DNA, 1401 bp, Homo sapiens
atactatatatattttaaaatagaaaggaaaattacaagtgttggcgaggattgtggagaaattgaaacccttacacattgctgttgggaatgtaaaatggcacagccactgtggaaagcagttcggcagttcctcaaaaggttaggcatacagttatggtatgatccagcaattccacttctagttatatacctaaggtcacacaaaaacttgtacaccagtattcagagcagcactattcacaatagcccaaaggtagaaatacccaaatgtgcatcaaatgataaatggataaatagaatgtagtatatcctacaatgagaattattcagccaaaaaaaggcgtgaaatatcaatacctgctataacatggatgaaccttgaaaacattatgttaagtgaaagaaagaagcaaaggaccatatattggatgattccatgcatatgaaacattcagaatagggcaatccgtagagaggaaatagattagtggttgccagaggctgagcaaaaaggggaattgggaagtacggggtttctctttggggtggtaaaaatattctcatattagatagtggtagtagctacacaccattgaggattacacattgaattgtacactttgcaatgtttaaaataattaattttgtgttatatgaattttacctcaataaaaattttcaaaaaaaaaaaacccttctactttaatggttattgctgtaagatgacaatatacattgtttgccatgtaaaggccctttcccaggcaggaagagggactggccagagaataggtgcttcccagagtggcttgacgtggcatgaagagtacggtctgggagccaaagaattctagttccccatctcacattccagccgggcaacttcaggcaagttcctcagcctggagcaccctgtttaagtcattctaaattgcagatctttctctaagaatgcttataaagtacccactatgtgctaggcattagtccagtagtcccccttatctacaagggatacagttccaagacccccagtggatgtctgaatccacagatagtactaaaccctgtgtctaccatttttgcctatgcatacgtacatactgtgatagtttaatttttaaatgaggcacagtaagagattaacaataataactagtaacaaaatggaacaattataacaatatgccagcatcactattcttgcgctttggggccattgttcaggaaagtaaggattacttgaatgcaagcaccgagatgccacagccttccatcagatgactgagacgctactaagtgactgataggcaggtggaatagacaatatggatctgctgggcaaagggatgattcatatcccaggtgggatggagtggacagcatgagatttcatca

SEQ ID NO: 126684 - DNA, 1001 bp, Homo sapiens
cgccacgatgcccggctaatttttgtatttttggtagagacagggtttcaccatgttggccaggctggtctcaaacttctgacctcaggtgatcctcccacctcagcctcccaaagtgctgggattaaaggcataagtcaccttgcccagcccacaactgattcttatgtatgttcttttattccgcaaccgtgttaaacttgtttgttaactctcatagttttctttgtgtgtatttattccttagggctttctgtatataaggtcatgtcatctgcaaatagagatggttttaccttttcctttccaatctgaatgcattttatttatttttcttgcctaattgctctggctagaatattcagtataatattgagtactgatggtgagagtggacattcttgtcttattcctgatcttggggagaaagcattaaatctcttactattaagtatgatattaactgtgggcttttcataaatacactttatcaagttgaaaaagtttccttccattcttgttggttgagtgtttttattaagaaggggattggatttgtcaaatgcattttctgtgtccgttgagatgatagtgtagttttgccctttattatgttaatatggtatattacatggattgattttcatatgttgaaccactcttgcattgctgggataaattccacttgttcatggtacataatcctttttatatattgctgaatttggtttgctagtatcttgttggagatttttatgtctatgttcagaagggatttagttttcttatgatgtctttgtctggtaaggtgatactagcctcaaagagttggagagtgttccttgtgactcagtcttgaccaatagaatatggcagaagtgacacagagcctgggtcacaagggtcttgcaacttctgcctgagtttctttgaaaactcactgtcaggatgcaccttcttggatccagctaccaagctataagaagtgcaggccatttggg

SEQ ID NO: 126685 - DNA, 1281 bp, Homo sapiens
aattccctgtcattggatatattggttgttttcaggttctcattattaaaaataatattgcaatcaaatgaatatccttgtagctaaatttttgcacacattcatgattatttctaaagcataaattcttagaagtggaatgctgagtctaagagtgtgctgtttttgaggcttttgatactcattgctaaattgccctctagaaatattgttccaattaatactcccatcaggagtgtatgagagtggctgttttcccaactctggccaatatctcaccaaagattgtcagatatttgatgatttaataagttcaaatgttatcttattttagttttcattcttatgattactaataaggttgaacatttcgttagctttgtgtatgttcttatatgagttgctttttcatggtttttgcttaattttccattggcctattaatcttttttcccattgttttctaagagccctctatagattaaggctaacttacccatgtctgtcatatttggatcacatgagttttaggaaatcttaatgctcaaacattttctatccaatcttgcctataggaccaaagtagctaggaaaatagaaatttccagataattctcaaaccacatggcaggtgttactgaatgctggcaggggccatttcgtatgaatagttatgctgacaagacagtactaataataaaaactaccatttactgaacaactattatatgccaggcacttttcatatatattagcctttcagtcttatcaccctgcaaagagccgagtaaactggggcagagaaaaattaagaagctcttttaagatcacacagctaataagtggcagagccaggatttgaacctggatctgttcatctctaccacccatgtactttctactgtcctgagctcttgttcttggggtaaacaatagttttacagtttaggtcttccttagcaccatccacatctggacctgttggttggctctagaagagtcaaccctgccctgattttacctgcccttgctgctgtacattatttctcagctggacctgttctctaggcttccagcctgcatgctttctccttgttgctagaggtcctgtctgactgttttgctactgataaagaagcccaaaagataccaggatatgatttctctctcaaatttcaggatcaaaagttaaaactagatccatccagtccttaatctagtggccaactcccaatgttctcacccatcaagccaagaagtgagttggagtgcacatggtaa

SEQ ID NO: 126686 - DNA, 1168 bp, Homo sapiens
tagctttgcagtcagaccttagctaacttcttggccctgctgcttgcttgctgtgtgactttaggctagctaccttgcctctctgttcctctgcttgctcatttggacaacaggaccagacctaggaagattagggataagtcaccagctgccatcctatagatggtcagaaaaatggtagctggtattattgcctggaggagagggcaggtctgagaaatccagtggtttccctgggttagtttcagggttgtaaatcattgtgggatacacataaaaaacgagccagaatttgagagcaaggggagggaggtgttgtgggaagttgagtttggaagtgtctaggtgaagaggtaagttataaggaagcggggcagcaggaaggaataagaactgaagtgacatatcctgggggcagagatggctttctgccccttttgatattgactttcattatctctgagatctgtctgtatcttgtcctccagctcagcctacacaccagggcccccactgagggcatttgcagagtctggggagatgggaaaccgggagctcctgagagggactctcttgcaggcaagtgaggatcactttccaaacaggcaggccatatggagcatgggtaccccttctgtgcagaaggagacaccacagtgtcttgcagcagaagcccatgctcgctctgtgctcgttcttcaggaggcacagggatcagtgctaggcctcttaagtcagagagatctgggttcagcacagaggaaagtcctataacctctcacagccttatttttcccatctgcttaatgggatatcacaggtagctcatagggttgttggcaaagttgaaggaagtgaacacacagcatttagctcaatgcatggcccatgggaaatgcgcagtgaacatttcctttggttgccattgagtagcccctggaacagaggactagggggtgtccttcaggatgagcttcctcatggtcctctcctgtgggaacagtgtgctggtgaaggctgtattcccgatgccatggggcatgacaggcatgaggaaatgacatctggaaatggtccttaaaccagggccctaggcagggagccaggagtgtgcaaacgtggtggcacatctttcagaatgtcagttcaactctaattctacaggaaa

SEQ ID NO: 126687 - DNA, 1065 bp, Homo sapiens
aataaatactctccagggcaggacgaagtggcaccaggtcaccataatggggaagataaaagtgagtcgatgacaggctctttgaacacagaagcacttaccggtgtacctgattctgtgatgctaattgtaaatctgtgaacattaatggtgtaaggatacccttaactgtagggggagtgtgagttacgtgaccttacctcaaggcattgacaggccacagagtcctggggtggggtggggacacaggacacccagtccgatgatattaaccacaggtgagttcagcattccaggggtatggaagatgctggagacatggtcccagtttggttatatcagaccaaggtgatagtccagttctcaaaaagtatatgagtcacaaaaggacaaatactctgtgattccatgtataatgaagttcctagagtagtcagattcatacagacagcgagtagaatggtgggtattcaggggctgggggaggggaaacggagagttagtgttgccatgatacagagtttcagttggggaagatgcaaaagttctggagatggactgtggtgatggttgtacaacattgtgaatatacttaatgtcacagaactaaccgtacacataaaaaatggtgaaaatggcccgggtgcagtggctcacgcctgtaatcccagcactttgggaggccaaggtgggcagatcacgaggtcaggagatcgataccatcctggctaacacggtgaaaccccatctctactcaaaatacaaaaaattagctgggtatggtggcacgtgcctgtagtcccagctgctcaggaggctgaggcaggagaatcacttgaacccgggaggcggaggttgcagtgagctgagatcgcgccactgcaccccagcctgggcaacacagcgagactctgtctcaaaaaaaaaaaaaaagttaaaatggtaaattttatgttatgtgtattttaccacacacaaaaaggttcattggcattgcaggcttgggagtttaatggagcattatttaaatcttgaccatttattggctgtgtattaaattaagcc

SEQ ID NO: 126688 - DNA, 2197 bp, Homo sapiens
tatataattttgtcttcttgttctcacgtgaatgatagaaacctatagtattagctgatatcttgccatttccatttatcttagagagctgtccatgtcagttcatgagaagtcgccatgttctcttttggtgcctgcatagtagggtaacaatttaagcctctgggtgtcttgccaagtttttaatacgctcaactgtttctcagcctcccttatgtgtttgacctggagggagctctcctgacgtgccagaactgggctagacaccagggacacagcagtgaaaaaccacaacccctgcctgccctcagggtgcttccagcctggtggcgaaagtacaggtagaccgcgatgagtgctctgatagggaaactcaggtgctgctggaggtcatggtgggggggcctcactgaggtaggggctcagtgccggcctcccagaggaaattttatgtaagctaaaacctggaggatacaggaagttacccatgtgtagagctgggcaggacagagttagaggaaacgacagggataaaggcccaagtgccagagaatatagactgttctgaacctaaaaagtcctcttgctggagtaaagatagcaaagcacacagtagtataatatttctcaccagtggcaccactgatggtttgagccagatgcttctttttgggggcgctgtcctgtgtatggcaggatgctgagccgcatcttgcgcctccacttgctagatgccagcagtgtctccctcccctcccccaagtttagacaaccaaaaatatctccgtacattgccaaatgtcccagggggacaaatcgctctgatagagaatcactggctggtgaggctggagaggtaagaacacaagaaaaatagactaagatacagaaatattctgccaatatctgtccatgtgttaggccttcagcccatgtaagtcagccttgtcgattactcagcagatatacctgtactgtgactatcccctggcgctgagctacatttgggaggatctaaagagagagaagcctcggtcccccagggaaccctcctcccaaagttcccaagatgactcttccaaaccttggagtccagtctgcagtcactggtgacaatagtgagttgcaggttctaattctgggtggcccaaccctccttcactgtgggtggaggagacccaaagcatcaattctggtaatgatggcatttattatacagtggcccccgatgtcaaaagtaccacatcgcattggtgaagcagtaaggatttcagtttatatttaaagtcaggctgaaaatacaactggcgttctctgcagtttgattacccacgggatatgtctgaaatggggatgcacatgacggaaagcaaagtggctgctttcatgatttccatgttaagcctgggaaggtacaaagggcaggggagggtctgattcctgaggccttctgacctgtgtgccaggtggtctgcagcatcagttaagactgtgaggccatgttgatgctttcagccggcggttcccaggggcctgccgtctctgctgcagaattgatttagaaaagttaggcagatttgtttctgtatggttttccgggttggttgcatttatatccttcaggttaacgtttcgtttatgacattttgtttcattcatgacatatttcagaagtaggcataagatggtagtactcaatgcagtgagaccttgtcctggtcaaatccctcttctctaaggaccccacacactgaggtggcccactattcacatctggagacagtggtcactgagtgattgcaataatcaaacatagccgtaatggagagggagagctttagccagtgggttctactttttcagaatattgtaggaatggcaaggactgacttctgtgtgtgactgtctcctaaatctcccggtccagtgttctgctgattacgtgctcccagctgatgccgtttggctggcattctcttactctctcctgtggtagagctcagactgccaaatggacctggatttggaccctgaggcgcttgaactaatgatgaaacctcaggaaatcccttcttgcaagtgggctgaggctacagcggagcatccttaatattcaggggctagacctggctgccctagtcgtctataagtgaagctggaattctgctgtggggaaagcaatgtttttatggagaca

SEQ ID NO: 126689 - DNA, 1035 bp, Homo sapiens
gcaaactgtttctaaagaaacttaaaaaaaaaaaaaaaaaaacccaagccctcacattaaaaatatcttaaactacttcaaaaataactgggtttattttctcaatttataacttcttggtggcaaaaatcactgcatctcatacacaagcaatattctgctgcaaatcatttgtgaatggtatttggccttcagcattccgagaaaagtggggttctgagtccaaaacccaatgtgttcccctagtgaggaatgatttgaccccagtcagcttggatcagtcaggcattcagatttcctgagaggaggactcccagaaaccttattagcctaatctgtgaaaggtgtttatgagagaaaattccaaggacggccattcttctgtgctaaccttttcaaataatttcctcctcagctttttcaagctaattagggaaaagctctcagtgatttagaaagatgttccccttgcctcacctgaatttttttttaaagaataccaattcatagataaggaatagggttcctgtgcctcataagtgtccctaactataagacagaaaagaataaggttgttgtgatgattaaatgagataatacaaaagggcttagcacatagtaagtgcttaatgaatgttggcttttactattattatcattattaatgaagctagctctagaaaactttattctaattaggattttaaactaatctgtgatgaaaagaaaagatacgtagcagaaactttatttttagagtaaaccattttgttgtaattttatgacactaatgattttttaaagaaacaatttctatggatatcaaattttttttttttttttttgaaatggagtctccctctgtcacccaggctggagtgcagtggtgcgatctcagctcactgcgacctccacctcccaggttgaagtgattctcctgcctcaggctcccgagtagctgggactacaggtacccaccaccacacctggctaatttttttgtatttttagtagaggctgggtttcaccgtgtta

SEQ ID NO: 126690 - DNA, 1085 bp, Homo sapiens
gcggtgcgtatctccggctctcagagaaccactgcatggactttgctccagggtcagcagagcgggagggcgaatttacggctcttggaagacgacgctaacgggcctagcccctgagccgtttccagcgctccctgccgtgagacgagggtggcccgggtttgcgcaggcaacctttggccaggaatctgattcctgggagaattcacttcaggcttaactgctctagccagctagaaagggagcgctagatttcctctggattttggacgttgggtgctttagttgagattttcaccctttaaagaaggctttaaaaagtcttctgttacttctttttaacaaatccttttgtttactagaattatctaaactatatggacaccgccctcaccccacaagcgacatatttttttttctctttcgccagcacccttttagctctcaccactgctgtttcccaagttgtcacagctgaagcgcactgattggaagttgctttgtactgactgagttctgccctggctgaaccatctaataatttccctgagcttggcaccctgtatcgctaagccagtgttaggatgggcgatgaaggaggagctgcggatttgcctttagttgtgatgtttgtgtgagtcggcttgtttgtgtcagactcagataaactgcatttgcctttgctctctttcgaagggctcctacatagctaaggtgtcgctgggtgaagaattcccattgtaagaattggtggtgttaacaaatatgtattacttgttgacctcttgttatatgctagaccctgggcttgacatttccttccttccttccttccttccatctgtccatcttaagtcaaccaatattgcctgtcatggaacagctgtgccctcctgtcaggagggaaagatgagtgagacccatcctcaccctcacagagatgcagtctggtggtctctggaagaaggaagttgtgaaacttaccgattccttgggaaaacaggcaggtacacagggactggcctgtgcagtgggtggggtggtctctcagctgtgccagttcatagaggaaccgaaatctagtt

SEQ ID NO: 126691 - DNA, 1082 bp, Homo sapiens
agtataatgtctatgtgataaaactatctagcaaaggcaaaacaccctcttcccctcatgattaatgtttaggaagaaaaaaggatgtaaatatttttattgttttattatctttcttaggaaaatgacagtgtggttggtttaattaaaagggagagtctcccatagaccaaataaagaaatctgttctgttttaatgacaatggaaaatacctatttaacttgaataacacctggttctgtagaaatgtgcatctattatgtatcctgcattcacttagtctgattcatgtgctgtttcaccacattactgaaaagaagagaagagggaatgttagctctctcatttgaggatattaaactcctgccgtggttgaggcacggtgtgagcaccctacttcctacctagactgttgggagttacctggaggcaatgaggagaaaatgacatgttccattagaatgaggcatccctggaattatttgatgttctttgccttaattgaatccatctgtcccatctgccactcttctctctaaatttatttccctaaccctttctccctgagaattataatttgggggaaatttgttacctacattgttaccttttataaaagctctcggcatctggagggcaggtgtgccttctactctgccttgctagacaactttacctgcctctttcctgccccttgcaggctgctggattaaaaacaggactggataaaaggcccccagtagcaacaggagtgggaacgaaaatagaaattccaggcttttacttattggtttcaatacagagccctagccatgtgccaggcctggctaaccgtggactctattaataaatataactacacaaacatttgcattctgactgggtcagaacagccagcacgggagtgtgttatctcaagggaaagctgtcttaaaactcttgactgattcacctgtgactttggccagttggtgctccctggaactgctctggtgctgaaggttgaggtcatctctgttccccagaatgtggcagatccagccccattcctgaccactatcctttgcaaggacgagacagg

SEQ ID NO: 126692 - DNA, 1061 bp, Homo sapiens
tctaacagatggaagtagttttttgaagcaggtgagccttttcctgatgctcactcaggtgctagatggactagcagaaagaatggcgtcattgatgtccctttgtatgtgttaccagttcatctgggaattttactttttgctggaaaaggagtcaccctcccttgccaaccacatgtgtggttatacattggtattgcagagtgatgccatttacaagtaatacatttgagttggcagatttcccaaggtttcttttgtatatgagaaacatagtgccttgggtcatggaataaatataagagcctcggtatctaattttggttgttcacacttcagttagggcttaagtcatcctaagctaggcttggaagaaagagacattgacatttgtattagtttaataaatttggcagcagggaggtgcaaagaatgttatttcaattatagattgacccatgattgatttagcaacatgcgttgcttaggttgtaatcgatgccaagtaatggcaggttctggactcttaggaaggtgggcacaaatgttggggaattgatcaatggatgagctccatattggccttctacagggagaataaaaatacaagtaaaatattgtaagatgggagtgatagcattgcagatgttaacacagcctgtccaagcttttatcctttgtacctacgcagccattttttttaacacatgggacactattcttcaacagatttgttctcttctaagtttgttctgaatctgtagtgtgtgtcatttcacggtgttttaaagaggaaaaggccttgcttcagttgagaaggctttgatttttccacctacacaaataccctggcattcagggaatctggctaatttaaaaaattatctcttataatgcctagttactaccccagttcgtgttggaggtggagtatacaaaggaattacaacccccactttataatcgggataagagaggttgacagacttaccttgcctggcccagtgccaagtgccacgtggtatagactaagaatagttgcttctcacgaggagcttatt

SEQ ID NO: 126693 - DNA, 1083 bp, Homo sapiens
tttactttagaattcaaaaataagcaaaactaaactataaattatataatatagttatatattgatattatatagcatagactgttgaggaaactataaaaaaaagtaaggaaacaatgatcacaaacatcagagtagtggttacatctaggaagggaggggccctggggcctgaagggagtgctcagagtgagaggactctgcagtgcttgagcattttctgtttcttgacagaccaggtagttacacaagtgtttgctttgtgattgttcattatactgtatatttgttttgaacactctaagagtattttattccacaatttaagcaggttttttaaaaaaaaaaaaaaagatagctaacacttgtaaaatgcttggcatagtgcctggcccatattaagagctcaacagatggcaattttatttactggtataacccagttgttagagccacattgtatcctaagcaaccttccagctcctgaaccagctctagtctccatgcggtctggctttgaggttgagattccagatccctctgtttcccaggctggccccaaataaaccctattacttaaggcagtgcttttcaatggatatgtgatggtttattttattgccttaaatgcttcccaagtgagctgcaatgtgtaagatgttttttgggagcatttctgttgttatacagttctggaaagctagattgctaattgagcaccgcatgatgtgggatagagtcagagtctagcctgctgcaggtcagagttcaggcagcagaggtggaacctgatggcaatgtagtgccaaagaaaaaagacctgggtttcaaagacagaggctatgagggaagtaaagacacactcaaatagcagtcatgtggatggggaccagaggaatcccaggacaattgtggataccattttaagccttcaagtgtgtaaccccaaattctagcattccacagaaagagtgacaatcactgatttaaggtaatctgagaatgtctattccttgcaagcctaataaagaagtttccatttcatagtcatcagaaggattgttgtatgcaatagctaatgat

SEQ ID NO: 126694 - DNA, 1251 bp, Homo sapiens
catgggcgcaagcagtcctcctgcgtcagcctcccaagtgctgggattacaggtgtgagccacctcacccagcgttgcatcagatttttttttttttttttttttttgagatggagtttcactcttgttgccctggctggagtgcaatggcgcgatttcagctcactgcaacccccacctcccgggttcaagtgattctcctgcctcagcctcccaagtagctaggattacaggtgctcgccaccatgccgggctaatttttttatttttagtggagatggggtttcaccatgtaggccaggctggtctcaaactcttgacctcaggcgctccacccacctcggcctcccgaagtgctgggattacaggcatgagccatcgcacctggctttgcatcagattttttttaaaggaaataaaacattacagataaagccttttccttactgaggtaaagttacatttttcctacctttcactattaaaaatagcacacaaatattcttctgcagtgtgtgaaggcttctctaagacctatcactagaaatgggaactattggaatgtgagatgttcatgttttccattgtaacctaggtattccaaattgttcagcaaaatgtctgtaacaagttagtctcccaccagcaataagtaagatttcctcttgctccatattgccaataacttgatgtttttggactattgccaatctgataagtttgaaattgtgtctttgatgctttaaaatttatgttactctgattgctatttaggttggtggtcctttcctgtatttattggccatttggtttccaccaccctgtactgcctattcatatcctttgcaaatttttctgtttggtgctttttcctgctgaattgacgtgctctttatgtattcttggtattaacctcttgacatttatagaggttgcaaatatcttctctctgttcctggcttgcattttcactttgtgatttttgtcatataaaagttctttatggccggggtcggtggctcacacctgtgatcccaacactttgggaggccgaggcaggcggaccaccaggtcaagagatggagaccatcctggccaacatggtgaaactccgtctctactaaaaatacaaaaattagctgagcatggtggtgtgtgcctgtagtcacagctacttgggaggctgaggcaggagaatcgcttgagtccaggaggcagaggttgcagtgagccgagatcgtgccactgccc

SEQ ID NO: 126695 - DNA, 1025 bp, Homo sapiens
tcctgatataccttttctcattaattgtctaattaactagcaaagattcctgcttaagagtgtgtgctctgcaaccgaactgcctagatttgaatcttgtctacaccacttactagctgtttaactgtaggcaaattgccctctgtgtgcctcagtttgcttatgtggaagtcggaaataaagtaagtagttccctcctgtttactggggatatgtttcaagaccccctgggatgcctgaaaccaagtgtagtaccaagccctatgtgaactgtcttttttcctatccatacatgcacctataataaagtttatcaattgagcacagtaagagattaacaaggactaataatgaagtggcacaattaaaaccatactgtagtaaaagttatgtgaatatggtctctcagaatatcttactgtactgtactacggggaactgaaactaagaatagttaaaccactttcctgatctcagtgtgtttatgatttaaaagtgaattaacaaatgtaaagcccttagaacagtgttccgcatttagtaggcactctataaatgttagctacgattactaacttttgatagcatctgatatagagattcttaaactaggaattcatggggctggagccgttagggtggtggttttggacaaagagaggattggcgtcaggctttcaagcttgtccctttacaatccttaaagagttctggatcttttggtgtgttttatttttctgttggttgacattcataaggttaatgagatcaaaatttaaaacttaaaagtattgagattaaagtagatcttaaaaggacttctattgccttttccctttgtgcttttgaatcaacattacaaggttaacccatttataggataatttccaggagagaagcaataaaagctttacttactaggtgttaggttgtagagaattatttataaaaaagatgagcattactaatgttttagtgaacagaggtcagttgaatagatgtttaacctactgtaaatgttaaag

SEQ ID NO: 126696 - DNA, 3334 bp, Homo sapiens
agatgataatgaaggcccttagaacagaaattgattaaaataagtgaggacattagtgaagtggtgatacagtaagaaagcagtaggatcagattgtaggtcttggtggggtcaaaggagttttaggattggggtgccagagacagtgagctggaaagaggtgttatgggaaaatgggatgatcaaaacagagtatggaaggatacagttattggtgatgacaaggtctaaggtatggtcctgggagtaagtggctgaggtgaggttatgttgaaggctgtataaaactttggtttctagtgtgaaaatcttagacttctgaggggatgactgagtcttatttactgttgtaactcaggcactgtgcttgtaacactaacagcaatgtttactatgctgactgacttttttaataaagtatatcatgaaggccatttctcagcaccataaggttgaatgtaatctcagtttcttcatcatggatttgaaatttagtattaaaattaactgttcattattaactcttactgatttttgctttaggactttgttgttacacttgttgccacttttttgtggttggtgagcacttcagcctgggctaaagctctgacagatattaaaatagctactggtcacaatattattgatgaacttccgccttgtaagaagaaagcagtactgtgttactttggctctgtgaccagtatgggatccctaaatgtatctgtggtatgtatgcattatttataatttttttctttcatatatttgtttaaagtactagtaattcaggaaagcaatagctttcagtaaatctctggatggtttttatttttactcagctacctgaattctagtaacaatatagtgtttagtgaagaaaagtttgtctaaaaaaagtattacctgtaaccaagatcatgattttattcatctctgagactttctttcatctagtcagatttatatctgggaagattaatttctttttttttttttttttttgagatggagtttcgctatgtcgctcagactggagtgcagtggcatgatctcggcacactgcaacctccgcctcctgggttcaagtgattctcctacctcagcctcccaggtagctgggattacaggcatgtgccaccactcccagctaattcttttgtatcttcagtagagacagggtttcaccatattggccaggctggtcaaactcccgacctcaagtgatctgcctgcttcagcctctcaaagtgctgggattactggcatgagctgccacacccagccaggaagattaatttctttgaggttaactcattgggatgggaagtaaagttgtgtgactcctctttttttgtggctacaactgttggattggagtagaagagatggtaggagggggtgataagtaaatgggaaaagttacacaagcagttgataatcattctaaataggagaaaagtgaaaagtatttggaagagtaaatctcttagccatgattttatatgttagagatttagccttatttcattgggaataagtcattatataaccacattttgtacattgaagtgtagtcttccttatttctcattgtgtgtagtattaaactttaagtgaaataatggcgtacttcctaaaaatgttaaatatttaaagaaaaagtgagatttttaagtagggcatgaatttttataagtaggtatttgattttcatatttctttttctctttcatagatatttggctttctaaatatgatactctggggaggaaatgcttggtttgtgtacaaggagaccagcctacacagtccatcaaatacatctgcccctcatagccaaggaggtattccacctcctaccggaatataattaaagggagaaatacactgtatgaagtatatgttgatactatgacatgttgccaacaccttgagaagcattatttgtttctaataaaagtaatggctttgtcaatatattggtgggtttaaaactttgctgcttttttacataaagcctgtgcctttcctagaaagttaagatgtaaatgtattctcacatgtaaatttgaaagttcaggggtctattatgaaatgatacacatttttaaatgaaccataatttttttcactaagctgtttgccttccaaagtgtttacaccttaagccttaacatgtatcttcattcagaaaacagttatattgtcataccatagtaggaagaaaaacctttatttggaatatacactactgtaagtttgtacagatcatatacctaccacctgtctttgcttaaagagccttgattacataaatatgtaggaaaaaacatattgagttcaaaatttatatctaacattgtttatgttatgatttttttttaattgcaaagactaggtgtatatttttttctgtttttctaaatgacccgtggtacttaataggtgtactaaaattgtgttgggagcagggatttggaaatttctgagagatgtgtagttaatttagtaattctgtttcatgagatatgatctgttatgctagtggtttaataggcttgctatgtaagtagaacgtggctcaactagatatctttatatgtatgggcattactcttagtgatatttgtttcctgtcctttgttgctcatgctgtttaagtgcaggctgagacccagcctctttgtaagtacagtaaaataatccaccgttttttacagaccctagtcaaagggttaaaaaaattaagattgctttccatgtttgaaatttaccattgagagtcaatgaagttgctattttgagtttagcattgatattgtgaaaataagtgcaatttggatttcatgtttcttaatattcattcttgtttcacaaatgaatgattaaggaattatgcatcataaaggaacctaagtgaggtatatgatgagtgtattgtctttgcacacacatataggtatattctgaatacaagcttattcacattttgcttcctaatctttttgttgtacagggattcaggtttcttattcttacaacatgattgtttatatgtgaagcacatcttgctgttgccttatttttgatgcttttattcatgacaagaattgtcaatataagaatgtatatcttttttgcaaccaatttaataaaggagttgaaagaaagagtgcactgattgttaatattacaaagaaaccttcatcttaaaggcattgagcagtgcaaaacagaactgattttcaaagcaggaaatagaatcacagttttaatgtttggcaaggaataaaacagacagaaatgctttggagactatggttctatc

SEQ ID NO: 126697 - DNA, 1013 bp, Homo sapiens
gctatttggcccttttcaaaagaagtttgttgattcctggtctatgtccctaaactccttaatttaaaatcagacccaggtaattcttatactcagcattagtggcaaccatgaactaattttgaatctttgaggtatcaacaaaggacttagatttgaagtcctatacttttggcttcagagcctactgagctagaaatattctctgagatttagttagtagaatctgccctggattattggtggcaaatccagagagaaatcatggttttaagctacacctccactataaaagagtaactacaaagtcagttattagtgacttaaagggaaaacagaggtgttttttatgtgtgatactggtcattcatatgtatgagaaaacacatctgctaattatttgtgaagttactttaaagggaaggctatttaaatatgaaggattattaaataacattacaagttttatttacatatttatttttaattttgctgctggatcataagaatggaaatggtaagtaatacaacagtcttttatcattcatatttaattctgtttcttatgtcataggagacacaagaaaactagaggttttcataaaatacttctcggttgttaaaaagataagacgtcaactgttttaatttgcagtgcttatccaacatacttgttaggaatctgtgtcttctgcagacttttcaaatcttatttaaaagggaactggaataatcttatagataattatattttgttaaaattctttataactagaagctatttcttgccattttgtcatcccaacaaatttttttactaaatctatcagtgtgccctttatttctcatattttgtctagtaaacttttaaaaatactacccttcttaaagcagcattccaatctatttttgtaggtggtttttgtctgataaaactataaaactgacctagttgcatcattcagaaacgtaaaaagtaattttccacctcagaatgaccaattagtggtcat

SEQ ID NO: 126698 - DNA, 1050 bp, Homo sapiens
agtcacacatactctgccacacagaatgaaatatgatgtctcaaagtataaaccatttggtataatctctcctacctaattgtttactgcaggaagatagtatctgggtatgaaagtatttaattcagtctatattcaatgtatcataaactaataccaggtataacatatacatttattatgaaaatttcagtttacttaaatataatatttgaattttacttttttccccaaaggaatgtttttaatatatttggggagtattttttgaagtgtcactcattgttttgcttaaatgtttctgtctctgttgggaaagtccaataattcatacatttattttaataggttgaatgaggcatcatttcagccacctccaggtgtaaacatatgtgatgtaaattggaaagattacgtcctcataggcgattactcttcttctgcacaattctatgttacctttgcagtctttgtgttcctgtactgcattgctgcccttctgctttatgttggctacacgagtctgtatctggatagtcgtaaacttcctatgatagtaagtaatcactttattttttaaatacaaaaataatttgtataagctaaatatagattttcttatactggaaataaaaattcttggtgtaagccagttcagcatattttagcctgtgtttgccacgaggttgagctttctcccattaagtttaactcaattttttttagcctatttgcactataaggaaagtttatttcttttttaaatctattttaacttggaaaaaactcagatatgtaataaagcacatcaggttacaaatagcaaaaaaattaagtcgaaattcttttaatttgaagaattacttatcacaacatagtctcataactctttctgcttcttactttttttctttctctaaaggcccactttatacttctacaaaacttattgagtttaattatatcatgggttcacaaactatgtcccagaggtcactgtcttattttttatttttacttctttatttatatatttactttttgagacaa

SEQ ID NO: 126699 - DNA, 1043 bp, Homo sapiens
attcttccatctttaccttcttttttaacataaaacattatttagtacaaataatgaaaaatgatttcatgacacattttccaaggaaagttacttttacatattttgaaatcctgtaaaaactggggatcacctcttaacagttaagaccccaaactatgtgctggacattacctcagactcttcctatctgtaaccagattcttttcatgtatcttttttgtgggggggggggggggggggggggggggggcggatgggaaaaaacaaacccttgacaattactataatgtggattatggcctacaagattcaaggccctggaataatccatgggaagcattatgtcaagtgttccacagtgaatatttgatatcaaatctgcattgaatattatctactaccagttgctgagtgtgtgtgaccttgaacaaaacgaagcccctgacctcttcaagtttctattctagggaaagacagacaaattaagtactgtgtcaagcagtggtaattagaacagagcagaaatagagtagagggaataggtagtgcggggtaggagtgctgttatttgatatagtgtggtgaggggaaggtctctctgagaaggtcatactggaacaggaagctatggaagtgagggagtgaagcatgtattccaggcagaggaaatagccagtgcaaaggtcctgaaggaagagtttatcccgtgtcattaaaggtatcgcatggaaagcagtttgtgtatacagattaggtaaaggaaaaagtagcaacatgaggtcagaaatataagggaagaaaggatcttgcaggcctttatatgaactttggtttttattcatagagagctcaaaagccattggagggttttgagcaaaggataacattttctgccttacatttttaaaagattgtcttggctgttgtgttgataacagactgaagctggggcaagggcagaagcagagagatcatttagaaggctgttagtgcaaaattcaggcaaaaggtgatggtagttcagatcaggaggcagtaca

SEQ ID NO: 126700 - DNA, 1036 bp, Homo sapiens
ttcatgaacattcttatatgtctcttagtacgtgtgagcaagggtttctcttagatctatatactagtaaatcctttgtgacattatgtttattataaatatgttcatctaattggtagcttgttttacattcaacagctgacttgattaagattttttttctgtagttgaatttaacaatcttttatggttcttttttacaaaaaaaaatcttaaattctcccttttcatgtggtcacaggttttcttttatattgtcttcacattttttaaagactttttacttttgtgtgcagctcatctggaccatttactgaacagctcttccttgtattagttatctattgctgtataacaaattacgccgagcttagcagtttaaaacaaaggtctgttgacttttattaagtgagataataaacctcacccattcttctgtgggtcaggaatctgggagcagcttagctatgtggtttgggcatagggtctcccataaggttgcagtcaagctgttggctggggttgctgttatctcaaggcctccagcttattctcatgactgttgacaaacctcagaggatccccttccaagctcagtcatgtggttactggcagtcctcaattccacaccatgtgagtttataaaagttgcctgagtatcctcccaacatggccactggcttcccccggagaatgagaaagttcgagagagtgagaaaggaagacagaagttgcaatctttggccgggcgttgtggttcaagcctgtaatcccagcactttgggaggccaaggcgggtggatcaccggaggtcaggagctcgagactggccttaccaacatggtgaaaccccgtctctaccgaaaatacaaaaattagccgggcatggtggcaggcacctgtaattacccctgctactcaggaggctgaggaaggagaattccttgaatctgggaggtggaggttgcagtgagccaagattgcaccattgcactccagcctgggtgacagagcgagactgtgtctcaaaaaaaaa

SEQ ID NO: 126701 - DNA, 1050 bp, Homo sapiens
aggccagcgcccccaagctgcgcaggagcgggcgtgggcgcccccgggtcagggctcttcgcagtcgcgcgggtccggaagcgcggcgcgggcccaacgagcgcacgcgtacacgcgtgcgcaggggaagaccgagtgccaggggctgaaccgcagggaagggggcgcggcgcacgcagtatggcgcccaacatctacttggttcgccagcggatcagtcgactcggccaggtgcggcctgaggagaagcctcccggtctccgccccggcccgcccctcgcctccccagccgccccactccgtttccgccccagagtctcagccagcagctcaaccgccgccgctccgccccgccccgccccacggccgcccgggcccgcctccgagcccggccagcgcgccagccccgcctgcccttcctcgccaccgggctgctctggtctcgtcggtcccctcctccgccccgtcgtcctgactctctctccctcctttcctcagaggatgtccggcttccagatcaacctcaacccgctcaaggagccactcggcttcatcaaggtcctcgagtgggtgagtgcagcccgcgccggccaggcccgcctgccgctcggcgcggcgccctaggcggggagacggggacctgcgagccgggacgcagccctgccgcgcgggctttgaggccgccgccccgggactgggagtggacggcagggagggcagggaggccgcggcctgggccgcgcggggcggagacgccgcggcgggcgtcgaatcacgagctcctcggccgcctggctcccaggggagccaccctcccacaccggagctcccctctgggtgtccccgtggagtgggagttcaaatttccccttggctccactgcctcccgcagaggaagggaaaacttcctgctgcggtctaaccgaaacccggcggccggcgtcgcgctctgcggagaggctcagcggttacgtccctgccggtgcccactcgaggtctagctccctgggaagccgattttgtcttgtagacgtgatttggcgagcattc

SEQ ID NO: 126702 - DNA, 1064 bp, Homo sapiens
agtgcaatggcgtgatctcagctcactgcaacctctgcacccccgggttcaagcgattctcctgcctcagcctcccgagtagctgggattacaggcacgtaccaccacgtccggctaatttttttgtatctttattagagacggggtttcaccatgttggccaggttggtcttgaactcctgacctcatgatccgccacctcggcctcccaaagtgctgggattacaggcgtgagccaccgcgcccagctcttaatgttatttcaaaatgagatatgccttgacagattagagatatgttcacatgcagctttattaattaaagatctaaaacataccatgacttagtaaaccaatattggcatctcttcttctttttgtttattgaaggccttagaaattggaattggccaggccctttctcaacttccgcgctaaactttctgttgcttctgtctgcctctcctcactttctctcctgcttcttgttcaagcccaccagtggaaggcatggtggttacatttcctcaggaaaccttcagtgctagagtaactccttgaactttaagaaggttccttccttggccctgtggcactcgattttaaagatggagaccaccgagggtgagcagaaccacatctggtcacttatcagaactcattcgcagaatctctcttgagcagaaggaaacagaagtgagccgccactgctcaccttcagtcacagcctagcactgcttctgccagtcagctgagctcaggggcctaccttcctgagaaggaactggccgtgactggcagagccagtgagatctgattgggcaacaagataattgtgatttttttttaaatcctcctcaaacaaaagtgtttaaacaatagcatctcattgaaggcacaactgttcaaaatcagggaagaatgttcagatgactgtatcacattgactacaacactggtcattttctgatttgttcctcaaatctgaggaaagagccagatgctctgggaacaacatgttccaggtctactctaccagggctatttggaaaagaatccctgtaa

SEQ ID NO: 126703 - DNA, 1023 bp, Homo sapiens
attgcctaagtgtccagggtttataatctctacagtactctacagtaatgtcctaggtcttcacatttgttcaacactcactcaccgactcacccagagcaacttccagtcctgcaagctttacctatggtaactgccctatataggtatgtaatttataaatctttaatactgtctgttactttaccttttgtatgtttagatacccaaatacttagcattgtgttatagttgcctacaatattcagtgcagtgacatgctgtacaagtttatagcttaggagcaatgggttatgccatacagcctaggtgtgtagcggtctacaccatctaggtttgtgtaagtgcactctgtgatgttcacacagtgacgaaatcacctaattatgcattttttggaatgtattcctgtcgttaaacgatgcacgatgtatttttctagagttacaattaatataaaaataagctttatagaaatacatataggtgcaataaaactatatatttcaaaaagccaaggaattctctggatgatggtgaccttgtgtgtgtgtgtgggggggggggttgggggggtggcggggtgaggggtgtgggatgtgggcagtgtatggttagatgaagtttatgtcaaggttccagattttgttttggatggtaggtttccaggtacttatatcattaagaataatgaaataagaaactaagcacaaacatgactagaaagcctgggttccctaggaaactgtctaaggctgatgctttatttggaaagtgcaatctcagagcattgatagtaggggaaagtgaggcaaggaggaaggatagggagcaatgccggggtgctttggccttacttcatgaagagctctgctggtgagtcagcaggtgagcctgtccagccgcataggagtcttcaggtgggacaggtctgccttggagcagtccttgggtggaagaagggagaggaaatgagcagattgggtctctaattggaaggtaacttctctggggcactacctc

SEQ ID NO: 126704 - DNA, 3978 bp, Homo sapiens
tgatttaagagtaggaactagtattcccttaaatttaaatttgtgaaagaaaatgctacagctaaagcactgtggtttgaagcaacacaatgacagaaatattagataatgtcatatgcacctcaatcttcagactaggtggaaaattgagattacttctgtggatttttcagagagaaaccagaagcaggtaactccttagtgagacaggagtggctctaccagacccaaagggaatttaatttcttcaatctgtctttgctactcttgtatggatgaagtggattacctttgtcattgacttttggagtataaacagaatctttaacccagtcactgtgtgttagtcaagaatgcaatacttgtttttctttgtttctgttttgggattggcttttggctttttgtgggttttctagacccaaatttagcactagcaaatttcttaaacttccatttgataagtttaatcactgttgagtttgttggccaggaacaaggcagggtttaccaggcttttttgctgcacactcacaatgattacagttctccctaggcacccaggcatcttccttcagcctgaggaaaaaaaagattggtcagctaggtttcttggttttcctttaagaaaactggtttaagaatgtagtattaaggtcattccttttcatagaagttaaatatttctacataccaggcaactcagtgattggccattttagatagtaccttgttccactagcattttttatgcatcaaatcatctcacaatttgaacaccattggcatctctgtatttgactggttggttagtctaattcatcaaaccaggattcaggtattttgcttaataatgtaatataatcatgaaatttccatttatgcaggatcttctccatactgtcttcaagaatggcaaggtgacaaaaagctattcatttgatgaaataagaaaaaatgcacagctgaatattgaactggaagcagcacatcattaggctttatgactgggtgtgtgttgtgtgtatgtaatacataatgtttattgtacagatgtgtggggtttgtgttttatgatacattacagccaaattatttgttggtttatggacatactgccctttcattttttttcttttccagtgtttaggtgatctcaaattaggaaatgcatttaaccatgtaaaagatgagtgctaaagtaagctttttagggccctttgccaataggtagtcattcaatctggtattgatcttttcacaaataacagaactgagaaacttttatatataactgatgatcacataaaacagatttgcataaaattaccatgattgctttatgtttatatttaacttgtatttttgtacaaacaagattgtgtaagatatatttgaagtttcagtgatttaacagtctttccaacttttcatgatttttatgagcacagactttcaagaaaatacttgaaaataaattacattgccttttgtccattaatcagcaaataaaacatggccttaacaaagttgtttgtgttattgtacaatttgaaaattatgtcgggacataccctatagaattactaaccttactgccccttgtagaatatgtattaatcattctacattaaagaaaataatggttcttactggaatgtctaggcactgtacagttattatatatcttggttgttgtattgtaccagtgaaatgccaaatttgaaaggcctgtactgcaattttatatgtcagagattgcctgtggctctaatatgcacctcaagattttaaggagataatgtttttagagagaatttctgcttccactatagaatatatacataaatgtaaaatacttacaaaagtggaagtagtgtattttaaagtaattacacttctgaatttatttttcatattctatagttggtatgacttaaatgaattactggagtgggtagtgagtgtacttaaatgtttcaattctgttatattttttattaagtttttaaaaaattaaattggatattaaattgtatggacatcatttattaattttaaactgaatgccctcaataagtaatactgaagcacattcttaaatgaagataaattatctccaatgaaaagcatgacatgtgtttcaatagaagaatcttaagttggctaaattcaaagtgcttgacatcaaaatgttctagagtgattagctactagattctgaatcatacatcacatctgactagagaccagtttctttcgaatgattcttttatgtatgtagatctgttcttctgaggcagcggttggccaactatagcccaaaggccaaatttggacttctttttataaatgcagattgtctatggctgctttcccactactccagcctaaggtaaacagctgcaatagaagccaaatgagaatcgcaaagcccaaaatgtttattaacctgccctttacacaaaattacacaaaaagtttcctgatctctgttctaagaaaaggagtgtgccttgcatttaaaaggaaatgttggtttctagggaagggaggaggctaaataattgatacggaattttcctcttttgtcttcttttttctcacttaagaatccgatactggaagactgatttagaaaagtttttaacatgacattaaatgtgaaattttaaaaattgaaaagccataaatcatctgttttaaatagttacatgagaaaatgatcactagaataacctaattagaagtgttatcttcattaaatgttttttgtaagtggtattagaaagaatatgtttttcagatggttctttaaacatgtagtgagaacaataagcattattcacttttagtaagtcttctgtaatccatgatataaaataattttaaaatgattttttaatgtatttgagtaaagatgagtagtattaagaaaaacacacatttcttcacaaaatgtgctaaggggcgtgtaaagaatcaaaagaaactattaccaataatagttttgataatcacccataattttgtgtttaaacattgaaattatagtacagacagtattctctgtgttctgtgaatttcagcagcttcagaatagagtttaatttagaaatttgcagtgaaaaaagctatctctttgttcacaaccataaatcaggagatggagattaattctattggctcttagtcacttggaactgattaattctgactttctgtcactaagcacttggtatttggccatctccattctgagcaccaaacggttaacacgaatgtccactagaactctgctgtgtgtcacccttaaatcagtctaaatcttccagacaaaagcaaatggcatttatggatttaagtcattagattttcaactgacattaattaatccctcttgattgattatatcatcaagtatttatatcttaaataggaggtaggatttctgtgttaagactcttatttgtaccctataattaaagtaaaatgttttttatgagtatcccttgttttcccttcttaaattgttatcaaacaatttttataatgaaatctatcttggaaaattagaaagaaaaatggcaaggtatttattgttctgtttgccataatttagaactcacacttaagtattttgtagttttacattcctttttaacccattcagtggagaatgtcagcttttctcccaagttgtatgttaagtctattctaatatgtactcaacatcaagttataaacatgtaataaacatggaaataaagtttagctctattagtgaagtgttaaatttgtgtgcttcaagtaatgccattttcaggcctacctgttttaagtattcctccagttcaaagaattagaagatgagagaagggcaagtgtcagagttgactccttttctgctttgtgcaactgtatagatgacagtgccttttactaaggaagaacactggagggacatcagatttgaga

SEQ ID NO: 126705 - DNA, 1039 bp, Homo sapiens
ttgtgtgtgtggttttggcgtagttggtatagttgggcttttcttcaacagcatgtacatgctgtgcttactgtcagtttaaaggcagtttgtaatataaagagataccttaagggtcacatgttagaatgctcacagacttcctacaaatggagtattaggtgttcttcagtggcaaaaaggatatccaagatgtcatactttttctttattacaaacgactatccttcaaaacaggctaaagtgttatgtttctgaaagccagatgtggattggttcagttatacctattaagtgcttaaaacttaaatgtaaattatgtatgtgcttttttgtaagggagtgtttagacatttctgatgattagtcttctacttgtctaactttcttaatttggatttcagattaacgtcttcaaggacccagttgctgatcccaacaaaaggtccaaaaagggccgattatctttacataggacgccagcagggaattttgttacactggaggaaggaaaaggagaccttgaggaatatggtcaggtatgtatctatgctgattggtttttttaagcaatagtaggttggctcaccaaattaataagaaaggaggtttttatgttattgtttttgtggaagacaaagtattatattttattataaaatgtccaattgctgacctggcctaccaaaataagatacaaaacaagtgtctacgtcataaacacggggcctgtgtatacatagggagaaatattacgtaagtatagtgattgacagcaagtttgtatacactttatccaaaagcaaactatgttactttaatataaaatgtgaaaacaaggtgacttgatttggattacataataaatggtgaaaccttgatttaaccaagttttctgattcaaatcaaccaaactagaaaaatttacagtacactaaagtagttcatatgatctaatggtctttagcatacaaaagtacatttatatttgtgaactcaagttaaaaaatttttggtttttaagccacttgatcaaaaa

SEQ ID NO: 126706 - DNA, 2956 bp, Homo sapiens
aaaatgtatgtctgtactattattggtatatagtttcaaaaattcacagaagggagccaggtgctctcattgcctaacaaaataatggaaatatgtattcattctaacatcttgacatacagtataaagggcactcagcaagtgctttttagttagactgattttaaatgagtagattcaggaataccagaaaacacacacacacacagataattggttgaaaatacgaggttagaaacttaaccattgaagaggagtaaggctacttaaagcgttaaaaactaattgggtaaggtatggttgacccagctacttcatttgccttacgatgtatattcattaaactaagtcactcaccttctctgtgatgttgatggtttggtatagtaaacatgagatatgattaaaggtgattcagggatagatcaagtgtctgcctaagtaaatctgtgttttcatttttttttctagtaccataacagcttgggggaaagaccatgaaaaagatgcttttgaacatattgtaacacagttttcatcagtgcctgtatctgtggtcagcgatagctatgacatttataatgcgtgtgagaaaatatggggtgaagatctaagacatttaatagtatcaagaagtacacaggcaccactaataatcagacctgattctggaaaccctcttgacactgtgttaaaggtaaattttcatatgtaactttattattagaatccctctgtaggccagctgcatcaatactacttttcatttatatacacacaatttcagagctgtgtggaccagtcccctttattttagagttgcagcccagagagagtaatagatttgcctgaggtcacacagtaatagcacagaaggataccaagacttatggattgttttactgtcaattagacatttgaatagatattttgttttctgcttacctgcaaaattaattaacagcattgccattttaattaatcctatgatttgggcaccaaacttatttgcagtttgtttctttttcagcataagtcactgctagacctttgaagttgttagcacagaagaaataggaacagggtgatgtggaataaaaataattcaaaaatactcttcaagtggaggttctttagaaatactgttgattcataatgtagcagtgttactttttgttgttaatgttcaaggacttggtttatcttcttcaaaaagtagtaatagcaggcttatttgatgcctactactagaaaaatattttaggtgatttacataagatacgccatttaatctctacaaaaaaaaacagtgataaatattactgtctctgttatagaagaaaaaaacagaggcttaaaaaggttaaagtaacttgctcaaggtcacacaacatgaaagataaggagtcagatatccagtgtaggtcttttggctgcagccttgctacttgaccacaccatttgtcagttaatgagcagatgatacttaccccttaagaaagggaaacagaattaaggaggtcttttcttattctattaaatgataggccaatctgaaagtcttgtcttagcctgcaatatttggttttagcaaacttgataggtttcatgtttttactgttacgtaataaaaaatgtacacagctagttatgagaaactgatttcatcaatggggaattttctctttgttagaatctttaatcagtttatttaggaaaaagaaatgattgttgtgggaagagaatgtatttcttttgtttatatgaccaagctttctgagaaattttaatttggtgtacaaaacttttagtagttagtgaatgagtaagatgatttgtgtattgtgcagtttggctttaagagcaaaggagaacttagagactatgggttctagatgctgtgtctgcctttcacagtttctctgaactttgtgattgaactggattcatattggagttatatatcagacaaaaaccaaagtcattgggcacaagcagaataagtccaaattaaaagtataatcatgagtttgttaaataatgctttatatacttctttaaaatatacttatttaatattaaggatttttttttccttgaatccatataatttgaaaggtctaaggggaaaaacttgttttgagccactttatgatgtgaattcacttcataggaaataacatgcttgtttttaatgtactttaaccctttaaagtacactggaccaaattttagagagcatatacatagtgttataaaatttttaaagtagttaatttttatattctcgattatcaaagcaaaatcatttaactttgaaaagctcttatacttgttttcagctttagttatttgtgttgcatgtgtatttttccatataggttttggagattttaggtaagaagtttcctgttactgagaactcaaagggttacaagttgctgccaccttatcttagagttattcaaggggatggagtagatattaataccttacaagaggtatgtgttttatattaaaagtttcaataaggcatttcttataattaagtttgtttatgtttgataaagaacacaatataaatacaattttaagtctttgtaagtgtttatgttggtataaatctctgtgcattgcttaaagtttagaaataatagtagtttaaaatacagaggtgccagccaagccatacttactcttccagttgtcattggccaccctgaatgatgaatctaaagaagtatcattgtgaaacaaggaaatgtcagtcaagaaatattccttggaatataaaacaaagccttgactctgctggcataggtctgagttttcatagactggagcttcacaaatctgtaaaactcataatattaatgggtgctttttcagaaattatagaatagctgccacctcttctaaattaagcattgactgtcatcagtattagatttagcca

SEQ ID NO: 126707 - DNA, 1137 bp, Homo sapiens
cctgttgaggaaagaaagggtgttcagattctttttacgcttccttgtctgctttcagtaaactatctccagttacccaagaaagaaattacaatctaaactgcagctgctctggtcctagagctaactttattaaaagtaaatcaggttgttttttttttttttttttttttttttttttttttttgagacggagtctcgctctgtcgcccaggctggagtgcagtggcgggatctcggctcactgcaagctccgcctcccaggttcacgccattctcctgcctcagcctcccaagtagctgggactacaggcgcccgccactacgcccggctaattttttgtatttttagtagagacggggtttcaccgttttagtcaggatggtctcgatctcctgacctcgtgatccgcctgcctcggcctcccaaagtgctgggattacaggcgtgagccaccgcgcccggcgtaaatcaggttttttaaatgtttgccaaaccttatcactgacttttataacaaaattatttactataatcattagggaatatttaagttctgctaatacttaaaattgcagagtgctaaaaccagcagtgagtttagaatcaagctaagctttattgttgctactatttgaggcatattagttgactggtgttcatatgcaaggcagtctactgggtgcaacaagggttagaaggatatttttaaaaaactgaccctattctcaggatgaaaataatacactagtaatagtctgctctgttggttaactcctcgtaaggaggtacaattaaaatgctgtagtgttgcaagggaaggagaggaagaatcatattccttcactagcaggatcaagaaagcttttatagaaatatacaaaatcttcacttcttgaaggattggtaaaatttaatagccaacattgggcacttattcattctctgagtaaatatttattgcatgcttatcttgtatcaagcattgtgatgaaagcacaagaatgaaagaggagggagaatgtttagagaataagggctgaaacacagattttgtagggagcgtaggggagactgagaagacaggttcaggttagtaagggcgctcatattttgacactgaatgttaactatgt

SEQ ID NO: 126708 - DNA, 1444 bp, Homo sapiens
tatatctggaatgcacacagcaggcatcctgctgcgcagttctgtgtctagttaatagtatggaagttcaggacatacctccaaaaaaaaaaaaaagctaggattttcctcagaaagaatgcagtattttatgtcttaatatttgtggttaattttgttactacagactattcttgttcagtcctggtatccaatcacagtggccacaaattctagagagcagaagaaaatattggccaaatatttgttagaaacttctggtaacttagatggtctggaatacaagttacatgattttggctacagaggagtctcttcccaagaggtaagtaactgaaaccaacctcatttaatataatgtggattgttggttagagtaccactgtaaacttttggggacgttattgagattgatcttggttctaaaattccaaagattcaaccaacagatacatattcagtacctactactgtgttcagggtacatgggatatgtccttcaacagatgtccctgtcctttatatattagatggatggacagatggatagccagaaacagacataatatatcagatgtgaaataatgccataaagaagctcaaggcagggtaagggaagagagagtgatgaaaagtgggggtgggacactgttaaataggtctctttgaggagataatagttgattttttaaaatatttaggaaaaactgaatctttgtcattaggaactgttatgtctgacaataaatactttcctaagagaaagacaattcttatgggagctatgctatattccttaaatgtggttggctgcatcctggtattattaatgtgggtttctttctgttttggattttggtttatgattgattttccagactgctggcataggagcatctgctcacttggttaacttcaaaggaacagatacagtagcaggacttgctctaattaaaaaatattatggaacgaaagatcctgttccaggctattctgttccagcagcagaacacaggtaaaaaattctgttcattttttaaaactactaattttttcactcttgtatttgtaactcagtgacattttacctaactgcagagccaggtacctacagtacatcttcatgaacttgagcaacacaaattcagtatttatacaaaagtataaacattagtcttagagaggcagagaaattttatccatgctagaagaaacagtttaagagcttttttccaatacttatattgccatagaagttttcttttaaggaattttttttcaattactgtattgtcatatgtaggtagattttattcattaaatttagaagcactcactgtaagtaccagccactttttgccttttccctgtcctcctacatgaccttatctatatttgccctagaaattgtcatctgtactgtaccttcagttgtagatgagaa

SEQ ID NO: 126709 - DNA, 1141 bp, Homo sapiens
ttctcattttctgaaaaagcagggaagaagcaacagtttggttttgatgagtttggaattttctgccacttgtagtgataaatgttcttagcagaagcacgtggcagcattaaacttaaaaattaatatcagtacgtatgttaataattttaactagttttattttagaaggataaggatattctgactagattacagtaacatctacaattgcaatttctatgacagtaaatttagcttctataaaacgtaaagaacctttagtaaaacagcagggaattgagtatcatctgttgaataaataaatttatcattttatcctgccagaagtatgatgggcatcttccaatagaaataaaagctgttcctgagggctttgtcattcccagaggaaatgttctcttcacggtggaaaacacagatccagagtgttactggcttacaaattggattgaggtaaattgtttttttaattcttatttaacattaattgaataaagaccattgaactgagattacagtttagaatttgttactaataaagctatataatctcctataatttacttaacctttccaggcttcaatttcctcatctataaaatgacagactaaataatctttaaggtttcttctagtagaatagaatgttctgagattttgtttaaatcaaattattgagagtgattgtttttaaaacctagttggctttcatctaattcattgccattttaagtgtgtattattttagagcaaacttagaaaaacagcacatttctagtaacttacgacattcgatgaatgataaatgttcaagttagactaaaggaactttattccaacttctagtaactactttcttcatttttctctcatcagtttaggtcttaggatctaccatctgttacttttcagtttctcatctaaataaaacaagatctgctgttcatattgtttaatttctcaggaagggtacattttgggctttgggtttatactgcgagccttttttttgtttttcttgtatgtatacctaagtagtcatatgttttcacatggtcagagttttgataataatactctacctagcttctgaacagtttaataatagatttaatccgtgagaggaaataccctcgaa

SEQ ID NO: 126710 - DNA, 6809 bp, Homo sapiens
caaataacccaaaatccttaagtcatgtttatgagtgagtattgcttcaaagccaaatagcagtgaattatttttgggggcaacagacagatttccagggtttaagaaatcttaaataatactgaaaagaagaatcggttatggtttttgctgtttctagcacattagctttgaagcagcagaaagtcttagccagtgttgggcagagtgtatcctcttctgattgcccttagatattatatagctaacataacttgccctgtgaccttgggtatgttatcccatgtgatcttacatatacagcttattttttaaatgttgacttgtgattttttagcagttaaaaagtataactgaaaaagtaagatagtagtacttgcatttggtcatgtgatcccattgtgggaggaaagatcttcaaatcaaccctaagacatcaaatcagccctatgggacatctagagaagcatctagagaaaactaggctttcttttcccaaaaggattctgttcaactgaaatatatgtgtcatatctcatacttttttaaaaaaactgtcatacttggaacaaggatatttagccttgggaatctaattttttgttacagttggttggccagcactccttaatggaaacagctgtccatcatttgacttagggctagaccgtttttgttctaggcattaaaataataccagttactgttatctagtatgtaataatttttagaagtttatcctttcatgaagtaaattaatcacacaactgaagagttatgttaaaagaactacatttttctgtttgtgcttatgtttgttttttttttgagacggagtgttgctctgttgcccaggctggagtgcagtggcacgatctcagctcacggcaacctccacctcccaggttcaagcgattctcttgcctcagtctcctgagtagctgggactacaggcgcgtgccaccacgcccggctagttttttgtatttttagtagagacggggtttcaccatgttagccaggatggtctccatctcccgacctcgtgatccacccgtcttggcctcccaaagtgctgggattacaggcatgagccaccgtgcccggccagttctttaccacatatgtattgatgttcagatggtgttcttttaacagcaggagggccatgccagtttaggaagcattttcactgggaaggtttgctgggatcttattaggtattttgtttggtttacatctacggaataattttgtatttattgtagaaccattttctttagtaatagaagtcaagtcagtgctaaaaaagttaacatgatttaagagctttctgtgttaactttagaatactatgaaactttttgttagcgttacttaacatttaaaattgagcacttcatttccctaccatttgatagccttccccatctctataaatggcactcttattaatgcagttgctcaaccaaaaatgtgggaggtattaattcttctccctcattatcatcttccacatccaatttatcggcgtagttcccctttacctccaaaaacactgggcaaattctcccatctaacctaatagcccctaactcctgcactctttggtcaccctataatccattcttatccaccactaggctaatccttttaaaaggtgaatcatgtcatattcaccccagcttaaaacataatggcttcccattgcacttggtataaaatccaggctccttggggtagtctgtaagccttacatgatctcatttctgcctacctctgaccttatcgtgttcttactgtccccaccccgcccccatacttttaagtacctaccacattggcctgccttctgttctgtcccttatgccaaagcatttcctgtctccttgtcatttaggtcttgctcacatgtcaccttctcaaagaagtcttcctggccccctctagcccatcattctcttacattttcatagcatctatcttgatctgaaattaatatattttttttcttccttcttcagcccttattagtcctttgaaaatagagaccatgtcattctatttactttctcatcctcagtgtctgaagtaggtacagagtatgtatttgtgaatgaagtatttataaaataacagttgatttgaatttatgctatatcatccaattttctggtgaaggttcaaaatggcctgtttagtagaaagtaaaatgaagaggacagtaagctagcaaaactagaatcattataaatccttttgactacattgttagaaatactttcttaaaaagctctgctttaaaaacattttcccattaaacaacatgtacatatacccctataagtagacctaaacatgctctgtattcttctgtaaacttgttgggtgttagtagatagttaataaatggtgtttcttggctaattacctgcgagtttgcctagataacttagatgcgttagctatattctaaaacgatactcttaaggttctccaaagatttttagagttcatacttcgtttctaattaagcagttcagacatttttgtattttaaatggtatttgttttcagagaaggcattctaagtaaaggtaggtttttaaagtactataattagagaacatagctgaagctttaaaattataaatatttaattattgtccagaactggagctgtatttgtacaaagaacattttcagtatacttttagaccaagatacagagttaaatagcttagagacatttccattttgcttttgactcttcgtcttctcagaaaaagaaaataacttgccttctagtaattttaaatctgataaagaatgcatcattaagtacctgaacagtaagggtcaaactgtggagaaataaaactatgaatcagacttacaaacttgtgctataagatccacaccatttttcaagttttacttcatcgtgtgtgcttttcttctatctcactacttagtcccactaaagaagttggagttatttacattgtaaactggacattttcatttttacatacatcttgggtgtgtttttaggtagaggtgtctttttcttcagtttcataagtagttgaggtagtggtcatatttattactacagactcattcataaatatatttgtttttgcattttagtgaattgacataaatttcattgctgcagattctgtattagctatcttgcttagctacttcttaaattttattaaagtgggatcagtccctggattctaaccttaataagccctgacatatacttctagcttttgatgagtcttccctgtaccttttagtatatcactatctgttgtacttaaggaaaacagctccaagtctcctgcttgacttaaactctcagatcacttgttactataaagatttacctccaaggttgtctgtgtgctgcattaggggctatttttatagagttgcaagtatgctaccattggcaaggaaacagcacattcattcagaatcatcaatggaaatatattcatcttaggattcttgtactaagctatgaagattcttgaggatagagccaagttttactgagattgagactgtgtacccaaagacagcattggctttcctgaacttgagatcaaagctaaacaggaaaaatgatttatgttcacagtgatcactcatgaaaaatggtctgcaaagatttattccgccattgccatgattcaccctgtatcttaaacctcaaggcactgttattcctactcttgaaattgggcagatacacattattcttccactttattttttattggtaaaatgtttgaatttatttccatgttttaaccatattaaaagtataatgaacactcactttttactttttctttcttaaaagcagataaattttttacatggtggctcttacccaagttcatggaaaagaaatttgtgctaaggaagacctcttcgtattttaaactcataaggatttgatgtttaagaatttattttccagttaggtgggtgatttgacaaagggagattacaaaacaggatttttttttactttgctgctttactttgctgccaccgccgttgctgtcatccaggttttcatagtgtcactgtgaaggctaaaagtgatcatcctcagtacctcattgtacaagtaaagtagtcatgttaagtcattgacttttggaacataccacattgagatattagcagtaccaaattctgctgtctttcagttcattcctttctgttgtgtgtgcccattaggcagctgcttctctctctcttcgcctggatgaaggactgttccccaaaaccaaatgaaatacttttccaacctagaggccttgtagtagatttagtgtgcttgtatgtaaaatttaacgctctcctgtggttttaagatactgaactctgaaaatatcttagatacttattttttatttggtatagccaggaaaagaaactggttaatagcaaacaagaaatatagtttctctggttttgaaataacttcaagccttttctgttgtgatttatagtctactcatcggtgttttctaacagaagtgtatttctttacataggttactcactataaacaatatccacccaacacaagcaaagtttattcctactttgaatgccgtgaaaagaagacagaaaactccaaattaaggaaggtgaaatatgaggaaacagtattttatgggttgcagtacattcttaataagtacttaaaaggtattacttttcctagtatattttaaacactgcttattactcttaactcctttaggagttcttttagaatttttaacaaatctgttaatttggatgcattaaatcatataatttggtgtgtgtttgatgttctaagtatgagaaaagttttctgaaataaaaggtttttttttttttttggaaaccgagtttcgctcttgttggccaggctggagtgcaatggcatgatctcaactcagcgcaacctccgcctcctggtttcaggcaattctcctgcctctgcctcccgagtagatgggattacaggcatgcaccaccacacccaactaattttgtgtttttagtgaagacgggctttctccatgttggtcaggctggtcttgaactctcgacctcaggtgatccacctgtctcggcccaccaaagtgctgtgattacaggcgtgagccaccactcctggccgaactaaaagttttgaaataagtttagaaaagtcattaatttttggaggctaatcttgtttgttatactttagtcattaattcaaagtaaaggagttgttaatgaactggaaactccttttgaattatggtagcaatcagaatatttttatattagccagttttaccttgaagacctatttttaaaaactacctgtgtctctggacttagttgcaaatgcatattaaaacaaaaatcccccaatttctgtgctttcttatttgaaaggccatttctagggggaaaacagttcccaaacacattatacatgttggaaaagtttatctctaaccttttgaattaaacaatttcagaattgaaaacagtaaggtgaattttaggccaataactcttttctataatcttgactcttttaagattaggcagttcagatagtcttatactactgaaaacctagctagatatcagaagtaattattagtggcaagaataccaaagttaataccaaagtttttttgttttgttttgtttttagacagggtctcactcagtcacccaggctggagtgcagtggtgcaatcttggctcactgcaacctctgcctcccaggctccagagatccttcctgctcagcctctcaagtaactgggaccacaggctcgcaccaccatgcctggctacttttttatagtgacagggtctcaccatgttgaccaggctggtctcaaacttttgagctctcaagcgacccgcccgccttggcctcccaaaatgctgggattacagacatgagccaccacgcctggccccaagatactttaaacgagtttactagttatcttgtattaagttaccagcaactgatagcacactttaatttagtcatacaacttaagaactttgtaaaatattactcatttttaattataactaaaatgtattgattacctattctaggccagcattattgtaagtggttcgtatgtcttaactcattttgtcctcacaaacatcatataagtgggtactcgacttttatcctcatttacggataagaaaagttaattaaaagtgtgttgtttggggggcagacatttagtaattgtggaaattactgacttaccaaccctaaagatgccacattctttacgaacgaagtgagacgtttcatttggatgtaagaagcttttgagtcatctcaaagttgaaaagtaccaaaattaatcgagagaaaaaaattaagttaatatcatttttaaaagctgtgcaagtaataattttttctattacacatctgcttttacaataaataaacatttatactttgagttattaaaagtacaaattccttttctgactctgctgttgactctgggtgagcatttaacctcttagttatatttttaatccatagaatgggtgaaatagccaaagatattaagtctgtgacagttcagcaactcacagaatgcacctttagaaatgtaaacaggacatgtatattcttctaggtaaagtagtaaccaaagagaaaatccaggaagccaaagatgtctacaaagaacatttccaagatgatgtctttaatgaaaagggatgga

SEQ ID NO: 126711 - DNA, 1303 bp, Homo sapiens
tatacataaggaatgtaaaattactttaacatcagttttctggggtgcttttagttagaatagtgaattatcttaaaggtttctaatctagtgagccatacttaattgcactattagaatttgcacctatttaataaattttacttctgtcaactttcaagtcagactggtgtgttttatatcctttataatatgaaacttcagaatattttcatcttagatttttcattttttccccaaaagtcacctctagagggttcaatcaagtcgatatgttttataccagtggcttaccgcagtatgctaaaatagattgtgtattccacagtcacatttaagtcttaggtttcatttcccttatgtttttaggggtccttataacctattttacatttttgtctttttatcttaggaaaaaggacaaaaatgataatcttgaggttagaagtaatgaaacttatttagaaattacacgagaatgttacatatccttatcagtgcttacaaactattggccaaagttgggaactctagtagtttcagatgtgttgatgaagagagcaaaatattgttgatttcttctttctaaaactgaagaaagaataattgattgcctaagcactacgaaagttattttgcaagtagatggtatggtagcaagcacatgacaatgggagttttgttttgtcttgtatcctgtcaagagagtccagaactatttggaccaaaggagcatttgaagtatatacattcacttctgtaaactcatactttattgtatatagtaaggaattaaggacactgacgactgtggttcctctattttcatcgtggttcttgttagaagtaaggacaccgtttaaaccgcattatccattagttatgaaatgtgctgtccggtgtaggttgcttctcaaagggtcatctgtaagctggttatctagaattcagcatatttttaaccattcatttaataaatgttggtgacctattgggtattataaaagaagacaaagataagtagtattttgaaatccaggagggacagaagttgattttatagaagtttcaaagagctgtgaaatttatatatggtgattaggaattcaaggcagctttttttcaaaaaaaaagaaaattttgcttcctctaatggccaagtaacaaatttttgttgcttgtctttcactgcttctgagcggatgcttcggtattgtcacggtggctcctgagtcaacctgagcctcatgagtggggtactgttgcagcttgtaccccagagactgcctatgcattcataaag

SEQ ID NO: 126712 - DNA, 1377 bp, Homo sapiens
gaggaatgaacaagtgtcagtcgagtgtttacagatccggccaggaccccggcccccaatgcactttacgcgcgaagaagttgccggatggttgtccctgtcccgggccgcggcgcggtcgtcttggacgctggggcaggtgtgccctctgctgcctcccgtacccggcctgcggagggaggggacagctggacccgcaggggaggtccctttcttcctgaccaccgattgagacgtctccaggaccttaggggcagatccgttttctcactgttggactctacctcactggtctggaagtcctccgaagacattatttttccaaaggaatttggtttcgtgcttgtgtaataaagccagaatttacttgttctttatctccccctttttctatttcactgtcacccctctttgtggacagaagttcgaacatgtggtgttgcactagtttgtgctcagggtattctgaagcccactcgtttcctaatttttactggattccaaagctttgatcgaggatattttttaagaggttcaagcttgtgactgttagtagtgcaaggatttgtatgggctcagtgattacaaacaaagacatgcaaaatacaactgtttaaacattttcaaggtatttttaaaggttttgtattgaaacaatgtttatatttactgagctcctaaaaatggtagaatacacatgaaaacttttgtttaggaaaagttaacttgttaaattcttttgaattgaataaaaaaatgcattgaaaccatatggtgtgtgattaaaaaaaatgaataaattgtgaagaactggttttggttacaggagtcactggaatccgactggagatgatttggccccctgtcctggtctaacatacaaatctaggaatattatgcgttaaagtattttaaaatacattatccttgtaatgtattttacaaggataatgtattttaaaatgggagttgcataggagagatggatgtgtgtaaacattatcactaaaatgataaacagaatacccattagaattcttagaactattaatgatcaagaggggtggaggcatttcttggtatcaaataactggttaaggttactttgggcgaaatctatttcctttttgtttttgttgttggataacaagaaatgtctagactaatattcatcagttttacaaacataatgaaaattagttgatttttagttgatttttttgtcccaacattttttttaacctttttgccactcattatatgtttgcagttctaggtctttgacagctgaagaccacaggaatcaaacaggcgagacacacagaatactgacccttctttacgcttttatagtgtttataccatatggcccagtgt

SEQ ID NO: 126713 - DNA, 1020 bp, Homo sapiens
tgcggttgtacaaaattagctgcagatcaaggccatagcttgccgacccctggttagaagaaaaaaaaaaaagtcaaaatagtaccattgggggaaaaaacaggagtgatcctaaaaagtatgagcctatcagtttgacatctatgtccagaaatgtgtctcattagaaaagaaccccagatactgggcaattctggcatagtaaagaataaggattggaaaacaagtcttaatttactatgacacagcacaagacctgctgggtcagtaattctgaaattttcatagatatctcaaggaagtttgattcagaaatgaccattaccctgtaccatttttggagagcttttttaaataggttgagatgggacatgatatccttttcttccccctcagtagacatcccacccaggtcattctgatatcaatagttccatgactgtactttggaaaacattaacagatagtgataatactatattcttcttaacatttaaaacataattgccgttagttgacaattgctgtgtgctgtctaaatgctttaatttttttgtctcagctttatgagaacgataaggccatcacttgcccagtgtttcacgtgagctgcaaaatcaagattgggatacaggtggacctggcttcatccctgtgctcttgactgcccgattctatctccagatggggctggggctagcataacctgagtatcccttatatgtcaagctctatttgggacccttaatgtgttttattgttaaagctctgaaaaattaacttgtccaaggtcacacataaaacgagtaagtagggaagcctgatttcttactcttatgtatctaaccttgaagcccaggatgatcagggagttcttaaatggaatttgttctgtgggctgactcacaagtcaggttttcctgtttttttttcttttagtaatgctgatggatttgcattgttggttcatatcctctcttgtgaatgtctttaacgtaagtgatggtatttatgagaggt

SEQ ID NO: 126714 - DNA, 1048 bp, Homo sapiens
ggacaaacgtagggatcaagcatgtgaccttgaccttataatgtggtggtttaatcaaataagccaggcacctgcagttagctggaaaaaatgttgtctggccaggggtcggtgatttttgagggtcaggtggtgtggctgtaggtggcgctagagcaaacagtcagatgggtgaaggtcatcttctttcctacctttccaaaggatcccttcctcttctaatagctttcttttccctctcctattctcttccagtcttataaattctaattgttactttccatttgctatcaattctggtcgaaagagcaagctttagatgttagaatgatagtggcttatggtgaccctttctagggaaactctcaaaggccagaaagaagccataatggaaacctcttggcatctactctgtctccctcttccccgtcctagagaaagcaaatacagtttgacatgtcatgtctgaaagggtagcatccctaggccttgaatttcttagaaggtttacggtaggctatagcattgcatcagtactagtttggagtaaaatctgtggtaattcatgattttatataggcatcatcaagagatcttgtgttgccccataatttcttcagtggaattgctgaaacaaaaaatgaagtaaataccattcagattactctgataaatggacaagtggtcagaaacaaaattaactacacatgggcacatgcagagcagtcaacctgggagaaaaaataactaccgtgatagaaaataaagagctgattttctgagttatagaagaaaaagatctagagttcaaagtagatacacataccaaaaatatagactcataccccataagacaagcatatcaaaagtaataaatagaaatttaccatgtaataactgtggcttaatcctcttaactctgtcccatgtccagtcttgttggaatcttacctaccttttggtttttacagttcaaagggaatttggagaatttacaaaacatccttaaggtcaagcaaaatattgtaaagtttatatcattgatata

SEQ ID NO: 126715 - DNA, 1035 bp, Homo sapiens
gcagagatttgagggaagagaaggatttttataggtgggaatgggtagtggaaggaataaatttccaattcagcaaaccatgtaagttaatatgatgttcagggaatagtgaatagtctaataaggtttggaatatgtgggctttattataggaagaagaggccctaaatataggtttggatcagattgtgggggagggtagccttgaaagccactgtcactgtaagagtttggattttattctgtatgtgatggggaaccattaagttgtgtgtgtgtgtgtgtgtgtgtgcgtgtgtctgtgtgtgtgtgtgtgtcacagaatgaaattagcagatgtatcattaccagaaatggtcaggatagaatcctgaagtttcaaaataggtctttatagtcctacctattcctttcatggtggtcattatccaggaagcagctgaaaggagatgatgtctttcaggggatagcggtgtttaaggattaaacactcttattgaagtgtgtgtggactaagaggaaatgagggacatagactatcagcccattgtgctgctattgcctgtatattatatatgttataaacctactaacaattcagtgttatagttgttgctttatgaaatgtgatgtcttaaggaaattaagagaagagcaaaaatttatgtttactcttttctgtttactcacatacttatttaaaatttaaaaaatttatctatgtatttttattacaattttaaacataacataaaattcacgatttttaccattcttaggtgtatggttctgtggtattaagtacattcacattgctgtgcacccattatcaccatccatccacagaactgtttaatcttcacaaactgaaactccgtacctgttaaatacttaactcctcattcccttctgttcccagccctggcagccaacattctttctgtctctttgaatttcagtactctaggtacctcatagatgaggactcatgcaatatttatcctttggtgactggcttctttcacttcgtgtaat

SEQ ID NO: 126716 - DNA, 1044 bp, Homo sapiens
gttcccttgggtttccgttctttcttaggatggttgccaacccacaatctcattgatcagcagccaatatgggtttgtttggtttttttaattcttaaaaacatcctctagaggaatagaaacaaatttttatgagcataaccctatataaagacaaaatgaatttctgaccttaccatatataccattaggccttgccattgctttaatgtagactcatagttgaaattagtgcagaaagaactcagatgtactagattttcattgttcattgatatgctcagtatgctgccacataagatgaatttaattatattcaaccaaagcaatatactcttacatgatttctaggccccatgacccagtgtctagagacattaattctaaccagttgtttgcttttaaatgagtgatttcattttgggaaacaggtttcaaatgaatatatatacatgggtaaaattactctgtgctagtgtagtcttactagagaatgtttatggtcccacttgtatatgaaaatgtggttagaatgttaattggataatgtatatataagaagttaaagtatgtaaagtataacttcagccacatttttagaacactgtttaacatttttgcaaaaccttcttgtaggaaaagagagctctctacatgaagatgacttgttttatatttcagattttattttaaaagccatgtctgttaaacaagaaaaaacacaaaagaactccagattcctggttcatcattctgtattcttactcactttttcaagttatctattttgttgcataaactaattgttaactattcatggaacagcaaacgcctgtttaataaagaactttgaccaaggctataaatgccacgtacattattttcagtattgttggttatatttaaattttccttacaataaagcacacttttataataaaatacatgaattattgtttttcatacttttttgcttgtttctttaaagttttctgacgtgcataatgcataattcattgaaaagcatgatagcaatgtggcatg

SEQ ID NO: 126717 - DNA, 1111 bp, Homo sapiens
ttaactgcccccaccccaagggcaaccctccgagaagaaggaacgaggacccgagccctccagtctgcccaatcccccgcgctcctgcccctcccttccccacccccacctcttccctaactgaaagacaacaaacctgccgcgaagtgccggcagcccaggcgcgggccgctccggccacgacaacaccaccagcagctctcgtaccccctctccgaccgacgtcggcctcccccgcgcgggttactgctcccgcggcagctcttactcctcaaccgaaactttcctacttaccaaacccgtcgccattaccaagtctttcaagcttcgtcttccccctcccctcaaccccctgggggttgagccccgcccagctctttcgccctcttattggactgcagaactgccattcggttcttcccctttcccattgggtggtaccgtggtccgtctcggggggcgggcatgtattgacttttgtgttgtgtttactggagaagatggcatgtcaatcacaagagtaagtgcttcggattggactattgccgagagtccggggacccaagccaaactttgtccccgaaatggattgtgggttcgtagtctcaagccttggtccttggctgtgggagactgctggccggggaagagctggactacgtatcccagaggcgctcgcacagcgcagtcttgatagtaaacaagagtcatagggacacgtgtatcagctcgtttgttttggtgtctgggacaaaagggagggggcggaggaagggagtgttttaaagcttgggcctcttcttttcctccgggcctctgctaacacttagagcggcccaagcctcttgcagcacccaatccgggccataaacagccagagttgctcgctgctcaagagtttggcaggaggccagggtattgttttagtgcgaggggaaggagatgactgcaccagcggaagtactgcaggctagcgagggacttgatcacccacaaatcacggccccaggcacgaaggggtcgaaagtgatgctgggggctgcactggcagtgggaagaactagaagtcctttctcttgtgccttgcctcaccactcccaggacagcaact

SEQ ID NO: 126718 - DNA, 1048 bp, Homo sapiens
tggctgtttatggcccggattgggtgctgcaagaggcttgggccgctctaagtgttagcagaggcccggaggaaaagaagaggcccaagctttaaaacactcccttcctccgccccctcccttttgtcccagacaccaaaacaaacgagctgatacacgtgtccctatgactcttgtttactatcaagactgcgctgtgcgagcgcctctgggatacgtagtccagctcttccccggccagcagtctcccacagccaaggaccaaggcttgagactacgaacccacaatccatttcggggacaaagtttggcttgggtccccggactctcggcaatagtccaatccgaagcacttactcttgtgattgacatgccatcttctccagtaaacacaacacaaaagtcaatacatgcccgccccccgagacggaccacggtaccacccaatgggaaaggggaagaaccgaatggcagttctgcagtccaataagagggcgaaagagctgggcggggctcaacccccagggggttgaggggagggggaagacgaagcttgaaagacttggtaatggcgacgggtttggtaagtaggaaagtttcggttgaggagtaagagctgccgcgggagcagtaacccgcgcgggggaggccgacgtcggtcggagagggggtacgagagctgctggtggtgttgtcgtggccggagcggcccgcgcctgggctgccggcacttcgcggcaggtttgttgtctttcagttagggaagaggtgggggtggggaagggaggggcaggagcgcgggggattgggcagactggagggctcgggtcctcgttccttcttctcggagggttgcccttggggtgggggcagttaaccgttcgattggtgcccgcggcgagcccaccggagcagcgtctcccgcgagctcacctgggcttcggggcggcggcgctagggggtctcgggcgggggccgggaggaggcagggggagggcgaagttccgggccaggtcgcgcggtgggtggccgggccgggtgtggagat

SEQ ID NO: 126719 - DNA, 1006 bp, Homo sapiens
tatatataaaatatataacatatacatgtatatatataaaatatataacatatacatgtataaatatatatatatatatatatatatatatttttttttttttttgagagggagtctcgctctgtcgccaggctggagtgcaggggtgcgatctcggctcactgcaacctccaccttctgggttcaagcgattctcttgcctcagcctcctgagtagctgggactacaggtgagcgccaccactctcaactaatttttttgtatttttaatagaaacggggtttcaccattttgagcaggatggtctcaatctcctgacctcgtgatctgcccgcctcggcctcccaaagtgctgggattacaggtgtgagccaccgtgcccggcccactatattttaacttctttggattctttcctcactaatcgaagtggccagtgaagaaggcatatggcacgatggcatggacttatgaaactgctctgtgctgagggttcttcagggtgaattgcaagctggtgttttgtatatgtgtttgaaataaaaatactggtactcccctttccaccccacgcatacattatccattagaagttactactgtcccagcacggtgtctcacgcctgtcccagcgctttgagaggctgaggcgggtggatcacctgaggtcaggggttcaagaccagcctcgccaacgtcgtgaaattgtctattaaaaatacaacagttagctgggcatggtggcgcacacctgtagtcccagctgcttgggaggctgaggcaagggaatcgcttgaacccgggaggcagagattgcagtgagacaagatcaggccactgtactccagcctgggcatcagaacgagacttcctctccaaaaaaaaaaaaaaaaaagagtcaatgccaggaattttatgtctgttaagtatgaaagtgagtatttacttagaatggaaaaataaatcacaatgaattaaaaaaaaattaaagctgccagatacctgc

SEQ ID NO: 126720 - DNA, 1018 bp, Homo sapiens
gtgagtctgagattgagtgagtgacctgtccccggttacacagctagtaagagtgaaactgaagtctgttgtcttgaagtgtagcttctcttactgtatggtagctttacagtagcagaacttcagttttctcaggaccaaacttctgatagccttgagcaatgagaggtgtgaacacatagaacttatattcagtaaatatttatttggttcttttggttatttataggtagctctgttttgaaattaaaataatgtctttttccaacttcatttaaggagttttgggatggtggttgataactaagacaaagtgctgaagaaatgatagaagttgcaaagagacgttagtgtactatacttggtgaatgttggaaactgcaggacctgctgtagggaagaaaaaagttctagctggaaagaatgaggaaaccaaagagctctgcagagggagggggaagacaagacagactgcagctgtgcttctgtggaccccaagaacagcactgttcatacacagaggatagctctgaagagagatacctgtgtagtgcagcttctaaatttcataataaaggtaaaaatgggaaatgttttcagttcagataaggttgactgtgcagctcacatctgtatgtgaagcatagtacggatattcataaggatttttagttatcaaaataggttaaattatattctgtatacttaagatgccagaaatacttctatggaaagagttaaaatctcctatctaaactgttaatattaggtgtttaaagaactcacatagtatgactagtttctctcttaagagttaataaataaggaatctgcactgagaaccattgcaaaggaagctggagacgggtggctttcatagagactgggaatgtgagtgctctctttaaaaaaaaaaataccctccttaaaatattataggtgttcctgcatactcatacagtatttcagtatgattttgtccatagactcaaagagactgttttaaagtatagttctg

SEQ ID NO: 126721 - DNA, 1031 bp, Homo sapiens
aagctgtagtgcagtggtgcgatctcggctcactgcaacctctgtctcccgggttcaagcgattctcctgcctcaggttgctgagtaggttggattacaggcgcgtgccaccatacctggctaattcttgtatttttagtagagactgagtttcaccatgttggtcaggctggtctggaactcctgacctcgtgatccgccctcctcggcttcccaaagtgctgggattacaggcgtgaaccactgatctagccccttcttttcttttaacccattcatagccaagtcctgctctgtagaactatggtcatttgcttatatctttccactaaagtcagactcatgatgaattgttcattagtgagatccagcattgcaactaatacaatgccctgtacatagtatttattaaataaatgatttttttaataagtaggaatttagcaaccatttttagcccagtgtatctcagtattctgcacctggaaacaaaaactagtgcacaaagccataccccacaccaaacagatcagatcctctggggatggggcctggacaacatttttttaagcatatgtatgatttcgtgtgccacagagtagagaatcactgatgaaattaaatttgctccatttttttttttttttttttcagggagagagtggaggcttaaaatcgtgatttcatacttgagaaatagatttgtgttacacattttctctagtcgctagttctgtgggggaaattgttatatcctagcatatttgctgtaactatatgctaagactgattgtgatcagtacattgtactaaactggagaagcgttaatttcttccaaatttcatcttttaggggcttgaagtaatggcatgatacatgatttttatggagatgtgctggatgacttgtcataatatctcctagggaggagactgttgaaactgaatagctatctggtttccacctgttaattatgtattttcagtagctgttctatttaggacattacagacccaaagtatgtttaata

SEQ ID NO: 126722 - DNA, 1074 bp, Homo sapiens
tcaccaacaggagtttctgtactgcattaggcatctgatttgtcttcacttcccacaccatgttatggtgctctgacttaaaataaaaacgacattaagaaatgatgtcaagccatgcaatttgggcagtacacaaacctaaaataaatcagagacatgacaatgttgttttgttttttttttgagacatagtcacactctgtcacccagactgcagtgcagtggcgtgatctcggctcactgcaaactccacctcctgggttcaagcgattctcccgcctcagccacctaagtaggggggattacaggcacatgccaccacgccgagctaatttttgtatttttagtagagatggggtttcgtcatgttggccaggctggtcttgaactcctgacctcaagatatccgcccacctgggcctcccagagtgctgggattacaggcgtgagccaccacgcccggccacagtgttagattttaacttaatcatacactgccatttatagctccctcaaatcctttagacccggatgactccttaacatcttggcctacaactgaatactcagcactaaatcacatttcaatcccaaaagattaatatcttgaattataaaaaaaagtcttttctgctgaggaaaaatggcattgtatatacttttatttaacctagtaaccgtcctttcagatgcaaaaactgagactaataggactctttttttcacttgtaccttcaaattcaaaaggaaatttaaaaactttccttaataaaagttaaaaaaaactggaagaatattctattttgtccttttttaaagattctattttaatgtctctatttactgtgttttttattttgtttcttcattctgaaagtgaactacttcagcacacttaaaaaaatacattttcttttttttgagacggagtctcgctctgtcacccaggctggagtgcagtggcacaatctcggctcactgcaacctctgcctcctgggttcaagcgattctcctgcctaaccctccctagtagctgggattacaggcgcgtgccaccacacccagctaatttt

SEQ ID NO: 126723 - DNA, 1053 bp, Homo sapiens
tacttaaaaccaacatgagttgggctatttatggttattgtagacactcatttacagattgttaaattaaactactttactttgtgtgtaaagattggaccccactcgtggcttttcgaaagatgctacttttgaaatatacttgagagagctcagtaaaatatgcttagccactcttcgtggcagatttgctggtatgatgtggaaattacagtggacccttgaaacttgaggatctgacatttatggttgttactattgctaaactactcctggagatatgtgacctttagaaatgtgtaagtttgttgaggtgtgtttttgaattgtattgcttcaaggctggtgttcaggagtatggagctaatgagtcaccttggcttgctgcccagcttttcagcttggctttgcccccatttaatatatgggggtttccttcatgtttataaaaaccctggggagaagatacagctgtcttaattttacaaatgatgaaatggaggagattatgtactatggtaatgtttggaaatttagagatcttaagctcttgggacacataacctgcttgaatgccaaggattttctggaccctagtatttattgagtactggttacttttgagcaaggagtgccattttaatcaggtagttgatcttcctcagtttttggtttaaggaggaactcagaaacttagggccgaggggagtataaataacatgccccttccacctatgacttcgtttaaaaagtaatttcctgaacttcagaaacagaaatgaaccctttgcagtaaataaatgttggtcaaaggcagtgagggaaaggaaatagctatatcagcatgaaaattgtagggtagaattattttaaattagtgtgatgttctagaactccttggctccttcatgactccatgaaagaagtcagtttttacaaatggatatcccgagtcagtgcttctaattaaaacatttcagtttggcttggcatgatggttcacgctagtaatcgcagcactttgggaggacaaggtgggaggagttcaggacc

SEQ ID NO: 126724 - DNA, 1539 bp, Homo sapiens
agaattagataaaggtgataaagagaaccatagagtaaaaaaatttgtaaatgtttaaaataaattagaccatgaaatacttttactatacatttctacatatagaaatgaaaattgtatttctctaaggaagcagagttgtaatcaagattatattttaaattttatcaacctttagttgggttccttttggtctaggtttatttcttccatagtttatgtggccttacattatttgcctgtttgctaattctaaaatttgctaatattaaaatcttaaacttacaaaagtgggttcccattggtaaaaatcactgtttcatatatccagacagagtttaagaaaatgagtggttgtgctatgaaattacggaagcttccagctaatatgcctagggagacctaagtggaaaacacttcattatttatccctgaaaagaaatggataaatatgacagtttataagggagagaaatgcccatatttgcacacctgtgagtggaaaacgatagaccagagttttatactaggtaatgtaggaataactgtaaattttgttagtgctcttgagtgtaatgcattgctaaagaataaacttattaggtatgaaatctcacttttcttgtaacccattaagttgtgctgcttttcttacatttagcaggatattgatcttgactagagcaaattgaatttaattaacttcagtttaattccgtgttcatttccacaggaaagaaaacttcctttcagagttgttatttcctttatagtcctagttttcattgtaatcttaatagtcaaaaagctaaaaattcttttatttatttatttttaaaaaaaaacctgatttaactattggattttttttttctttctctagagatacttttttttcactttttacagcagagtcataggattaataataacagtttatggaaagtgagtaaacccttcagaagaaaatcagtgtaaataaaaacataagacataaggaaaggagtatctccctgaggatgtattattctgtccagcattttgagtaatgctctgttgtctggcctacctcctaacactgtctgctcatgcagcttattgttgagtgttaaactgtgttactgagctttgatatctgaagtctatagttaaggagttgaggacaggtaaaaatttatattacccctgaatagagagagagatgaagaaatcaatgctgttagtgtttggacgtgtttagcatgttaattttcacagagtatttaggccatatacattttagaatatcacattgttcccttcatttttatttatttttactttttgttacttctgttttaaatggttaaacagaagaactgataaaactcactttttaaaattagggagtcaggaatgaacaaaaggaatatttagcagtttggccattctctgatacttcatatatatctaaatgtgtaataacaggatgggcagtttttgggcaaaagatgaaacattcagcatataatttgaaatcaaaaattggagagtatgcta

SEQ ID NO: 126725 - DNA, 1734 bp, Homo sapiens
tgagacttactgagtacatcaaagtagaagaaagaaatggataggacgccctgcattagagggggtattatcattcacaaacgaaatatacacatgtatatgtattgatagaaaaatgaatgggataaataaatgaaaccatagtcgtagtttaaaatatattgtcaaatctgaaaaaaacgatgtctaaaatgtgtgaggagggtttggataaggagttaaggaatataattataaaatgaaatcttgctgtctttactagtgtttaccataaatgtgttcaatgtaataacattggcgttttaaatatgaagttctttcattaataggaaagatctactttaaggacctatgcttatggttgaaactgttgctttattttagatcatctcctgtacacatcatagccactagcaaaagtttacattcctatgcacgccctccaccagtgtcctcttcttcgaagagtgaaccagccttccctcatcaccattggaaggaggaaacaccagtaagacacgaaagggtaagtttatttatgaggttaaacttttacaaagtttgtacaacagttgaagtacattaacattcctcataggaagtagtctcactgttctgttagtgatctggatttgattttatatacagctctgctatgtgttaggaaagcttattattaatgggaatgtgcgtataactaaagcttccaaaaactttgttttgtgtgtgtcttttttttctttttttttcttttttttttttttttagcaaattctcccacagcctgacaaccctcagtttttgaaggcattatattttccctaaggttagaattactaagttatccacctataagcatgggcctaaagacgtgggatgaaaacagatattaaaaggtatattttaaaaacaaataaaaaagttgataatatttttctccataggcaaatagtgagtcagaatctggcattttctgcatgtcctccctgtcagatgatgatgatttgggatggtgcaattcctggccttcaactgtctggcactgttttttgaaaggtaaaacaaacaaacaaacaaaaaccttgaattttccacagcttacttgtctagtacagtcacgtgtctaatacgtgttttctacctaaaccttaggcacacgactgtgctttcataagggaagcaataaggaatggcaagatgttgaagattttgctagagctgaaggctgtgataatgaggaagatcttcaaatgggcattcacaaggttgatttaaaattcttaaaaaatttttcaaaatctttccaaatgaaacaagatttattgttaatctacagaaatatcctccattcactttgatatttaaatgacatcgtacattttaggtagagcatttttatgaccactcattgcttagtctgatggggaggagcaatgattttaggtttgcctttctaacatgctttcttggatgggaaatagtatatttcttggtgcttcttcgtgttttatacactttacaatggggaaaactggtattaaaaatatgtaatgaggtcgggcgcagtggctcatgcctgtaatcccagcactttgggaggctgaggcgggtggatcacgaggtcaggagatcgcgaccatcctggctaacgcggtgaaaccccacctctactaaaaatacaaaaaaattagctgggcgtggtggtgggcgcctgtagtcccaactacttgggag

SEQ ID NO: 126726 - DNA, 1305 bp, Homo sapiens
aggataaagttgacacctttcactttgaaatttttaatttctccatctctcctgtaggcaagaaaatgggcatgtgaagtgtgcttgtacaaattcttgttttgatcctgctatgtctcactattaagtctcttgagaaaaattgtcctgtcttggctgccttcagtttcgtccccttgctttactcttcactttagtgaagttcacaatagtctaactttggcctctactactctacaaaaattgtctcaaaggttactagctttattctgatttctaggaagagagacgtcgtttgttctgtttgacatctgtacaacatttgacacattgggttagttcctgacattgtcttcccttgatttgtgtagcatggcagcatcctgattctcagtcttttaggcctggtacttgactgcccgcagtgctgaatattagacaagattttgcccccttcactttcttcaccagttcctctctcctgataatgtcagcagcacctccatcatgtcctgtggaatgcactctggacttggagtcaggaaacctgggctctctttatagcttctccagcaattatctgtgttactgatcttaggcagattgttaacccctctgagtattggcttcctgatctgaaaaatgggattggattagttttaaggtctcctgcagccctgagaatgggaagattttgtaatttcgttatttgccaatctatgtctatagccttcacctgcacatttccagctgcatgttagacatctctgcatgaatatcagtcagttctttgaactaagcttagtgtgaccaaaactgcccttacctttttcttcctcttcttggcttactttcctcctattctttcaaagttgttattatcatccttcttgattaccagattcaaaaccatgaagttgtcttttactattctatttcttccctttatttatattcatttgattctaattctgtaaagatttttaagtcatcctctcttattcatgaccttgttcatgcgttagcgtaattatgattggatactatagcaagcttttggcgtgtttgtctcctttgtttttctgtgaatgtaagggtaaggatcatgtttgttagtgtttgtattttcagatcctaccatgtggcatgtgttaaatgctcaatattcattgaatttaaatttttctggttctattactattgcacttgtcaattcaggtctataataggtgtctctcattatatcctcaggtaattgaatatgagatcttttcttctgtagagtcttttcttatttaccatcat

SEQ ID NO: 126727 - DNA, 1035 bp, Homo sapiens
cacttacactcaagtataaataatggtgatgcagtttaataaagagttattaataccaaaagagagattaaggaggattttcaattccaactggaactgagatttaaaagaagaatgcaatttagaaagatgccttgcaccaagaaatttgtaattaacaataactttggggagtgctgagtatttgctaaaaatacaaggtgagttcagatttggggcaaataaagctaataaggagaggccagttagtaaaggcctcttaaagacaggcaaagtactgacaatttttgcttagaaggtattgggaaatcaatcaaagtgtttttatcagcatgactgtcaatttttaagatgatggtaaataagaaaagactctacagaagaaaagatctcatattcaattacctgaggatataatgagagacacctattatagacctgaattgacaagtgcaatagtaatagaaccagaaaaatttaaattcaatgaatattgagcatttaacacatgccacatggtaggatctgaaaatacaaacactaacaaacatgatccttacccttacattcacagaaaaacaaaggagacaaacacgccaaaagcttgctatagtatccaatcataattacgctaacgcatgaacaaggtcatgaataagagaggatgacttaaaaatctttacagaattagaatcaaatgaatataaataaagggaagaaatagaatagtaaaagacaacttcatggttttgaatctggtaatcaagaaggatgataataacaactttgaaagaataggaggaaagtaagccaagaagaggaagaaaaaggtaagggcagttttggtcacactaagcttagttcaaagaactgactgatattcatgcagagatgtctaacatgcagctggaaatgtgcaggtgaaggctatagacatagattggcaaataacgaaattacaaaatcttcccattctcagggctgcaggagaccttaaaactaatccaatcccatttttcagatcaggaagccaat

SEQ ID NO: 126728 - DNA, 1007 bp, Homo sapiens
taactggcctctccttattagctttatttgccccaaatctgaactcaccttgtatttttagcaaatactcagcactccccaaagttattgttaattacaaatttcttggtgcaaggcatctttctaaattgcattcttcttttaaatctcagttccagttggaattgaaaatcctccttaatctctcttttggtattaataactctttattaaactgcatcaccattatttatacttgagtgtaagtgcttattccagtctagttatttatatatgtgtctttcttcactaccgggtttgaaagctctttaatggcagggatcctgtcttggttatttttaccttttccacaaagtcttacatgtaatgggaacttcacagtgttttgaattgaacatttccaattcattcacgctatgcatatattttcagggctatggttctgatggtctaaagttgttatcacatgaagaaagtgtatcatttggcgagtctgtactgaagttgacttttgatcctggtacagtagaagatggtttacttaccgtagagtgtaagctggaccaccctttctatgttaaaaataaaggtagggcttgaattgcatttgtagtaactttttttaaacaaagcttcttaaatctgtaattatgtctgtagctttgatgattaagaaaaaatttgaggggaaaacgtctttcaaactaaataaaaaactaccatagggaatgcttataataatacctaatggtgcgtaagtatcttagcagtcaggtggaactttatttcctgtatgagaaatttttagattcatgtagcatagtataataagctttctattatcttggtatagtttgggtaatgtagtgatctagtaatcacattttcattaagagttaccaaatatgatataaacctgagtcactcttcagagccttattacagtaacaccatgttaaagatgattttataattcagagactatttcatggtctcagtcatttatc

SEQ ID NO: 126729 - DNA, 1317 bp, Homo sapiens
gccacatttaacagcttttcactgcctttcccaaccatttgttttctatagtagtccttaggcctggtatgttgcctgccactccattttaattttctaggtctgggtgcctataggccaagaaaccatattgtcacatttgtccagaaatgaatttaaagtaagaataagtgggttgtgtaggatttggaggagttacttgctatgaataaagtatgctgattataacattcctttggggggttcaaagtcttttttaagcttttgtattatctgcagaggttttttaaaaaaattaatttcagttagcacatatacagatttcattttataagcaactatcagtggcaaaagttgttagtgttggtaacatgatatagggggaaatgcactgaaatttccaatcagatgttttcttttttttttttttaacctgctttttagaaatcagagaattcaaaattgaattaaaatattattattttttttaattttatagctatgacttcacacctatggattcttctgcagtttatgtgttaagtagtatggctcgccagcgtcgtgcatctttgtcttgtggaggacctggtggtcaagactttgcaagatctggattcagtaaaaactgtggctcacctggatcatcacagctctcttccaattctttgtatgctaaagctgtcaaaaaccacagctcagggactgtgagtgccacttctcctaataagtgcaaaagaccaatgaatgccttcatgctttttgccaaaaaatacagagttgaatatactcagatgtatccagggaaagataacaggtaaaaatagtgataattctgattacaataaatgagtaacacttcaatacggttcatggtaactggaatagttaagtaaacttattctttaatagcttttattcaactcttaggttgacttttttgtttgtttttgagacggagtctcgctgtgtcacccaagctggagtccagtggtacgatctcagctcactgcaacctccgccttccaggttcaagtgattatcctgcctcagcctctcaagtagctgagactacaggcgcccaccaccatacctggctaattttttgtatttttagtagagacagggtttcaccatgttggccaggctgatctcgaactcctgacctcgtgatccacccaccttggcctcctaaagtgccgtgattacaggcgtgagccactgtgcccggccaggttgactttaaagtaaaaagtttaagtggaatttttagggttatatgtaattattttataatacatagacaattaggttatc

SEQ ID NO: 126730 - DNA, 1087 bp, Homo sapiens
tctgagcagcttgaactataggcatgcaccaccacacctggctaattttttgtagttttagtagagatggggtttcaccttgttggctaggctggtctcgaactcctgatctcaggtgatctgcccacctctgcctcccaaagtgctgggattacatatgtgagccaccgtgcccagccaaatctggtattttctttgcattttagcattgctcccatgtgatatactggtaatcaatcatctaacattgagggccatcagatatcacctatctctaaactgaatgggataaatcataattttgaaattggattcttcactgtctctaataaagctgccttaattcaatgaataaattctcatttggaggcaaattctgagggaatggagactagaacaggtcagagacatgtagctcattttaagttgctataaatgtccatctggatgtaacattcactgcagaaataatctttagatgtgtatattttacatttgttagggaacacagagtatagtctacagcattgtgtacatttcattacctgtcatcttttagcttaaaataataaatgtttcgcaagtgccacccccttcaaaaacatctcatgttctttcctactgtggatgactgagatggtgtgaatatttattgatttgtttaaatgtgtcaaccattatatggtacctgtaacccaagactaaaagttttttttttaatgggttctgcaaatggaatataaaaattggttatcattttattatttatttttgagacagagtctcattctgttccccaggctggagtgcagtggcgggatatcggctcactgcaacctctgcctcccgggttcaggcgattctagtgcctcagcctccccagtagctgtgattacaggcgtgtgccatcacacctggcaaatagtagagatggggtgacggggtttcaccatgtcggccaggctggtcttgaactcgtggcctcaagtgatctgcccgccttggcctccaaaagtgctgggattacaggcatgagtcacaacgtccagcccaaaaattggtttataattaaggaaaatgcagcaca

SEQ ID NO: 126731 - DNA, 1271 bp, Homo sapiens
cctatttcttctcctccttgaaatttttcaatctagaaattctgtgccaatggcacaagtccccatgaatgacagctaacataccccaacacctccagccttattggtccctcaccaattaaggaaaaaaagctgttgagacaatcccaaaattattagagaaattttctactgtgatattaatggattaataatgcttatctttcaacccaactagaaacactgcattccaaaattatttttccaactcaatgtttagaacaaacattcttttgaagtttgcctgagatttcgacttgccatgctatgagagtaaatgacccttgaggaaaggcagtctttatatgatgatgtgataacattattaggttttgaagtataaaaatgctagagacagcatcaacacaacctcttaaaggttgtaacaactgctccaacatgccagtacacctgcacggataaggcaagataattttaaacactatttattgaaacatactgaattggttcttttcctcttccaacagtcaggatttaaacgtttctgttcttcagccaaagcctttgcttctaatgtgtacattcttctctcttcattcttcattttcttccacctgtcaccaaggatcacacttatggctctgtaaaataaatatttacacaatgctgaaagcacacatttttcataaatctcatgtcaagtgctgctacttcaggagaaaaatgtgaagttaaaaaagatgaaaatcttgtctatcacagagatgggaaaaggtcaaggccataatgctcatttccagtaaaatcccgaatcaaataatccattgttccgtatcagcagcatgaagtattcaacttgtactaaaagctaatctatttgtgcccgtaacctatcaaatagttttgataaaggtcttttctcattcaatcatagtggaagtgtagaattaactatgcatatcttactatttctctctcaagagaaaaccaaataaacctttagacagtattttttattacttgagaaaactggataaactcaaaatgctaagaagttaaactgataagactacatcatgacaaatattagaagctgttttctcctgtttgttactctgctatgaaacctactaaaacagtctcacctaggcacacagatgtaaaccaccttccttctatgaagagctttcagccattcacttcatgacacccatataaaacataaggtcctggaaattttgcacaaagcacatcaagtgatttttatactg

SEQ ID NO: 126732 - DNA, 1084 bp, Homo sapiens
gagactgttttagtaggtttcatagcagagtaacaaacaggagaaaacagcttctaatatttgtcatgatgtagtcttatcagtttaacttcttagcattttgagtttatccagttttctcaagtaataaaaaatactgtctaaaggtttatttggttttctcttgagagagaaatagtaagatatgcatagttaattctacacttccactatgattgaatgagaaaagacctttatcaaaactatttgataggttacgggcacaaatagattagcttttagtacaagttgaatacttcatgctgctgatacggaacaatggattatttgattcgggattttactggaaatgagcattatggccttgaccttttcccatctctgtgatagacaagattttcatcttttttaacttcacatttttctcctgaagtagcagcacttgacatgagatttatgaaaaatgtgtgctttcagcattgtgtaaatatttattttacagagccataagtgtgatccttggtgacaggtggaagaaaatgaagaatgaagagagaagaatgtacacattagaagcaaaggctttggctgaagaacagaaacgtttaaatcctgactgttggaagaggaaaagaaccaattcagtatgtttcaataaatagtgtttaaaattatcttgccttatccgtgcaggtgtactggcatgttggagcagttgttacaacctttaagaggttgtgttgatgctgtctctagcatttttatacttcaaaacctaataatgttatcacatcatcatataaagactgcctttcctcaagggtcatttactctcatagcatggcaagtcgaaatctcaggcaaacttcaaaagaatgtttgttctaaacattgagttggaaaaataattttggaatgcagtgtttctagttgggttgaaagataagcattattaatccattaatatcacagtagaaaatttctctaataattttgggattgtctcaacagctttttttccttaattggtgagggaccaataaggctggaggtgttggggtatgttagctgtcattcatgggga

SEQ ID NO: 126733 - DNA, 2041 bp, Homo sapiens
tgaaagatgaagggaagatatcaatatttttatagtaggagggctggccaaagatgttttaaattcattgtgtacatgtgcctgtttcttagtaaaatgcaggtcatatctgtttaaatttttcacaatttctttaaaaatagtggtcagtcagtagtcagatgagagggtggctgaactgaattttggcagttcttggttaatttagaatttcatgtgttcggacttttcctgtatcccttttctgttcatcctagtcaatgtcttatcattgcatacattttctggatgcttgagccatcagatatcagctagctttttaaaatcacctttaagaaagcagtattttctaatagtaaatttataaacatcttatacatcttagctttcatatataggattactatgtattgatttgtaaacattcactgagtttaattttatttccacagggctcacaacaacattaaaccaggatgcttatgttcttaagtctatatttgcatatacattgactcttgatggaaagacttaagaagatcaaggtctcaccatttgtcctcaattcgtgtgaccataagatactgatagcattgagtcttgaaatgatttaataatatgagtgaggatttgctttctccattagagcattaagctaaaactatcaacattttaaaccaaattgccttatttttcttccaaacttcatatatgtctatcaggtaataataggcttgaaaattgatatcctgtggtgctaaagtacagtagaaagagaggagaagtgtatacatgttttattttaaattgtacgaaaggggaatttaaaaaatatgtaactgctgtttatacattggctccttactgcttattaatctgtattgtacacatgatgaaatgaagcagaagctgggagtcggcctttcctctagtaaccaccacatggctcagcatctgtgccaaacataggcgctcctagtctggtcagtgccaagaggctaccagaacatggggcaggtggctggtgttggtgtcccagcctaagagccacctgctgcagttaccatggcatgctgagttgatgcaccaggtggcagcagccatccgttattatttccaatggagacctagcccaggccaaggtaaagttagttaatagcattgggatatagtcactgtaatggtgctattaacaaacagtcaacaccattgtattttttaacttcgtgttctgtatctcctcagccatgtatcttaaatatattttgtcatcataatctttatggtgggggcagactttgcacttactgcagtgcaacacttgcactttaattttcctccaactgtctaaaattagagcaaatacattggcaatacagctgcttttgctctgagctacaatcatggcttttcatgttacttaccaagtggtgtttctggttaggaatcacagctgtaaaattgatttcagttcatcacacttcttcatgatgttgcccctaaattttgcacactatattcttgtatattatttcaaataaatggaaaaaaaagttgcttatctctgacgtctactgattgattgattgattgattaatcttggctgaattttatttatgagttctcagaataacaggttcaggagatgagatggaaaacataaggcaaattcctaacactgctaattaggaggctgctgataggattttaaaaattaaaaacaatgttaatagtggaacaagagccatcagaaaataaggacttagattatctactatttatagagaattgctatacaataaaaatttttatttttcacgtggcatttttgttacacggttaaacagcccaaaggtctgcttttaataacatgacaaagtgtaacaaaagccttgctttatttaaagatccagtatgacatacttaaaaaggccatttaaccttgtatcttagcttgggatgtgccagtggttcctcaactttgttgtctattggaatcattttggggattttttttttttttaatagtggtgtctgtca

SEQ ID NO: 126734 - DNA, 1254 bp, Homo sapiens
tgctccaatctcaaactgaaattttgaagaaaatatgacaaaaatgtatttgtgtacctggtacttaaatagaccaataattaaaaattaatctcgtagccattctttttagctccacttaaacagacgatctggttcagggactgacgaactttttctgtaaaagaagggccagatatatttcagactttgcaggccacatggtctctgcctcaactattcaactctgccattgtgtgaaagcagccacagacaatatataaatgaacaagcatcaggctagattcagcctgcaggcagtttgctaacccccaacctaatccatgagatcataatcataaacaatggaatggtacatccccttgattaaattcagactgcttcccgatcatgtattttgccattacagcccaagagcacttattctagttgttggttgttcatagttcatcaaataacaggaatataatgcatctactggtgttaccgaatgtgccaaagggccccatccccttgtactcttgagcgtgcctttcagaggcgcaggatgcccctcgtgagctctgggagtaggcacaaatgcccattccgttgccggtgtcttcagtagggaagcagggaaaagggaaattgagaacatatttacacagccagaggactccgagtatatgactagaccactaagaacaatgcagactgaaaacatggttatagtttttcacactaaacgtagtaaccgtagtaaccatagtaacactaccagtaactgagtgaaggctgttggtcacttggcttgtgaaaccgagcattaacagttccagaaatgagcttactaataatttttatatattggtatccccttaactgttttatgtgatttatctaatattttgacattgttttcattttggttttcaggggagccctggaagcttatgttcaatcagtgagaagtagagaaggcaaagaatttgcaccagtttatcccataatggttcagctgcttcaaaaggctatgtctgctcttcagtaatgacatgaaatctttgttcatctccactttgtgctaacccattcatagttggcagttaaacacatactccaaaagactgctactatctactattttaagaatgtaattgattgttcggtatttcctatcgacgtttatttacctctttagcacttatactttagcataaaaaatgttgagttatcaccacctttcaattccatggacctgatttttccaga

SEQ ID NO: 126735 - DNA, 1070 bp, Homo sapiens
aatgactgaaatgcttccccagtagctagggaaaataaattacaacataatgttatttgataaagatagatttttacttgtagaatagttaatataaagccatctttactaataataattctgtatctaatgagaaccagctatctattgagaacattcttgactcttgaccttatcattagtatagggaagaagttcgcttctctattttgtacaggccttcattcataattagagtaattaagttggggtaaagaaagaccccaggatacagtgccgttttacatggttcagaatcattatctcatctgtcaagagatgttgctgccatcttactacttgggattcaatgtccacagctccgcttctaatcagctctcatccataagagctcaaagccaataacagttcaaataattcttgccagccttttgcaccaggtggtatataatttgtagtggaatggatttgcctgcttgctccttctgtaaaatgtggacaatgaaacccatacatgtaatatagtataagggagctagcataaatttttgatggagtgttcagcaaagtaataactttgtatatacaaagacatatttgcctttttgaaaagttgtgtagaaaatgtttgcatataccacatttgattatggtccaaagaaggattctattttaaataaaagctgaaaggattgatgaagataagaatctgttaataacaactacttgaaggctttactcttgttctttatctgcttttagccttgtaattagatgaactttataaggagcttttgctgagtccggtggatgtcagactcatagaccaatgaaccgggggtcaaatgggagctgaagggtagatcagcctgtgagcacgtgggcatgtgggggtagaggcttgtgggcgtctcaaggctgaatagagtggttaagcagtggagggctccttcagtagccaatctaggaaaaatgctattctacaaggagaatgattctcccaccaaatcacctatttcagtattgaacagtgtgaaataacttctgtttttcccgtctagacctctgct

SEQ ID NO: 126736 - DNA, 1143 bp, Homo sapiens
gcactttggaaggccgaggtgggcggatcacgaggttaggagtttgagaccagcctggccagcatagtgaaatcctgtctctactaaaaatacaaaaattagctgggcatagtgccatgcgcccctgtaatcctgtaagccacctcagaaggctgaggcaggagaatcacttgagcccaggaggcagaggttgcagtgagccgagataatgccattgcactccagcctgggcgacagagcgagactccatctcaaaaaaaaaaaagggggggacaggtgattacccagaagattccattttaaaatgagctggttcttaccaggcctggcttagacaggcatctcagccagaaacctctgtgtgggctgggctgctagacatgctgttatgcgcatgtactgttcaggttgtttccctctcctcgtctgtctccgtccttgtccttccccttctgcccttctttccttccttgtatcatttacagtttgcgtcaagaatatattggaagaaaaaaagaaaaatgtaaatattcgaaccataaaactaacttaaattgctatagataagtttcaaacttggctttaaacttcatgaagccaaagataagagagaaacagaatcagctatctgattctcattatcagaaggaagaaaatgtatcaattcctaagagaaagttaagcatctctttttttttttttttttgagacggagtctcactctgtcacccaggctggagtgcagtggcatgatcccggctcactgcaagctctgcctcccaggttcacgccattctcctgcctcagcctcccgagtggctgggactacaggcacacgctaccatgcccggctaatttttttgtatttttagtaaagatgggatttcaccatgttagccaggatggtctcaatctcctgacctcatgatctgcctgcctcggcctcccaaagtgctgggattacaggtgtgagccaccacacctggccaagaaagttaagcatttcttggcacttaattctaaagtacttataaggacttttatacagagagcttcatacgggaagtactaagagatgggaggaccaaaattcttgatcaccttcctgttgtagaggtagtataggattccatatggctgctg

SEQ ID NO: 126737 - DNA, 1042 bp, Homo sapiens
gccttggtgacagactgagaccctttaccgcccaccacccacaccccccgccccaaaaaaaaatagtgctaagtttcctgtttgctgaggcaggatgaccttcatgtaagcactcttaaagttgtgtcatagtatggagatacaaggtctgaggataagtttcacttaagacatctattttaagccatttaagatggaaattttctgccaaccctttccaattctcacatgagagaaagaatctctaaaggaacatttaaagtttgggtgacaccttctaatacctatttatagaatcaagaatcgcttgatcaatgtataattttaatagttctacttttttttttatatctagcttcttatggcgtaacagttttcaaacttttgaccatgacccacagtaaaagatactttctattgatatttggcatatacttgtatgcaaacacatgaacacactcaaatctatatacatatacatggacacccatatgtatggttcatgaaatagtaagtacccttacttcatgtgataacctctaacatttctatttcatttgattattttaacccactaaattagtttaatgacccactcatggcctgcatccagccatttctcagatttctcacgaggcccttaactcttgaactttagttgctctagtgacagggagccaagttttttcctttccacaaactgtgaagatttatacccttttctcttgggattctggtatctctgaggttcctcctgcagatgacgtcttagctcccaaggcctcaggcacataagaataattgtttcttgcctatggagtatccttcatagcttgagttaattgaaaaattccaacagaggtatttttctatataccattatatttctatatttatattgaatctacagaaatctactgaattaatcctagtgctttctcagttgtttgatgggactgatacaactattttataaaaagcgtaggattaggattaactggatcaagaaataaaacagaagtataatatattaaggggttca

SEQ ID NO: 126738 - DNA, 1081 bp, Homo sapiens
ctatagtgtacccatggcaaggagattttaagcaattttttgtaagggtggccagcaggacagaagccttaaatcatatgtgcttcttgaagaaaggtgctgtactatcagggagcagcctattctcaaccattttctaaaccattctttaccagggcgctatttatagcaagagtggagaagcagtctatcacctgagtagcacatatgcaaaaagttcgcatatgcacttggtagaaaagaacaggtaacctaattaatgacaagtagaatttccagtcaaaggaggaaaataaagagaagtgaaaccaagatttgctaaattcttgagttaggtagcatattaatttattaataattgaaaagagaaaaatttttaaacactgataataattgctgacaattaacagcacttatatgctatgcacataaagctttgtgggattatcttttaatttgcattattctattaagtaggtattattatctccattttacagatgagagacctgagacttaaagaggtgaagtaacttatccagggtcacaaactagtaactagtatcagcatttggaatgctgatatagatgtgctactaaaagctccagagttagtccttttaattacttgagccacactgactgataaaaattgtcatcatttatattgaatgtaaaaagacttgtaatgcctaaagtataggcatgcagtcttgaaaattttccttttccttatttttcaatggataaatgatataaactttttccttttatataacaaaaaatgttttttttttattttcatgaaggaattgtctcatcttgggccctcttagtaaataaatgcaaaaattatgtaagtgcttaccttttaataaatttagttggccatcacaacttgccttacagtccagataaaattaagtttactgcaagctacaactttctgtgatccgggtctttcccaaattcccctaatgattctgacattacaacaatggagtatattttaatatttcagatggagttggctgtgggtccattctgtagacgagtatctgatttaggaaagtcctatcgg

SEQ ID NO: 126739 - DNA, 1042 bp, Homo sapiens
tgacgtattttcaggatttctttaagaatcctaacttctcctcactggcaccagtgcaggaaagagaaagtagttgcagggtgccatctggagggatcatggtgagggaagtacctgacatccagcccccttaggaatccaggtcatgggcacgaggtggtttcctacaggtaattaattccccactgtgaccacatggtctcagtgcctacactgatcacacagcagttctgaaatcactaagcctgtccacgacactggggttctgctgattctgaatctcactgggatcttgcccacagtgtcctctgaagcacatactccccctccacccctcagtttattttcttagctgaaggaaagagtggctattgaagttggtattaaattatttagtggtacttctagcaatttctatttataggtcttctggtgccctttaagcatacatttatatctatttcactttgtgcctaaaaatattaatttagaaaagaaaacaagacaatcaaaattctaatttttgttctaattcctattgccttttcttctcctgaacaatgtcagggcaggagtaccctaggagtatccaaagaagtcctgtggttaaccaaatgtctgtggtagggaaggaacagctatgtaattagttcaccgtgcctgcagctgaccgctcattctctccaaacgggggctggagagaagcagttgcacatgccacttttgtatccgctgctaatggcagagtcacctcctcttaccacaacactcttgccctttaaaacatggcctttattgtttaatggaattctggaagaagaaaatgatttacaatatcctagaggtcctttatggataaaaaaattttattttaaacattaaacattttgaaattgtcctgcggcatagaaatcttttgcataatcatacattttccagccattcgaggtcatattttctcatatcgtaactttttcctagccatttatttgttttaacatttggtcctgctcaagtgctaaggcaaaggttgtctttgaag

SEQ ID NO: 126740 - DNA, 1822 bp, Homo sapiens
gattgataaatggataaagaaaatgtggtatacatacacaatggaataccatccagccttcagaaagacaggaattctgttaattgcaacaaatagatgaacctacagaacattatgctaagtgaagtaagccagacaccaaaagacaaataccacatgacctcacatatctgttgtctaaaacaaccgaatacatagaaacagagagtagaatggcagttagcagctatggggtggagggaatagagagatgttggtcaaagggtacaaagttgcagttaggaggaataaatgataagtatttaaggtgatgagtatgattaccttgattcagtcattccacactgtatacatataacattactgtgtatccccttattatatattattataattcatcaaaaataaacattaaaaaaatgaaatagattggcaccattttcggatagggaggcttcttttatttgtttgtttttgcagcctggccttgtggagtgacaaacctagagtaaagctaggctatgcagttgtctgaatctgggaaaaccaaaccccacatgaagatggccgtcatttactaaggctcccctgtacccaagcgccactccatcatgtgatgatactgcaaacaaaaatgttgcaccatacacccttcagcagccttgctgttgttggcacagtcttatacctgtatgaaatcccttcctgctggaacataggcctacttcttctatctctatctgcttctgaaagtgacggacctctggttagcatcctatttatagtaaccactgctgtatttgaagataattaagttcaactcattctcttgctctaagcattttagtcatatctgttgttcttctatagaccatcaccaatttctctacgtcattctcagaatatggaaacacttaacttgctttttgaaaaagattcagcatgatgtagccagtgatctcatttattagaaaatatcaggtgttagctagttttggtatatctctttcctataaatatttcacattcttttaatatattctttaaagagcaattataaacatttataaattataaatagtatttcatggagcatcagctggtatcatttgttgatccaaattaaagcctttccaaacctcatcatctagaggaaaaaactgcatgccatgtgtactgttacataaccatttccacagtcagaattctgttggactgatctgattaaatagcacaagagcagagagatctttgccaagaatttgtatagggaaagcagcattttctgtcattgcaaagcataaaatgctatttcaggatccattattgatgcattcagttagcaggcaaaacatgtgagtggatggagaattgagaggctgggagggaccttgagaggccagagagtagcacttgtatgattcatccaagacagatggttgtctatttcattcttaataatctttaggtaaatggattctaaaattccttcagtaatcctcctggcatctaaaccactttttgaaatgtaatttttaaacattgttttctgctaacgcttatcaaaaagtaattaatgtcttttataccattaagggaaaacattacaaaggattgaaatagcagcattggtggggagaggggtacaaaatcaaagagtgtgatttagtgcagcggtgctgaaaagggctgctttttcttttacaggtcattatccagctcaggaaaacctgatgttccttgttctctgtacatgaaggagctacaaggtttcattgccagagttatgagtgactattttaaacactttgaatgcttggat

SEQ ID NO: 126741 - DNA, 1016 bp, Homo sapiens
tatactttgaaacccccaaaatatgatcagtcctcaataataaaggatctccacccttttctagcagcaagcatatctactcattaaatactgaacacacaaaacaaattgaaataaaataacataaaaattcttcccctttcccatttctttgttcttcaaaattgattgaagagaatctcaagagaagtaagagaggttggattttttaaattgtacagctagagcttgtaacttttaaatgcccattatagtcagatgtatgtttagcatttgaccccccctgccccgagtctgccatacccaccgatgccactcaccatggccacttacacttccagagtgccttattcaggagcctctccacctcctcaccttggcacagagcccatcatttgctttctcttgggaggtcagagcttctgttagtattagttcaccacattattgattaagttggattttgtgggctcttctaagtggttaagcattatctttttaaggtagttctacaggaaaataaatatattttcaggccaccaccttagaacacagcttgattgcaattgtgattatctttgtccatgaggaaagtcaaaataaattggagttgtttaacctggttatactttctatgtcctgatcaagtttaatttatctttaaataataattgttataaaggattggattaaaatctgatcaatatgagaatggttgatattttttttttcttaaatttgaaccatgacagttaagagattaactcaataaagcattccatgtccgtttccctaaaactcatgaatttagaagtaaattaaaggtcaagtgtagaaagtttttaataccacgtctactgatcatctatacacagtataattttgggcttttttttaatctataaaaaatcatagtaataccctctttgcacaattcatttcattagtgtattaggatgcctatcaaatatacatgggatttaggtttatttttatttatttctctgtctagccat

SEQ ID NO: 126742 - DNA, 1078 bp, Homo sapiens
taaagtggctgaagatgggtggaggattatgaagtagttgaggtgcctactttatacaagatactttgttaccacaacccaaatggagcaaaacctactctgtaactccaggcagcttcactagcgttttgttctcattcctaaatgctaatctgttcctttggcccctagccagtactgagatagactagaggttgggggaaggaaccaagcaaaggaaaagtgaaaagaaaatttgaataagacatagaattgtctggagatagaaatatgtggtattaccatttttaaggcattttacagtttacatagcatactttggtataaactgtattattagttccgtgttacagattaagaaattgaagctacaagtcactcagctagcaagcagtagggacggcagacattctgggaacaggagttttctgattgcttctattttttcagggaaatatacagcaaagtcatcaactgagaataaggaggagggaaggaggtgtcggagattagagaaatgaggagaaggtgaggaacaatctcctaggggcttaggagcatgaatgggatatttaacagtattgacaggcaacgccaagaacccaccttggtttagtgatcatagatttaaagtccaaccagtgagaagctcattcagcttctcacactcaggcattgacttggtttcacccaggactagaattttcctaagtgaccatgaatatatgtattcttaataccctgccccgcttgctctctgaaaactaatgaactctccaggccccagtttaaagccagtatctccacagttgcactggatcccatttcctttcaagataccactcactgctgaagatatcactcactgctgaaattgattttaatgaatcacgtaatctaatccagaaaggaaggaaataaagaagtgggtatcagggactcctgtgagatagcatgagaaggtggtacatttgggaggtctcaaggggttactgaattattggaattagaatcaaagggacggccggtgcggtggctcatgcctgtaatcccagcatgttgggagtctgaggtaggt

SEQ ID NO: 126743 - DNA, 1384 bp, Homo sapiens
tttatttaagaaaagttgcattgtgttatacatattgttttgtgaattgctcattcattttacaatatatcaagatctacatttactatgttaatacgtgcataatatattttatttatgtgtagaatagtttattttacttctgtgctcttaatgtatagttagatgatttcatagtttaattttgaaataatagggatttagcattgatgcttcacatctgagttctaagcaataggctttagttcctgcaatatgtgtttaacttagtatgggtcatgtgaatatcagctttctagatgctcttttgtaaaactgagatcaaggttttttagattttcatttaaaaattcttgtttgtcttgacagcaattgtgaggttataattaatttactaagaattttatgtttcaaatacacatatacctataggtgtaatatcataatattttatgattaaactgaacaaattatttaatggtgatatattggggatttgtttgtatagtctgaaatgtgacctttagaagaaaaggtcactagaccttacagtggaaagtttggggttttttgtttgtttttgagatggtctcactctgttggccagcctgaagtacagtggcatgatcatggctcattgcaacctctgcctcccaggctcaaggtatcctcccgcttcagcctctgggcatgccagcatgcctagctaattttcttattttttgtagcgatggagggtctcgccacattactcaggctggtctcgaactcctgggctcaaatgatccatagccttggccttctgaagtactgggattacaggtgtgagccactgtacctagccacaatggaaagtttgaattagtgtttttcttatcctctgtgtgttaaaagaaaactaaaatattagtacataagggaactgttgtggcacctttaaaatttataggcttgtaaacttttttgatatcaactttggaggcaaatatattaataagtatcccttttaaaaactgaagggtattttccaacagtaaccattatttgatggttccagggaatggcatctagaatcttagtgtaaatggcaaatgttatgaactgtgagaaaggagattggcatttaatcaggttgcagaccatttgaaacaataataggaatgacatttaaggggaggtctcaacttcaatgcagatcagtagctatgtatgaggtcaatagttctagacactaaggttttattttaaggctttgtaaatatacactttattctttatataattttataagttggagacttgacattcctatgatggaaaaaaacatacatgtgtgatatttaaatggtatagagacatatgagctcaaatatgagttcaattt

SEQ ID NO: 126744 - DNA, 1039 bp, Homo sapiens
tttaaaaaattttgtttccacagtccagaaaaggctttgaaagactcactacaaccctatgaggctgcttatctatcaaaatccttatctcgactcttcgatcctatcaacttggtttttcccccgggtggtcgtaatcctccttcctctgatgaacttgatggtattattaaaactatagcaaggtatgtattttttatatagtggcttgccataagatgactgccatatttgttagtgatatatgatagcagtacctttttaatttattttcaaattattcaagtaattaggcccacaattaaattaagaattttatagtaaatgagtgcacacatagtaagtacttgagattccaattaataaataatttaaataccttaaatatagtctaaaaacagtctattataattattctatatcttgccaaggatgcaaagtaaacctagctctttgtatcatagtaaatttcttacgttacacaagaaatcaaatataataaacgattttataaattgagaaactaaaacatacaggttaacttttttttatcctaaactccagaacgtgcttcatggcagaaataggaatataactttgattagcttgtgttcgctattttaagctttttaagtgaatgtgacagcttttaagactaaaaagggaagatatcctagcagaggtgccacctgaatgcctgcagacaatgtaattatatactgttggctttagacacttatttaaaagttatccagaccaatttgcagttgaaattatctcagtttctgtcatgactaacaagttgtcataatagtagatctgtacatttgagatggacgttttaaggaataaaaaatagtatgagactgaggtctaaattcttttaaagatttgaagatggtgattctgaggcgtggaagagtaagactaaaaagccacaggtggccaggcatggtggctcacgcctgtaatcccagcactttgggaggcggaggtgggtggatcacctgaggtcaggagttccagaccatcctggtga

SEQ ID NO: 126745 - DNA, 1083 bp, Homo sapiens
catcccacaaattttgatatgttgcgttaaaattttcgttcagttcaaaatacttctcatttcccttttgatttcttttttgatccatgggttatttagaagcattttctagttccaaatatttgaggattcttttcaggtatctttttgttactgatttctaatctaaaactattttggttagagaacaagctttgtatggcttgaagccttttcaatgtattgagaccggtttaatggaaccaaatattgttgatcttggtaaatattccatgtgcacttgaaaagaatgtgtgtttgctgttttgcatgaagtattgtgtgaatgtaaattattaagtcaattgggtgttagcgctgtccagttttctgtcccgattttctgtgtacttattttcttgattcttgaaaaagggaattgaaatcttcaactacaattgtgggcttttctattttttttaaatatagattaggtttcaaaatatgacctgcacatcaaatgcagtgaatagtcagagtggaaaattattattattagcattattataaaaggcctcattagaacacgtctttggtttgccctatagtatgggttatttggaacatatcttcatatgcaaaagaaacatttactacattttattatttttctaattcatgttcttgttttgcttggcagcttcgatgtttttgaagcaggcatttgaaggagaataccctaaattattacgtctttataatgacttatggaagcgtcttcaacaatacagtcagcatatccaagggaattttaatgcaagtggaactacagacctctatgttgacctacaacacatggaagatgatgcacaagatatattcataccaaaaaagccagattatgagtatgtttgtttaatttgacctgttagttggcatcttaattttatttttattttaaattttatcttttatttttattttaaattataaattaagtatataccaagtctctaaatatttgtagtttatttgtataccttaaaagactttgcaagacttttaactgaataagtcaatttttcacccttagttgaacacttg

SEQ ID NO: 126746 - DNA, 1051 bp, Homo sapiens
tctctctcctagcatcatcatttatatttctcctttttctgtgttggatttctccttctcttttaatttcttttcctcagctataaacctattcatgttgctcccatgtaataaaaaataaaacaaaactagaaagttcctctttagttgctgtttactctctctctttttatgtaaatttctccaaagagtagtttgcattttttggtgttcattttcattctgttgatttctcaactaggtgtaatctggctgtcttccatcattctattgaaattgttctcattaagggaagcaatgacctactttttaattgccagcgtatgttttcagttcttatcttatgggacctatctgtcttgtatagtgaaagaagctaatgacaggaaacatacaatatgtagacagaaaatcccattaatatttcaccttaggaatagcctgctacttctaataccataattactttaataacttcctttgggagaactccaaagtaagttgtttataaagtaccttcaatttttatagcacatacagtccctgaagtgtactgtagtacttcttagaattatagacaggcaatattaaggaagtgcaaccatctgcagagttgaggattacacacaatgtaacagattgtctaagtaagtaatgttttggcaaagtatatctaaaggaaaatgttcctagttaggaatatgttctttctgattatacatgttcatgcttagttaaaaaaaaaaaaagttctattagaaggtaatccaagagcttgacaataaatttacttctttttggaagtatgcttgaaaaatctagcaagtacatctctttttacatgtctaaaaccccttgtgcagtattagtctctgaaaactcttaagccactcaaagaagttgttcatacaagttagagtgctaacatggttatatatctgtaatacttggcttcccaaaccaagaatgaataagagatacattgagatatatgtgttaccagattttaaaagttttaaggcttgaaatactgtatactaaagctcattat

SEQ ID NO: 126747 - DNA, 1068 bp, Homo sapiens
tggaaatgcccttgtccgctcattctaacatctatgttaattccgggtttttgtttggttgaattttctttccatcagacctgatatttttctacttatttgcatgtctaataatttttattggatattaaacatgaacttaaccttgtttggggctgattaattttgtcatctctaatactgatagtatcagatacttaaagacagtttgatccttttgaatattgctttaagatttattagcaaattcaaagcagtaataatctgctatttatttcccagttatgaggcaacattcttcttaataccctcaaattattaccctgtgaattatgaggttttccagcctggctttagagaatagggattattctcaatcttatgtgaatgtaacaggatgttccctctaaacctttttcatagttttcccccaaactctggaagtttaatgctgatcagtgctttgctgaatactcaaagggaaccctttgcacatctctggaattctctgtctatgcgcctctgttctctccggtattctattttgtgaactctagttgtttctgtttggctgttctgggaggggatagaaggaagggtattttccctctttccgtgccatggcctggaaagtcctttaaggtaatgagctggggcactcatagggttcatctcatttgtttcctgactctgaggaatcaccgtcctatgttgcatgttaaatgtcttgaaagccatctttcatatattgtgtattttttgttgtttcagataggttggtaaatctggtccctatcatatcattgtgaccataagcaaaagttcctcattaaaatttcaatgagaaacttttgcttatggtcatgatgatttaaatagtgattaaaatatttaatgattcaaatttaaataatgattaaaagtatatttcagaatattatatgggagtgtgtgtgtacgtttatttagtgatactgccatttacttgtcagtgattatctgcttttctttctttttttttcctgagacagagtctcactgtgtccccccggctggagtgcagtggtg

SEQ ID NO: 126748 - DNA, 1051 bp, Homo sapiens
atgttctcccattataaactagaacagtgagtaaaatttgtgaaacacctgttttcagacattgggcaacaggcaatatagaactgtgatctcagataaaccaaaacaaattgaacgctaaaatcaccgcagctttctacctggcaatttccagacagctgcacacacaaaaaaatgggaatcaatatatagtctgccattcttactgattccagaactctttaaaggattacaacaaaatctgtcacttaacaatatagtatcacatattcagcatccaattaaaatgagtggacatgagaagaagcaggaaaatgagaccataaccagtagaaacagagaagctgaagtatcagtagtataagcagactaggaattttaaaacacttcttataaatgttataaatgtgctcaaatattttaaaaataacatataatgagataaatggacagtatcaagaagaatcaaatggaacctccacatatgaaaaatatagtatctgaaattaaatgcagatttaaccctgagaagaaaaaaaaaaaaatcagtgaactagaagatacagccatagacataattcagaatgaaggaccaagatttaaaaacaaacttaaaaaattattagagtcttaggacccatgggacacatcaagcaatctaacatatgtgtaattggagtttcagagccaagagaggaagggaaaaagaaaaaagttagaaaaaaatagttgttgaaaatatgtgaaacatttttgttatggactaaatgtttatgtgccacctcttccaattcatacactgaagccctaacccccagtgtaactgtatttggagatagggcgtttatggaagcaattaagtttaaatgaggtcacaagggtgggccctgatcttataggattactgtccttataagaagtgacgcgagagagcttactcactctctatgtacacaggcacaaggaaaggtcatgagagcacttagcaagagggaggccatcagcaagtcaggaagagaaactcagccctaccagaaccttgatcttagac

SEQ ID NO: 126749 - DNA, 1206 bp, Homo sapiens
atcaacttctttcctccttccttcttttcagtgttttaccatctaaatatttttttaaaacaacagaaacctgagtcctttattttcttctaaacacttttttccttcacactcaggtttcagtaagctacctggtatctctacttccctgcttctcttttgccccacacccttgatgtcaaggtttcactctactgaaaccttgttggtcagtgcaccttagtgacccagatgccaaatccttctgcccacttctcagaccatgtttacttcactcctctgaggtgattgaccacttcttcttaaatctctcctccctcaggtattcccactcttcagaattcctttattgattcctcctcctcttcatccccttccttttaaaatatttataaaatttcaaacatataccaaactatagaacccaagtataggacagtgaatacctatgtacctgccatccagtttcagtgattattaacttatgctcaatctttattttataatcatctccacccactcctctctctccactctgaatcatttcttccaccaacttttaattgatttattccctgtggcccaccctcaacattgttttcttcccatgccacatgcaatatatggaaaagctcgcacaggctaatagtttctaccacctctaaatgctgataacacttaaatctatttttttagcatagatcttgctgaaaagcagtcagtggccaggtgtggtggctcatgcctgtaatcccagtactttcagaggccaaggcgggcgatcacatgaggtcaggagttcgagaccatcctggccaacatggcgaaaccgcatctctactaaaaatacaaaaattatctgggcgtggtagcaggtgcctgtaatcccagctactcaggaggctgaggcacgggaatcatttatcatttggaccctggaggcagaggctgcagtgagccgagatcgtgccactgtactccagcctgggtaacagagtgggactccatctcaaaaaaaaaaaaaaaaaaagaggcaagcagggtcatctccacttggatgccccacaggttccagaagcataagtttaaaagagcacatctttctttgcccacctgctgcttcttcttaaattctattttggttgcataatcttcatcctcctagttcttcataaatatatttagtcctagttattaataaataca

SEQ ID NO: 126750 - DNA, 1093 bp, Homo sapiens
tttctttttttttttttttttttgagacggagtctcgctctgtcgcccaggctggagtgcagtggcgggatctcggctcactgcaagctccgcctcccgggttcacgccattctcctgcctcagcctcccaagtagctgggactacaggtgcccgccacctcgcccggctaattttttgtatttttagtagagatggggtttcaccgtgttagccaggatggtctcgatctcctgaccttgtgatccgcccacctcggcctcccaaagtgctgggattacaggcgtgaaccaccgcgcccagccactatattctgttttctatggtttatatgaatggatgcagtatttcatttttaaattagaattttaggttgattattagacattaagaaattcaatgttggtatctttaaaaccagttaagagttttattatcactgtctaatcaccagtactatataatactttgcttgaaagtgagtgtagcaaattattgacaaattattaaggatccacacattggaaaacaggctgtagattcttatttgcaggattaagccagcttagctgtgtgggggattatagatatgatactttgattttctaagccagaagtttttatcattaaacagaatcttgtaatcatgtgtataggatgcattaaactaaatttggagagcattcagcattttcagttgctgtactaatgagaatcgtaactatgaaaaataatgtgttttcttttacccttttagacatatcaaatgatttgaaaatagcattaaagactgtaactcaaaaatttaggatatccaaatttgaaatcttttcaatattatgagataaatgttcaacttatttatctatggaatctcaatttgattaaaatattgaatagggataaaccaggtagatttctggttttttttttgttttttttttacaattaccttgcaaaggaccattttttttttcaattttattattattatactttaagttttagggtacatgtacacaacgtgcaggtttgttccatatgtatacattgtatacatgtgccatgttggtgtgctgcacccattaacttgt

SEQ ID NO: 126751 - DNA, 1037 bp, Homo sapiens
tttatttaaaaaaatatagatggagttttgctatgttgccccagttggtcttgaactcctggcctcaagcaatcctctttccttggcctcccaaagtgttgggattgcaggcatgagccaccatgcctggcctattatttttatatttgctatataaatgtgaccttacgtaatactgaatatatataacttttaagttgtactggataaaaagagatgaaagaatcttaggtcttaaagagatttttaaaggttaggcctagcctctgaataggtttgtattgaaactattccagaaagagatctttgtaaagaacttgccagaggagattttactcttggcttttcccagcaattattctcagaaagtttgatataatgtttaaatttccaggagcagtttaatctcattcccccttgtgtcgtcaagaatggggaaaaaaatgaaagcagttattcatgtgctgtcaatcctaatgtatgcctcttttgttgagagaattaaaaaaagctgccttattaccatgtgttgacaagtggataccatgatttaacacagaaaccttaagcatcagttctttattattttctttaaaagcataatcacaattattgtgtgtgtatatatatatatataaatttttttttttttttttttagctggagtttctggtcacccaagctagaatgcaattgcacgatcttagctcactgcaacctctggtgcctgggtttaagcaattcgcctgtctcagcctcctgaatagctgggattacagaagcccaccaccatgcccagctaatttttatatttttagtagagacggggtttcatcatgttggccaggctggtctcgaactcctgacctcaggtgatccgcccacctcggcctcccaaagtgctgagattacaggcgtgagccaccgcgcccagccaattattttatattttaaaatgttttatagacagtattaatgttagtttcctgatcttgtttatattgaagttatgtaggagaatgtccttgtttgttgga

SEQ ID NO: 126752 - DNA, 1007 bp, Homo sapiens
ggtcagtgaaatataatgaataagtctgcatggttcagctctcagtcaactccacagaattaatttattgtcaaacaaatgtagaaataacaaatgttatttctaatatggttctttttatagggattggtggtagattttaaataagctcgaatattatacaacagactttcaaacttcttgttattttttaaaggaggacaaaaatggtaagggggaaaataatatacatagtatttaactttgtattttatgaaataaagtttaaaaataatcttcacttcaaaatgtgttttttcttgtctttgataattttaaaatatggtagtatttaaatatgataggactgctgaagtcctgcttaaagttgtatatttatgttgattttgtttgttttcctatttatatctgtttccaccccaccccacctttttttaagaatccaactcaagtcggaacagctcttcaggttttctataatcttggaactttgaaggatactattaccagtgttgtggatggatattgtgctactttagaagaaaatatcaacagtgcattagacataaaagttttgactcagccttcccagtcagctgtgagaggtatggatgtggtttatatttagcttctttatttatttataactgagaagtcttttgaatagtatgtgaaacactcatgtttcaaagcaatctaatgactcattttttagtagacagaaaatgagagaagaaattatgtttcagaatttatttatatcttttttgtctaatcagtgaattgaactggccaactggtatattcagaacttctagataaagatccataaactgtagcgtcatttggttgagaggaaacagatgcaaaaaataaaaaataaaaaggcaaggaacatatttttcttctaaaatccttatcctcccatgtacttcttaaagacagaaaatattttttaaggaatgccgtctctactttagctttctggacttttctttatgataatt

SEQ ID NO: 126753 - DNA, 1010 bp, Homo sapiens
ataggcctgagaaagcatcaacataatcaagataataaacatatttatcactcccaaaagtttccatgtgaaacctcccttccacccttctctgaaaacccctccaggccccagggaaccaccaacctacattttttatttatttattttttatttggagacagactctcgctctgttgcccaggctggagtgcagtggcatgacctcagctcactgcaacctctgtctcctgggttcaagtgattcttgtgcctcagcctcccgagtagctggtactacaggcacgcaccaccacaccctgctaattttttgtattcaagtagagacggggtttcatgatgttgcccaggccggtctcaaactcgtgagctcgggcagtccgccagcctcagcctccagaagtgtcaggattatggatgtgagccactgcgctcagtctcactaacctacattctactttgcattttctagaaatattttgcaatctgtgtcatctgttcattgttttcctgcattcttttcattatttttaaattttacctcatttgttgacttattagctatagaatcttagtttgttgttaaagggttcatagtaaacaattctaaattatcagtgtgtatcttccttgcattcccagaagaaattcctcatggtcatggcatattattcttttcatatgttgcaagattctgtttgctaatattttcttgatatttttgcatctctgctcttgagggagattattttgtaggttttttttttttgtaatgtctttggtttttgtattaaggtaatcacatttgctagtgttttgaagacttttgtgtatatctcttgagggataatgttctgtagcattctttgtttccctacttttgggaaatgttccctctctcattgtatagaattgatttcttttttcagtgataatgaaaacatctgggcctgttgatttcttattcagaatgttttaaactacaaattcagttcccttaatgttctaga

SEQ ID NO: 126754 - DNA, 1028 bp, Homo sapiens
tgttccttttagcatgtaaggtagcatttcacaaattctgaggattaggttgttggatatccttagagtacattaatatgcctagcacagatggcagcacttcccaaattgttttatagattcagtgcagtccttatcagaatccgaattggtgtttgctgcagatattgtaaaatgatcctaaaattcatactggaatgcaagcaacccagaatagctaaaacaaattctaaaaagaatagccaaaatcaacttgagaaagaacacagctggaggacttacacatactgattttaaaacttagtacagagctacaataattcatacagtctggtaatggcataaagatagatatgtagatcagtgaaatagaattgagagtccagaaataaactctgacatttatagttaattaatttttaacaagaatgtgaagacaatgtaattggtaatgaatagtcttttcaaaaaattgtcctgggacaaccagtgtctacatgcaaaagaatgaatatatatcacttcctcataccatgcaaaaaaggaactaaaaatgtatcatatacctaaagatctaaaaccatacaatctgttagaagaaaacatgagtaaattattgtgaccttggtttctgagataaaacaccaaaagcacaagtgacaaaaggaaatgagataaattacacttcatcaaaatttaaaacttttgcacattaaaggacattatcaagaaagtgaaaagacaatccacagaatcagaaaagatgtttttaaatcatgtatctgacacagggtgcttgcatacaaaatatataaaggacccttacaactcaaaaaagacaacccaactgtattagtccgttttcatgctactgataaagacatacccaagagtgagcaatttacaaaagaaagaggtttaatggactgacagttccatggggctagggaggcctcattatcatggtggaaggtgaaaggcacgtctcacatggcagcagatgagagaagagaacttgtgcagggaaa

SEQ ID NO: 126755 - DNA, 1083 bp, Homo sapiens
cattataacttgtgcaattcaatggcttttagtatatccagagagttgtgcaattgtagccataaactaattttagtagatttttattattccccgaaaccacttcatacctattaacagtcactctcctttcctccccaaaccatgcagtcctaggcaactaatattctagaacaaatattctgtttcacaggtttgactattgtggatatttcatataaatgggataatataatatatgatcttttatgccgggctctttcacttagtatatattttcagggttctttcacattgtagcatgtgtcagttcttcattctttgtaattgccagataatataccatgtatggatataccaccttttgtttttcttttcatcagctgacagacatttgggttctgcaaatattttctctttttctgtgaattgtcttttctgaagtaattttattttagtttaaaggtaatacaatttgagagatataacatcctattttcatggacctgcagcaagggaaaacccttgatgttgcatcttttaaacattattatagactcctctcaagcttggaaagagattaggatgtataaattaaggaactggagagttatactgctaggtcagctattttattacagtagattccagactgtatctctaaattttgttctttctttctggtgtttctttttccagcttttaaaatcttgtatttgtattctctgaaacacatctattatagcgtattattgggtctgccatctacccaaagagtctgcaaccctaaattatctctcttggtgacagattacatgctacaagtttctcgtatagactttttttttttttttttaggtgaaattgatttaaacctcagatgagactgtatttccagaaggtaacatgtagccagaggcatatatgtgaaagtagggagggaacatggttgacatactgttgggctgatgtttacctttagtgcataagtatttaaaaaaaaaaaacaacaaaaaacctgtgggttactcctgacacatacagccatatcaagctttctcttttgtcaaggccagatgtatt

SEQ ID NO: 126756 - DNA, 1078 bp, Homo sapiens
tgagccactacgcttgccctacatttctgcttattagtttcagttataagaaattatgagggtatgtgtgtcacaatccaaaaagaagtactctttaagactgatgcttttttaaattgtatttttggtcatccaaaagagttgtgttactcaacttcaattcaattttgatgtgtttcttatgtgaaaatcgctattcttttattacaggagaggcatagtccttgctctttagagtttatgatatagtatttgatgatttgggatatgtaaaactaagagaagtataaacataactttaatatgatcagtattcaaaaagatattaacaatgtgctatgaagtttcaaaataaaccatattgtttgaagaattagaacaagtttcattaaataaagtagggggtgaaagaacaggtataattctgaaaagcagggttggagtggcgaaaacagtgtaagaaaactgcaggtatctttcagcttataaaatcctgaaccatttggcctgtgcaacttttcatggctaactttttacttttaattattgctctgagcgatgataagatggacttgaataatttaaactctgtaaaaataatactgaataatttagactctattgtaaaaataaattatatgattaatttgctgttctatcctgcaaccagccagtttactgaggataggagattgtggtagtattagctagactagaggataatatagaatatagagacttatagaactgagagggacatagagagaccagttaattcatcatccccgttttgaagattaagaaacaacagagagataagtgcccagttttctacacatatttactctgatggaactgttcctgtgtaagtctatgtctttcaactgtcagtccattaggattatttgaggtaggcgtctaattcatttttgttaaggtaactgaatctgaaatatttaatttgtgcagaatctgtagattcctacaaacaaatcagtccagtgctttccctgctttctgtgtctcttactagagatctcatttatagctcacctagaagacggtagagaatatatga

SEQ ID NO: 126757 - DNA, 1175 bp, Homo sapiens
agaaaaagagaaacagatgtcataatatagcttgaatttgaaataactgggatttaatctaaactaccaatgacctggagtttcatcttatagataatatatggttattgacagagtattatgagatactgtatgaaaaatgctataatgcctatagcctctaatataataccttgtcaagtatgtgtgtttgtatgtaaatatgtgatatactgaacaccttatatataactgtatcctggttaataacttcaggacacttttcctcttcgtatgtatattatcgtgtgacaaagtgaaagtttaaaacaacaaacatttatgaaattacatcatttctgaagaataatagccccctaaagatgtccatgtcctatttcctaaaacccccaaatatgttacattatgtggtgaaagagactttgaaaatatggttacaattatggacctagatatgggctaagtaatacatgagaccttaaaagtggagaacttttcccagctgatgttggaagagatgagtcagagaggtgaggcagaagggtgttcagagagattcaaagcgtgagatggaagtagggagctatgagccaaggaatgtgggtggcctctagaagctgagaatatcccccagctgacaggcagcaaggaaaccagaaagtcagtgctgcaactacaaggaactgaaccttgtcaaaaacctggctgaatctggaagcagttctttcccagagcctccattaagtaacacagacagccaataccttgatttcaggtttgcaacacccagagcagaaaaagccaattgagcccactggacttctaacctacagaactgagatagtaaattgtattgtgtagagccactaattttgttgtaatttgtcatggcagcaatagttaactaatgcaaaggggtgggaatccagaagtggcttagctgggtgattctggcttaggacctctcatgaggttgtagtgaagttgtcagccagggtgtgactgtggtggaaggatgtactttcaagctgactcacatggttgttggtaggcctccattcctcaccatgagggcctctttccagggctgtgcatgatgtggcagctgacttcccagtgtgagtggggagagagagagagacagtgagagcatgtgggtacacagtatagaagcc

SEQ ID NO: 126758 - DNA, 1129 bp, Homo sapiens
gttcaggaagagagtcatttagctaatctatgagcttagctttgcttacttacccaatttcatccttgttagttatctatatattcctcagattctcattattaataccatatgcagcaattctcaaaactcacatttaaaaactgggaaaatcttgaaattcctattgtttatatctattgaatgtactatattaatatgagagatttaactcctgtactttcagttgtaatgcttactcacttttattttgtagacctgtgactattgttcagattattttgaaaatcaccataggaaggtctgattgcttggttaaacatttaacaaatattcattacattctgtgtgtccaaaacggtataaggtgctaagggaacaatgacaatgcatttgtagtttagtaaaagatgcagatgaatacactatgatagtatacagtaagtgcagtactaaagattaagtataaggtgctatgcaattacataagacagacactagtctgcagggaaatgatcatggaaggctctccagaggaagtggataaactagatatgaagaatactcaagtatttgccagatcaaggggatgggtgcttgttcagattggtgaaagtgtatcatacaaagagacagcctttcctagaagaaattaaagatggggaatacaagaaaagaaggacagtgtattagtccgttttcacactgttgataaagacatacccgagactgggaagaaaaaacggtttaatggacttacagtttcacatggctggggaggcctcacaatcatggggaaaggcaaggaagagaaagtcatgtctctcatggatgataggggccaaagagagtgcttgtgcaaggaaactcccgtttttaaaaccatcagaaactcccattttcaaaaccatcagatcttgtgagacttattcactatcaagagaacagcatgggaaagacccgctgccacgattcaattacctcccaccgggttcctttcatgacaggtgggaactgtgggagttacaattcaaggtgagatttgggtggggatgcagccaaaccatatcagacaaggaagcgttgagagatagggccaaatattatatggccatccaagccatattag

SEQ ID NO: 126759 - DNA, 1002 bp, Homo sapiens
ctaaccagcagctctcctttcctctccttgatagtggtttgcattggtgttatggtttatgttggggaagaaaaaatacaaaagaatctcttcttcatttttcttatgatactatgggtttaaaaaactataatgtgagttaagtagcagtggcttcttcaggatcatccttatactaagaaacacaaagggcattaggtgttttaaatatagatgagtccatttatataaaaaatactttaaagaataagattacttgtaaagaataaagacgttaaaaaactacatgttcttacaacaatttgttctattattttttccctgtaatacagttattcctcccccgttccccacacaacagatttgtaatgtaagaatagaatcatggtgcagcctgcaactcccagaggtaaaacacacagtactagacttccatctgtagattttacttttcagatttcatatcattttctcagagttaaattcaaatttaaaatcatttaagatttcaaggattgtattcatgttgttcttttaagtggtttcatcatattggattctgtgtttagatattttattaagcataattttattatttttcaattatatacactaggcaactgcttgtgtcttaaattttaattgcttgcttttgtcatattgaattagttttgaaatagtcttttactgttgaatatttcccttttgatgaacttaaaatagtatcattaatgaattttttatctgagtaaatttcttatttgttttgatttggatatttcacatatacaagcataactcagaattattcaaaattgaagagatgtggtatgaatcatctgaaggatcagtaatacaataatttaatatttttaaattcatgtttgacattgcacttggatttggaaacatttagcctagaataaagacagtttattggtattataagagctgtgttaagtatttgaatcttttgaatcacaaatgaactcttatactagt

SEQ ID NO: 126760 - DNA, 1067 bp, Homo sapiens
ccaggcaggagtacagtggtgctatcacagctcactgcagcctcaacctcctggactcaggcaatcctccttcctcagcctcccaggtagctgggaccacaggtgtgtaccacagtacctggctttttttatttttcccagtagatatggggtctccttaggttgcccaggctggtcttaaactgctggtctcaaggatcctcctgccctggcctctcaaagtgctggaattacagtcgtgagccaccacacctggccctgttctattaacatttaaaataaagataatttttttttttactgaaaaaaagagttgtgaaatccttgcctataattgcagatttgtcagttttagttttttgacttcatctggtttttgtttcatgtgtttttatcgggtgcatgcacatttaggattgctatgaaatacatgtctttgtgctcaatgataatccttttctcctgtcagtaaagctattccaggttcattctatatagtttgcatcatatatatagactattttttaaccttcacttttaacttaacttgtttatttttgaggtgtattttctgttgataataatggtttgtttttgctttttaaatccaatttgatttttgtcttttaattagagtgcagagtatttgcatttaatctaattttcatatggttagggttacatcttctgcctctcatttgttctgtttgttccatgtattccttgttcattttttctgtttcctacccttttttggattgagtaatttttacatttccattttaccttctctgctgacttattggctgtatatatataataatataaatgtgtgtgtatatatgtacatataatatatgtatatataacatatgtacatatatttgttatatatacatataatgtacatgaaatacatgaattctcactctgttgcctaggctggaatgcagtggaatgatcttggctcactgcaactttgacttctcgggctcaagtgatcttcctgcctcagcctcctgagtagctgaaactacaagcacttaccaccacacctggctaatttt

SEQ ID NO: 126761 - DNA, 1056 bp, Homo sapiens
tgtagatcagtttggaaagaaatgacatcttaacagtattgagtcttctaacttatgaacatagtatctctactatttttagggcattttacatttatttcgtcaatattttgtagttcttggcctacagatcctgcacatattttgttagatttgtatttaattatttcttcagtactgttgaagtagcacctaattttttaaaaaaatccaattgtttattgttagtatatgtaattaggatcatattgaactcatatcctgcaactttactaaattcatatattagtcttgggagttttttgtgtgaattccatggtattttctatatagacaattgtctgcaaatagagatagtttactttttcctgaaacatgtgagacttacttatattcttgccttcttgtactgcctaggacctctggtattaggttgaatgggagtgtgttgggagaaacaatccccataagccctgaatatccctgaacattcttgccggatatgctgagaatgcaaagccctaacagaactaccctttactccatccatttctcaggaaggggttgtagctagcaaccttgaggaatgaagtaatgacaccctagacaaatagaatgcaagcagacttgcttttctttgttataaaaatggcaactttcccaagctcagtgctcttcagctgtgaaaaaacccgtagtatacagagcatccacagtccctttgccagggacttggagggcaaggtgaattttcactgatatcatgctcatactgcttgctgcatcatgggtaatacagttctttggttcggacccaggcatcttacatcttatgttagcatccatgaaacagtaacaggctagcttcacagcttataaatagggtagaatcccagaccctaaacaatttttgacatttttggctacaagcatatgatgttgacagagataaggtttcctgaaagagaaatgacagggctcttatgggctggtttagaggatatgagaccagtagcgaatgctcttgtttaagtggtggggtagtagtacagagta

SEQ ID NO: 126762 - DNA, 1070 bp, Homo sapiens
ttggcaaattgatacatgatatcattgacagattttgacatgaatttttacctgacaacagtgaagtagctgtgttttatttcatgtcttgtaggaattctttcgttttctctccaatacttcaactgcatgcattatgagatttagttggctgatggatttctaaagaacagtacataatatttgtatttgttttgctttaaaaagtcacggccaagaggaatttcctcagatgataggaattatgtttccctttgatggagtacatgataatatttctttattttccagaatatgtgaaaacaaaaaaggaaacataacgtttgtagcttctaaaatatatttagacatccttttgttaccattgtaaatctgtttttaatagcagtgctcactattttgaaatgatttcttgatcacataacttgctttatattataaatccaggccatgtccttttgataaaaaccatctgctgtttaattttgtttgttttcattagaagaggatacataattggtcataaaagtcagatagaaaaatccattagtcataccaattgatatgaatatctgaatatttagtgcagaaaacacttcctaaatcttccttttgtgtgctgataaagtattttcttttctttttggaaattcatgtttcattatgtcttccagaatcagtaacttccacaattctggtatatgaaagtataaacttccccttttaaaaattcttttcaggcttttacagttatattgtttttctttttgtggttattttatgtagcatcttcttaggatacagttgattttttatattccatcagtaatgtagacctattccctggttttaactccttaatgtcttaaagtcgtgttacaagaacatcttgcagttcgtagttcagacagctagggagatgctcagtcaattgcattcttcatattgtcagttgtaaatactgaattagctgctattggcccttgtgaaaagaagaaaattggttaagaaatagggtttttaataatttgtaattaattgcaagttactttagttttgtttaaaaacta

SEQ ID NO: 126763 - DNA, 1841 bp, Homo sapiens
aataacttattgctaaatttctgatagtgatattgacacttatcgatagattattacattataacaattggaaaatatttgtttgatatgaggttcccaattcttgtaatctgtagttagggttagtaatttcatgattttcccacatgaattgagggtgggagagaaaaatgcctaaagttaaattaagtgatggtacggtagaaaagtgacaagacttattgttaccttagtgatttcagtgtggaaataaaacaactcattttgaattacttgggagctatgatttggtgggaacattgtataaagtgtattaccctaaagttgtatgtatctaatattagaggctttgttagacttttctataatgatttaaagtcttttttttttcattcctggtattcagatttgggtagttaactttctattatacaaaagagctgagttgaataaagttaggaagtcagcttattttgatgtactgttctttttttttttttttttttttttaaaatcattgcactatattaatccagagcatttggcttagacttaagcaaagtgaggaaggaagaaagaggctggtgttttagtattcttccttccctttagtttcatttcatttgtatattataggcatactgtccttgaacttagaaaatcaatcttttttttcctagtaagcatgaattttaaagtttctctattttggtgtgtatacagaggtttttttggttcattaattttaaaattttgataaattctatgattttttacatttaaaagaataaagcttcatacgtacttaattatttgtgatgcatcaaatatagcaaatacactataccaggaaacatagcatagtggtatggaaaatactggattgttttgagcccataattttggtttttagattaaaatgctactccagttgtaatctaaatatatctgtagtttgtggcttagaaacaatgcattttaacttaaaaaataaagcaaggatacctatgtcagttacattttaaagttatacactgttttaaggctatgtatttattccttaaaaaatatgacttacatgaatattttctgttggacataatattgacaaaatatacacatgatagtactttaacaaactgccatgcaacaaatacattaagtaatgaagaaattgaatatatatgacctatctaattgacattcacattgaaaatttacaacataaccaatacttaaaatatttttcttatatttggcagtaatatcagtttttacaatttaaatttaaaactcatttgaatgtggatttggtgaaactgagacttttctctagtctgtgacaacctgaggcactaaacatttttctcttatttcactatcttcaaaggtaatttttttgtttcttttaggatctatccaagagttgtgtattacagcattattaggcaggggatcagcttctactatagaaacaactcgctttttcattttacttttcaagaccttttgaaatttttgtctagtgaatgcatataatagagggtgaaatatagttgttccataagccatgactaaaaaacacaatcttaattttactaaaaggtcacttgggcctaaacataaaatggtggtatttaaaacagaaattggtgtccagcagagaagaaatgtagaaataatcaataaagacatcctgaagactctcttttgtctttctcgtcgttcacggtgtcgtttcacagctcgccggagggcaattattacagaaactgaagttcttacaccaaagactacatttctcccaccactgctttgtgacatgtctgtagcctcatgtt

SEQ ID NO: 126764 - DNA, 1121 bp, Homo sapiens
gtattgtgtgcatttaagacagtttttataaagtaggtagctacagtttgctagcattttgttgtttataagaagtgatagttggaaaaaatttaacagcaaaagaaaagacaaagctttttaagaattgagagtgagacttttaaagtacagagtatgtaaatttgatattttatatttcaacctgtcctaaggcattagcaatattttggatgaaatatatatctttgattcttctttacccaatcaatatgcagtatacccaaccagtgtactcagtttatagtatatgacgtatgggattgtgtgtaatattactggctgattgaagtataaatatgttaatatataattattacctcactacagtcccatatgtatttctcactcctacagtctacgtttaatatggccagtgctctcatttgttagcattaatattttaaaattttatattaaatttaaattttaatttttcaaatcttatgagtattatgtgtccacagctgtctgagggaaaagcagtttccccataaccttgtcatcctcgctagccactttctctcttcatcctgagaaattggttgatgtgctttggtagtctgccttgcttaatacctctgagaaaaatatgacatattgctctcatggaagcagggtgatgaaaatgacctcaatcccagacagacttagctcacctcccttatcttacttgatgcttcggggtttgatagtggcagggagttgatattggtgtcagtgacaggaatgacagcacattttaccacttgctggtgcaagtacaaagctgtcatatttgaaagccatggatacagcttatggaggcctgtagaaaatgtatgaatagaatgggagagacacgtaggattattttcacatgttgttttaatatgagcaagggaagaaatattattgtgattacgttcacttggctctttttgtcctgaaaaaaatgagtatttcttaaaagttatggcttttgtattagtggtaagcccacttttccatttgtttccacatttcaatgccattttgttctaaatatctgtaaattgtaatatttaatatttattctgcttgttatgatgcattgtttgttg

SEQ ID NO: 126765 - DNA, 1415 bp, Homo sapiens
aattattttagtcatactttttttttttactggtatagacactgttttgatcatccttaaacatacatctttgcacagttgttcaatttttttccttatgatacattttagaagttgaatttcttggtcaaaggtcatgtttgaggtttttgcttaatatttcaaaataaaatatattttgtgtagtaatgtgaaaaatactcataggtttatcaaaattattagtcataagcatttaaaaattatttgctagccaggcacggtgcctcacaccttaatcctgatacgtcgggagtcccaggtgagaggattgcttgaggccaggagttggagatcagcctgggcaacatagtgagacccccatctcttaaaaaaaattaaaaattgtttgccaagcacatatgaacattggtatattagttttaaaatttattctaatttggatttgtttttgctgtatgtggttgaacagttttgtgtttgtcattctttttcattgatgagttacctgtttgtattctttgcctattttccttttgccatgttggtttgtaactattttttatacagtagaggtaaatttgctttactacataggttgtaaatgtgtttcccagtttattctttgatgttttaggtttaattttagaagttttataattatacttgttaatattttacttaataatggatttatttggttcctcaccacaatattacaaaaatattcacctccatattcttggatatttttatgattttacttttatctatctgctatttttttggtataacttaggcacatagcaaccacatctcacaactctaggcagtaccatttactgtcacatagactataatgtgaactgtgcctcctggagttgtacaactcactgtctttgggaatggttaagcattaaaccctgtttttccattgtttagttacttttccaacactacttaatgaataatccatcacttcaccacagatttgaagtatcttatttttcataataaattcttacatttgcttgagtcttgtatggactttctattgcagttcagttgtttgtctattttccttttttaaatcctgggattatggtttttgttgcattttagttattattcacttattactatttacagctagatttttttagtgttttcttttttatagtttttaataggaaaatataattggacgtacgcattttccactggcattttttttccaagactgtgtctttgagtaatttgtaaggcatcttaattctacatttgaaaaatatgaagacattgctgcaatatctggatttgaattgttttctgttatatattatgttgtattttaagtctcggtgatgtatctggttgaagatttgtgatcaggggttgaaaatgagcagaattgt

SEQ ID NO: 126766 - DNA, 1782 bp, Homo sapiens
aatgtaagtctgtatctatgggacttggaatgggagttgtggtagtgagtgccattagacaaaaatgaccagacttggaattcttactcattgcaatttctataattaaaagtaaatctttctttggttatttctgtcgccttcaaatgcagttattcatcgtttaatgatggggatatgttctgagaaatgtgtctttaggtgattcatctttgtgtaaacatcatagagtgtatttacacaaacctagatgatgtagcctactacacacctaggctatatggtatatcctattgatgttgctgtattgaatattgtaggcagttgtaacacagtggtacttgtctacttaaatatatctaaacatagagcaggtgacatattatgctaaggtcactgtggctgtgacatcgtaggcaataggaaattctcagctccattataatcttatgggaccactgttactaattaaaacatcattatgtggcacatgactatggtgtgtttttagaagtgctttatataggtttagagcttatctgctggaaactatgcctgaccagttcactctgccattagtggaagctagatgaaactaatttgtatttgcctgtttctcataggcactcaaagactgtaaaattggatatgcattgtaaatttaaatcactttgataacaatctgtgtaggttgagagcttatgcattatttttagtttgaaattggaggtaatattaaatataaacttaaattttatgtatataaaatttctgtactcccaaagaacaaacggatataagaatgttgtcaagtacctttactttggtttttggggtctattgctattaaattactttgttttgaaaagatgacatgtcttgtggaaatttttaatactcaaattagtttcatgttattatttttctagctatttaacaatttattttctaaggcacatctttcccttatttagaagaacagcagaagatctgtgtcccaatagaagttgttctttctttttgccaaaactaattcaaagtagcaacacctttttcatagtctttgaatatatttaatatggggattctaagagattctagatgttgcatgtgttgaactcatgggtcttgtcactggtttaagttcggtcttgtttctatgacaagaacagtgttgtgctttctagaagatatcatctaagcctgtgtcttccaatgtgactttagccttgtggtgacattatttagggattgagatttgtgggacacaggcagttaagcaaagagagaggagtctaaaattataaataagttctgttttacaatgagaaatttaatttattcagccttaagttatgttcacatatttagatattctttgatttcaagagaagtaagggcttagtgataatagctattctaattgatggatttactcatagtggtaatatttaatgatacaattgctcagtattttgaactctaatgcttttgatcctaacaacttttgaggctaaaggatagtatcttactctgttttgtactgctgtaaagaatactacagattatatagtttataaagaacagaaatgtagtatctcacagttctggaggcaagaaagtccaagaacaagttgttgccattcaatgtgggccttcgtgctgcatccttacgtggtggaaggtagaagggtaagagagatgaactctgtgttcctttgtgggataagagcagaagtgagagaacccactcctgcaaaccctttttatagcagcattgct

SEQ ID NO: 126767 - DNA, 1070 bp, Homo sapiens
gctgatactatgcctagaagattttaaaaatttatttctttgttcattcttttctcagacatttattgcaggaccttgacagtcaagagtttaatgttcatggttttgactattaaccagctgcaaagtccatgatgcagcagttcataatttttcaggcaaaattttgaatagctagtgagtgcacatagaactgcccaacacttttaatgtggcttggtggttttcttcttttcactgggtacccacttatttttctgaagtggatatatgtagtggcatttgtactttgtaggctcagaagtctttaattatatccatttcagatatcaagagtctgcttactcttgctattgtgctttgaaagcagttatgccaaaatagtatcagagaaatgtacattacatgttctttctgaattttcctgtctttgattttttgattatatagtcatgctatgctgtaatgcttattccatattttttgttaatcaaggaaatccttcacaaataatgcttcaacagcattgcaattgtatactgctgaaatataggttttgcttaggaaaatcattgggaatatctctaacttgtgatttagtaggcttggaaaatgtcatataaaaagttgaacttttaagctgggtgtggtggctggtacctggaggcccagttacttgggaggtggaggcaggcagaattgcttgaggccaggagtttgagaccagcctgggtgaacagaacagatctcctcttggctctaaaaagtaaaaattgagaagtaaaggaaattaaaacaaaataaaagttgagcatcatagcatgtgcctgcagtctcaactacttgggaaactgagatgggaggatcactcgagcccacaagttagaggctgcagtgagctgttattgcaccactgttctccaccctgggtgacagagcaagatcttgactctttaaaaaaaaaaaaaagttaactttaaacaatgaataatgcttgtgtgttgttttcacagtattatctaaacatagaagggtaaaaatccaagtatcagccactgttttgctctatc

SEQ ID NO: 126768 - DNA, 1077 bp, Homo sapiens
tcaattaacactttaatgcaccaggcgtggaccatcaggaaatgtcctctccctggcactggctgccaatttatcagttttagagaggcaatgtgataacttccaaatcatcaaccgacgttcctagtgggtggggcagtagccctctcctgccccactcttgactgtctaactacctgcaacaataacagtgattgtttttgttaagtgcatagttgggacagagatacgagggtgacttttcaatgttatttctttttatttcttgaattttgaatcatgtgcttgtattatctattcagaaaacggataatatttaattaaaagataaagatgccccaattgtcaatttccatgggaaaaattttcctttggcattcctttttttttttttttatttaagtatttcagattagtttctctgaaaagcagtcaggtaaacatgtttaatacttgattggctttgacttacatgtgtttgtaaatatatgtttgttttatgtttgagtatggtgtatgcatacatacggtgtattgcttgtgagtgcatgggtgtggctgtgtgtggctctggtgtatgtatttatttcacccataaaagaatgtttatacctggaggttcagggaccctggcttctcagagcttttaattcttattgccaccatgtagaatttttctccttaaacaggggagatgtccttgcttctcagttagccttggggccattcaaaaatggttgtgatgcagcagtatggaatgtctctctttcctttgtaatcactactgaggctgaagatcactacatgttggttattcagtatgtcaccctctaccacactctccctcatgcaactgctgtgaatccagcttctgtaataaagtgtcctaaaatacatgaacctttatttcttatctcagccttttgatagctaaagacctagtattagatctgggaaaaggaataggaagtgtgtgaaatagttttgttgtttatgtgctttctcttttataatttattagtgattaaaaatcaccacgcatggtggctcacacctgtaatcctagcactttgggag

SEQ ID NO: 126769 - DNA, 1060 bp, Homo sapiens
tcatacatctcttaaaatataccaccctctaatgtttaatcttgccaaaaatactaaacttaaatctgatgaagctgcccgcatccaactactaatttacaggtaatatagaagatagaggaacttgttaaactgcatcaagggaatacagtcaacaaaacccagtctgtgggaaactttaggacagatgatccaatatattcaacaaattgcaatgaaaaaaagagaaggtgagagaacagattaaaaacaagaaaaattaaaccatagcacttaggtatttgtacttcagtaataaaaaaaaaaagtaaggaagtgattaatgtaaaagagtagtggtttctcttggttggcatgaagggtaatggcattgggagggagtaaatgagggcttctgtggtggctcacatgatcctgtctcctgatctgtgtgttgcttctaagttcctttagctgtgtatctctgagtgtggttttccatgcttgtgttatatttaatagtaaaagtctaagataaaaaaacagggagggaaaggaaattgattggaggggaggcagctatattgggaaatggtgagaactgatgccttatagatcaacttataatagcttagacttattaactaaggattttattaaatggtattcccagaagattcaacataatctgtaagtagagagccattaaagtttactaaaaagggggttggagtgctgaaaactgtgtttttttttttttttttttttttttgagatggagtttcgctcttgttgcccaggctggagtgcaatatcacaatctcggctcatcgcaacctccgcctcccgggttcaagcgattcttctgcctcagcctcccaagtagttgggattacaggcatatgccaccacacccagctaattttgtatttttagtagaaatggggtttctccatgttggtcaggctggtctcgaactctcgacctaaggtgatccgcccgccttggcctcccaaagtgatgggattacaggcataagccactgcgtccggcccaaaaactgcatttttaagaagataaa

SEQ ID NO: 126770 - DNA, 1010 bp, Homo sapiens
caaatgaatatttatgtgatattttaatgctggcatttccttgctatgtctatggaaaagtcccagaaatgaacaaacctagttctgtgaatgtggtcttgaaatgctgttttctgcctgggtgcagtggtccattcctataatcccagcactttgggaggccaaggcaggtggatcacatgaggtcaggagttcgagatcagcctggccaacatggtgaaaccccatctctactaaaaatactaaaattagtcaggcatggtggcagacacatgtaatcccagctactcaggtggctgaggcaggagaatcgcttgaaccctggagggggaggttgcagtaagccaaggttgtgccattgtactctagcctgggcgacaaaagcgaaaccgtctcaaaaaaagaaaaaaagtaatgctgttttctactaaaagaaaccagggcttctttgagaaatctttgattccaggtctggggcatgaaatgtataaaatgatcctggaacatttttataccagataccaaggaggctatcaacgactgctcggttcatgacaaaggaactcaggaactgacttgaataggctttgggtgaccagctattttagttttactactgaaagtcctaaaacttgggaaacttctcagtctcaggcaaagtggtacagttaatcactctcagaggcttctgctggccgaaatggaacactttgagcatcaataaggataagagccatgatgggttgggcatcccttattatgtttaaatcaatttcataatgatatcaaaaaaaaaaaaaagcaaaaccccagaacacccacctcccccccgccctcaccgactaatttttcattattggtgaatattaggaaattatttcttcattttgaaaactaataagggaaagattaagtatttatttttagttttcagtatgaacaatactcctaggtaaacaaatagtcaatgaggtaaagtttatttttatagagaaatttcatatgcttat

SEQ ID NO: 126771 - DNA, 1047 bp, Homo sapiens
ttgtaagcctagagagttgtagactaagctgtggactatagttttaatataggagtgatggggcaaaggggatatcatggaggatcagtcatacttttttggtaatgtgttaaaatatacataacataaaatttattgtttttagcattttaaaacatacaattcagtggcattaagtacatttacagtgttgtgcaaccatcctcagtatctaggtccataacttttccatcaccccagatggaaaccccatatccattaagcagtcagttcccattccctgtcaggcttcttttgtgaggcaaagattggagggggagaccagttacaggcttttacagcagtgtgggtaaaagatactggttgcttggattaggatggtgacaaaaaaagttaaaattatatatgcatgtattttcttttaatttaactatttacccagttggatgccctgtaaatttgtaaagccaatgtaaacttatgttttcctaggtgttcttcagatgatgcagacgagaattggggctttacagggagctgttgataggtactgttcttaattttataaataaatggaatgggaatgtttttatccattgatattctgaaaatgattttattctcactcctctcttttcctgtaggataaaagcaaaaattgttgaaccatacaataagatagttgcccggactgcacaactagcaagacttcaggtagtttcttacttttatttctttatactttattattcattttgttttcataagtggacaaaatttaagagtatgagtttggaagaagtaagagaatgggaacagaaggtaagagaaaaggagaaaaaaatactaaaaagccttaagatgtctagctcaaaaaatacaaatctaaagcaaattcttttcactgtcattgcagtgtataattgtttattaacttatatcttcttcaatttctttcatcaatgttttatagctttcaatgtatagatgcttcacctccttggttaaatttatttctaactttttttttttgtagctattgtaaat

SEQ ID NO: 126772 - DNA, 1114 bp, Homo sapiens
taaagtcttgctctgtcacccaggctggattgcaatggcacgatctcggctcactgcagcctgtgcctcccgggttcaagctattcttccacttcagcctcccgagtagctgggattacaggcacccgccatgatgcccagctaatttttgtatttttgtagagatggggtttgaggtttcaccatgttggccaggctggtcttgaacacctgacctcaggtgatccacccacctcggcctcccaaagtgctgggattacaggcatgagccagtgtgcctggccagtcgttatgttttttaatctctttctcaatgttatacttcctttagggtcatgataaaagtaagcattaagcagtatagtggagtggttcagagtatgggatcaaaatatgttaattatgattataattgttctgttgtttaataactggtttagtacagggtaattaaggacttttccttattttttccccaatccagggtgttatagtgactttttaaacgaagactttgatgtaaagacttatacttctcaatctattcatcaagctgtaattgctgaacaactagcaaaacttgcccaaggaatcagtcagttggacagagaactacacttacaggtaattctgatcttctgggtccctatggattattcagcctaaagtgataatttagcatttttgtaatcttattaaatacaaatgcatatttacatgaagaagtacatacttaccagtgtgacttatttttcaaagtaaatttttgaaattttctgtaaaccactttttgtttgtggaaaaactaatataccacctcaccaaagcctttcattcatacttcctgttcaccaccttaactgatgtgcaacgaatatagtgggcaaaaaataggatgtgttcgataaagataatagaaaatggaattttggaagtaaaacaatatgaataagaaaaattgggatgttacattcgcaattcatactttattagcacaaagtgtagcatttgctgaaattacagaaagttgataaatgttattgtgagtaggatacaatatgagatgttaggcgacgggtcctaatttcagctatgctgttgttaactgacttta

SEQ ID NO: 126773 - DNA, 1028 bp, Homo sapiens
aagttagtgtaaaactaaatttcctgtatcagttgcttaatccagaaatttgggaatccttgtttgttctacctaatcacccattttcagcttgtcactaagtcctacatcctgtgcagtgtgaatatttgtcaaatttgtcactttgacattcttagtgccacttattcaggtcttagtcgggccttcattatgtcttaggctgttaacatagtactttactggcctctgtggttctatttcttgggtgtattggttaattggctttgtgggaaaatagaaaaagccctgatttttgtagtgtttgctgattaccatggtgtaaatactctcaccatcgtagattttaagatatctgtgtgaaaggtcaactggctcacagaattcctgaaaatgtaacagtctgtgctcaagagccaataagaggcaacttcagcacattgctgtgtgactaatcctttttccatcatcctctatacagctgccaggattattgttctgtaacataaagctgatagtgcaatttcttgggttaaatgagatatggttaaacatttcaaatgtcttacaaacctcttttcaaactgcgctccaacctttggaaccacatctgtcattctttaccatttctgtccaatatacatgtgctatgatttagacacactgaaatcagtattccccttgtttctcaaaatatgccatggcatttgccactgctaaaccttccctttgcttggaatggcttttttcatttgtctggctgacaggactcttaattctgagaagcacttggcaaatcagaaggaaatgtggttctcagacttaaaagcagccaaagtagcagtttccttctttcattccactacattttaagaataatcaagagtatgagcctttactttttgttgttggttgttaccagaatgatactaatgatacatcagctgatgtatagattagttaattcatggaacctgccatgtgtctggtattgttcagacactggagaagagttagcaaacaaaaca

SEQ ID NO: 126774 - DNA, 1031 bp, Homo sapiens
gtgatctgcctgccttggcctcccagagtgctgggattacaggcgtgagccaccacgcccggccgagtctctgctccgttctaaggatagtgcctcctactttgctctggattttttcttcctgtttcctggggactcagtcaccctcaatctatgccattgaagtaactttgcaaggttttcaatgactttcttgcacatacgacaaatggacacttttttggtcctttaacttgtaataacatttgattcctttcttgaaatactttcctcatgcggtttatgggtgccgtgctttttaaaaattcttaattctctaggtgctcttttccaggttcctgtagatacttgtcagttcagtttgttctgaattaagcggtctctgttgcccctccacccccaacattcctgaggaattaagcatttccagcagaaactttgattcactatatcggggatttggccaatgacagagtatcggattgataggcttggtgagcacagatgcatagtatgaaaattggtgaggtgtttctgatatgccctctatgggaatgaggaaactataaaagagaagcattatataattcatctctttaaaggctgtcagccctcaaatgccacatcccgttgtgtttgatctttgtaagctctatgacaatactaatacttactttctttatcccttcttttggcttttgccattcttttttgtttctctttctccctgagcactctttagtctctttgattgctttcattttctctgtccaccccccactttcctatcttcctcattttcctgcctttttgtgcattctaaaacttttttttcctaaatcatctggtcttgtctgtggtttcagtatgctccttacctgtcttctgaattataaaactatatttttaactgcctactggacatttctatcttaatttttttatgatatgccattccataacctgtatggacatttctattttgatagtaaacaagcagtgctagttctataatacacatgaaaacctac

SEQ ID NO: 126775 - DNA, 1006 bp, Homo sapiens
tccgcccggccccctggcttgggtactgttctagccaacctatttactctgggactggctccctcttttctggagtcttggggacacttggtttctgtgtgttcctcatttcaactcgaccccccccccccccatgcctccagcttccctgaagtttcgggagcccaaaccctgtggaccgcgttggcagccaccggctgctgccgcagttcttgacgaaggggtgtagcgttcgagctcttcaaaagtgtaagctctagaacagacggcagacgcataatgaaatagggccttgttttaaagtagagctggaaacgcttactcctttaacaaatggactgtacaggtgacccctcttacaggctggttttttttttcctcctttatgaggcagttatctacagtgacacgtgggggagggtttgagacatttgttcaggttgggattaaccatttgtacagaatctagcagtcagattttattgctagtcagtttggagagaagttgcccaaaataagaaaagttagatataatatacttgaaaagcatattcagttgtgtcaatccagttaccatgtcccgaatctcttatccttcagaataaagttcacatttataagcataaaaataaagcccttctcacctgttcttaattttttctctagtggccatcgcattctaccttgtactaaaatcatttgtatacttgttttaatctcttctgtattgcaaactttttttaatatcccacagtgtgaatagcagtatcttgcatacagtaggtgcagaatgttttttaaattcatcatcgcagttagaagcacatgcacacatttgaagaccgaagtgggtaataaatgaaataaagttccaaattattgtttattttctctgactgttaaatattttattgtcatcctgaattacgtgccttttcatgataatttatgtacttttgtcaaaagcaatgatgttttctgaactatttcatgttggaaactctag

SEQ ID NO: 126776 - DNA, 1074 bp, Homo sapiens
gcaagacagtcttaagcttcttcgcaaaaagaagctggaagatgactttttcattttgtacagtaggtatgtatccaggaaaccaattttatccagttccagagctacgtggttttctacattctgtttcaaaaaggtgctattacttatcctgtgcttatcgctgttctaagtattttataactcaatgcatttcatactcataacacctcaggtaagcaagtcttatgctacactgcattatgctctctttgtctcagaggattttccctagtatgtaagatcttagtcatgatgggaataggggtgattcattcattacttgtgaattaggaattgtttttccttccttggctttattccccccagtggaagattttagaagagtgagtaatattcattcatacagcgaaagttttgacccctctactctgcatgctctcatgagtttacaaacataagactcaatccatattctaaaaggagttaataggtaaggtaggaacccatttaaacaaacaattgtaccaggtgctttggaatctttggatttacttattccagtaattccaagcttagctgcacattgaaatcacctgaagagctttaataaaaacactgatgcctgcatcctgagcccagacgtttggatttaattggtctagggtatggcttgggcatgctaattcttaaaagctcctcgggtcattgtagtgtacaactaaggtagaaagctactgattgttttgttttgttgagttggggtctagctctgttacccaggctggagtgcagtggcaggatcgtggctcactgcagcctcaacctcctgggctcaagggatcctcctgcccaagcttctggagtagttgggatcacagtcgcttgctaccacgcccagctgatttttataatttttttagagatgggggtctcactatattgcccaagctggtctcaaactcctggccttaagcaagcctcccaccttggcctcccaaaatgctgagtttacaggtgtgagcccagtcccctgaaacctactgatttattctttcagcaaataaatattga

SEQ ID NO: 126777 - DNA, 1047 bp, Homo sapiens
aatatactcagagcatgtgaaacagtctaaaaatacactatatggtccatccgtacagcggaatatcccactataaagaagaaaataggtctgagtacatctcccagatacatgaggaaagaaaggaacactaggcacagtggtatatatagattgttcacacttgtttaaattttacaggtatacaaaaaaattgttctggaatgcagtaaactaattctcacctttgagaagagggtctattttgtcaaaagtattagaattgttttcatttatcaaattttgtactgtttgaattttttaccgtgtaaattgcttttaattttaaatattttaaattgtttaatgttatattatttggacagatgcttcttaggctaaaaaatcgttattgctattttatcctgtacaaacattaaagtttggtgtgtgtgtgcatggggttttttcctgtgaattttaatgttgagctattcattttgtcaggtgattgcccattgattgttcagtttgctgctaacgatgcaagacttttatctgatgctgctcgtatagtctgtccttatgcgaatggaatagacattaactgtggttgccctcagaggtaaagctcaaagaagttggaagaattttccaaaagagtagaaaaaaaactgtgtgaacatggtaaaatatctttctagttttccaaaaattaaaaagaaaatagagttacagtcccagggctcaaaacaagaaggaagaaaatatagggaaatgtaatttagaaacataaattcaaaggtcttttctgatgactgaaatgatgtatagacctttgacaggtgttttgtctcccctcaccaatagaatttttatgtggctgtgccttgaatctcatccctaagtagttatatgagaatctaatgtttacggcaatccctaaaatgtatttttactgtcatgtcagatatacttgctctgaaaacagattgtttgacttaggaaatcaccacatatttcctcctaattaattccccttataaaaataccttattataatcactt

SEQ ID NO: 126778 - DNA, 1048 bp, Homo sapiens
tgatagggtgtacttaatttgacaataatatttctttttttttttttttttttgagacaagagtttcccgggttggagtgcagtggtgtggtctcggctcaccacaactaccgcctcccaggttcaagcgattctcctgcctcagcctcctgagtagctgggattacagccatgcaccaccacgccaggctaattttgtatttttagtagagacggggtttctctatgttggtcaggctggttgcaaactcccaacctcaggtgatccgcccgccttggcctcccaaagtgctgggattacaggcctgagccaccgcgcccagcctgacaataatagttctactttactggcactgtagtagattatcagtaattcaaaatgtgtccaaagaataaaagcaaagttgttaagtatagcgtaatcgaaatcagattagacatatttgtatactcattaggagggttaaattagctgtttagtggtattggaatgctgtaagccaaaaatatctttctactattgagactaataaaacctcttgttatgcacaataaacatcaaatttggaatttttaaaatctgaagtcattgcaattacttcaaatatttaaacctgttttggttgaatgacttttaacttaatattctcacttgccaatgaaaaccatttctcctgagtactttttgatctgggaacatgttttcctaatctcatattgatccacttagaaatgttgaatctatgaattttttatatctgcttctcttccagatcactagagaaatggatgcacttacatttcagtgctttcagaattttgtcttctcttccagttatttataattcacttgttcatgtgtttgctttacaaaggtgggcaatggcagaaggttatggggcttgcttaataaacaagccagagcttgttcaagacatggtgaaacaagtaagaaatcaagtggaaacccctggattttcagtttctattaaaataaggtaaagacaatatttcaatctattgataggataatccattacttaggaaa

SEQ ID NO: 126779 - DNA, 1050 bp, Homo sapiens
attcccttaaattattggcatgccaagccctataattgctagatgggagaatatagataaactgaactttaagcagcccaatttatgacaatccagatttaccctaaagaaaaactaaagactaatggtttaatgtagaaatctttaaaaaataaagatttctgtacgtacatttaaactttcctggtttacaaaaggtaccaaaattaattcttttgtaatcggattaaacatattaatgcaataaagacattacaaaaccttgtgataatactttttaaaaatatactgtttgcttcattgagcttgaactaataaccaggggttcttaatgtatggacaaatatggtgtgctttaatttgtaggtgtgatggttgcaagaggactcttagcaaacccggccatgtttgctggatatgaggaaaccccactgaaatgcatctgggactgggttgacattgctcttgaactcgggactccttacatgtgtttccatcaacatttaatgtacatgatggaaaagataacttcaaggcaggaaaaaagggtatttaatgctctgtcaagcacatcagcaatcatagattaccttacagaccattatggcatttgactagacttcccaaataattttaatatatacttttagacccacagtgaaaccacagaaggtcatattttgtaccttaaaccagtagctctcaaattttagtataaaaacaattcctgggagcgttttttaaaaatcagttgtagacaccaccctcagagattctgattaggtagatctggagtagacccagaaatacacagtttaaagaaaactcccagtggttcaaacatcctgatcatcctaggcaaacattgacaaatactgctctgaatcctgttctatagatattggggggatgggtagagtgggaattttttcctaatcatgtttttaacattttaaaataaaatttaatactaagaaattatggcttatagtatctataaattaacaagaagtatgcaggtgcaaaaaagtggtggaacaaataccaaca

SEQ ID NO: 126780 - DNA, 1022 bp, Homo sapiens
gcgggtaagggcttctgcgacccggggacccgtggggcgtaggccgcggagggagagcgccgctgcctggtctggagaaccccgcggagctggcctggcccgacccggcccggcccggtccgcggcgcggtggtcgagggcccgcggcgccttctgggagcgggagggccgggaagccgggcgttggtggagggaggcgttgggcttctgtcgccgcgaagctggcggaaaaggcagtggccagcgagccgcctcgccagttcccacgactcccagggaggtggcgacacccgcttcccgggccacccttttccccttcctgaccggggtccgtgcttgccttcccaggtgggggaaggtggaacactgtccatcccctggacaaaaacgctgcgcctcggggccttgaacccggttttgtttgaaaggaagcaagagaaaataagtgtttttccatttaggtgtgaagaaaaaaatgacactccaatgggctgcagtggcaacctttctttatgccgaaataggactcattttaatcttctgcctaccttttattcctcctcagaggtaggaaaccttcaaatcgttaactaataaatattggatcgctcttaatgtaaaatggaaaaagttttctgaacattaaaaagtttcgaaagtctttgaaaataaactcacctaacgaattaggtagtatataatgacaatattaaaataacattttatataaaactctgttacgtgtacaagtgaaataactttttcttcccttctaaaagaaaaggcgcctatacttttgattctgttgattacagatataataaagcaacgattatacttttaacacctgccctgccttgtctcaggttttacctttgttttattgccctgaattggagccatgaactaaataaatataagtggataaatcatgtttacagtacagcatgggtgtaaaagtgtttcactgaggcactggaacagcaatttagaaaccaaagccaataaattattcttagttt

SEQ ID NO: 126781 - DNA, 1092 bp, Homo sapiens
agtacttagaaccataatatagtgagaacacaataggtattagctatgataaggtgctcaactgctagttgttccctatgagagatctcttacattcccttttacaccacaccaaaccttgaagaaataagtaaatttacatttggacctagatcaaggtattaccacttatgttctcttaaaaatataaaattttatattgcataatttaaatattggctgtataaaatgcttggacttggaagcagagacaaaatgaaccgattcatctgtatgaatctccctcaacccaccaatttcaagtagttacttgaagttgtcctaatcttaaatcttaaatgtgtcctaatcttaaagtgaaactgtttttttcaagttgtaagtgcttgaagctatttaagtgcttactacatttttctgcctcctttcaactaaagtgttactcatttaaattgcccttgtacaaagtttgttacctttcctattgcgtgatggattattttgccactttgccatttataacccatgctttcttaccactgtctttgtttatactgttcaatccacctagactatttccccatctcatttcctctatgttcacatctttatctgtagtaattacatggttttatatatatatatatagtgtgtgtgtgaaaattatcaagctacatatttaagattttttcaatttatgtgtataatacctgggtagtttttataattccctcatggttaaagtagagaaacttttagttggagtatacgttaaaattgtactatataaaaatcagtatgcagagttagaccccactcctgaaatgttgccaattgttagaacaatatatctttatttctaagtcatttctctgaccatgaaaaagatacagagtagtagcttctatcaacaatataatattttactactgcaagaattcctttttaaggttttgctcatgtatggtttacttttagaatatttaagccaccagacagaggataatcaaatatcaggttattattaaatttgaaagagttgttttttaattcatgagatattctgtcatgtcagaattaataaattttaaa

SEQ ID NO: 126782 - DNA, 1023 bp, Homo sapiens
attaaaagtagacctttaggttcttgtcaaaccagaagttccatgagtcttagtaatcaccatgtttttccagttgttactgagctcagagaaattgagtgacttgtctaagattatctagctacttcttgaaatgccccttcttgcacagagtatgttttccctcagaattccctcagagttgttgtgttgttggttaaataggatttagagaggcgaacttgggaccctaaccgccatctttgacactgttttgtgagaaaatgtcttccatgttccaaaccaccaatctctcaaatagaatcctctttataaaactaagaacatctggtatgagaagggatggtattgtcaaaaacagaaaggtgtgaatgatttgtgcctcttttcaagatgtaaatatttgtctcatggtacattattaatgttatggattgaatctctagccatataactagttatgagaagtcagtaaagaacaataaggaaaaccggttccagttctgccaccagctaactaaaggacctttgaaatggcttttatttcctgggtttgatttattcatcttgtgaaataaagggagagatggaaagaatctctgcagctcctgattttatgatcttctaactctaaaattatcacaaaaatttctattgaaaactgtcacttatcatgtaagggaggggagttgtagtataagttcttttggttacattagaaacaaacttggccgggcgcggcggctcacctctgtaatctcagcacttcgaaagaccaaggcaggtggatcaacctaaggtcaggaattccagaccagcttggccaacgtggtgaaaccctgtctctaccaaaaatacaaaaattagccgggcatgggggcgcgtgcctgtaatcccagctactcaggaaactgaggcaggagaattgtttgcacccgagaggcagaggttgcagtgagccgagatcgcgccattgcactgcagcctgggtgacaagagtgaaactccgtctcaaaaaaaaag

SEQ ID NO: 126783 - DNA, 1033 bp, Homo sapiens
gtcctgtcatttcccacttacccatctccactctgacatattcttctcttacaaatttgtctgtataaaaataggctgagtagatagctctacaatcagaacataatggttttctaattaatatcatcctcagaactgtttttttcccttagatttacatttctcattaattgaggaagaaagactgacgttatttacctaaatacttttgagaatattattttaatcacagcaactagaaattcttatgttcattttacagattttgccataataggaaatcttttttgtgtgtttcccaaatattaagtttctgttagcaaaagtacattgtagaaaactataaaattctgaaaaggacaaagaataaattataaacaggtaagtttagataggttactcagcttattttctgtaagaatgtctggctattgcaatctaagcttatttcttcctgtatctccttttgcaatagattttgaaaagccatggtaaagatgaagaatgtgttttggaagcagaaaataaaaaactagtagaagaccaggagaaactgaaaactgaattaaggaagacttcagatggtaactttgtgtacatgtgaaaaagtaaaaagactagcatgatattttatgctgtacacttcactgtttttcctaaaacaaaactaatgcctaaatgttcttctaagataccgagaatgacctatttataaattcttgttcaaatatgaagataaaacattatgtcagccaagagaaacatgctctgttatacagaaaaacatgtaggtgtttcagatctgtgttgtaaatacagatgttcttgccttagcaaaagagctgtgttcctaaaaagttgtttataaatgtgtttttataaaaagaatcacatttttccatcatcgtatattcctcctctcagagaagcaattgtaggggaacagttttcttacaagaaaatatattgtttatttcaagcactaatatattctacctgttagacataaggaaagcgttccttgaaagaggtg

SEQ ID NO: 126784 - DNA, 1099 bp, Homo sapiens
ttacaactatatattcatcatcattatgaggatttcctttgcctctttcctgtattgataccctctttcctgaattccatgttttctttctttttctttttttttttttttttccgagacagattctccctttgtagtgcaggctggagtgcagtggcgcaatcttggctcactgcaacctccgccccccaggtcccggttccagcaattctgcttcagcctcccgagcagctgggattacaggcacacaccaccatgcccagctaatttttgtatttttagtagagatggggtttcaccatgttggccaggctggtcttgaactcctgacctggtggtccgcctgcctcggcctcccaaagtgctggaattgcagatgtgagccactgtgcccggcctggattccatgttttctacttttgtataggttttgaaagtcacagaggtgccagctttcatcacattgtatcaagagtacatattattaacataacttatcagttttgatgttgaccttgatcacctggctaaaatagtgcttgtctagtttctgaactgtaaagttcctcttttccctcctttttccataccgtaatctttgtgaatcactgttcacagcccacacttcagaaatggggatcagtgtgcaaatgagtggattaaaaaaaaaaaaataagaaagggaagttacgctcaacctccttgaaagcagagtatctgtgtaaattgtttggaattctacacagatttgtctgttgtctaccatttgtttgtcagtatggactcataggtatttattttataatttgggttataatttaatactactttagtttattgttcaggttgtccagctttcaccattgggagctctttcatttggctcctgtgtccctttgacacatttccattttggatatttgtttgtttgtttgtttgtttgtttgtttcatttttggagcacttccttactttctggcattacaagatactccaggcttatcttgaacatttcctgccccattcttagaatcaatgtttagggattttttttaattgggctggattctttggtactatttatttatattttattttt

SEQ ID NO: 126785 - DNA, 1029 bp, Homo sapiens
aaatatttcaagaatggtctctttgctttgttttggctatcctgagtattttggtttttgattgacggtgtttttatcaagattactatcaggtgactaaagtaacactttgtattgttcacctgacatttatcatttccaagtgaactgtttacacacaagtgaatttttcaaatgcttaaagcttacacttttcatttattcattctttcattccttcaaggagcatattttaagcacttaccaatactaggcaatatgctaggtactcagacagataagacacagctctgtttcttgagtagtccatagtctagtaagggcatagttgcccttcaattcaatacgtggtgtggtgaaacttgagttgtagtagaagccaacactggagatcgacactttcttgacattttaaaggatgacattaattagccagatgaagtaggaggagatggacaaggtgttataacaaaaatgagcagcatgtaaccaaaggagtatggcacttttgaggtactacaaggagctcaaggcaactggagtgtaaaagaagatggaaccagtggagagagttgagcagtaggcctagaagccatcctgaagggcctcatatgccctgtttgtacgttaacattttcagggcactcttagagggtttttaggcacaagagcaatcactttgacagcattatagacaatggattcaagtagacgggcaactacgtgagaaatccacttaataatctaatctggaaatgaggacagtggtcacagagctggagtggaaggtatggattggagagctataaaggaacttaacagctatcaacaaactttatcaacagatgggtgtgaggttaaaagagattaggtgttgattgaagtgatgaataaaacgtaaatctttacctacacagacctcacaatataggcatgtacaaaagaaggataatataattaaaccacagtttatgtccttactgaacagaagtttgtatgtctactttccaagtatcttggaagcattac

SEQ ID NO: 126786 - DNA, 1082 bp, Homo sapiens
atggtagggaattattccagattaaaagaaattaaagagatatgataactaaatgcaatatgtgatcttgcactgtatcctggactagcagtggagaaaatgcttaaaggacatgattaagacagttccaaaaactggcatatggatgataaattagatttaaagtattgtattcatattaagtttcctaaatttggtgactatactatggttatgttagataatattttgtttctgggaaatacattcacagaaatgtattgaagagtagaggggcacgatgcctgcaccttattctcaaatgagtcaagaaaataatagtgtgtgtgaagagagagaatatgataacaaatgtagcacaatgttaacagtggatttgagtaaagactatacaggagttctctatttaagccttgtaacttttctataaatttgaaattattctgaaataaaaataaaactattcgatattttctagccctttctaaggcacaaaatgatgtgatggaaatgaagatgcagtcagagagactttcgaaagaatatgatcaactcctgaaagaacactctgaacttcaggtgggtgtgacatgcactttatgcacctaaatgttttgaaatagtaattacctaagtaaattatttgggttatttgtccttaactaatcaagatgatgtacttaatcctggctttgttaaacgatttaaagaagccagatttttacctagagggtaaagattaggacattgcaggaaaatacaagataattttaaggaattgctgacttgcatacttacagcattccagttttggtgaatttttaagcaaaagaagccacaaaaatggcagcattggaaaacagactggttctagaaaaggtgagttttgctctttgggatgtttgccatattcatgccaaaatgaggccaaaatttcaagttccacatcacactactcttgtctcagtgttttagacatattaggacaagactttagcattcaaatttatcatttacctccaaatgttgatttgaaagatggaaatgggaaaaaaatgtttcattgttaaagccacaaagtc

SEQ ID NO: 126787 - DNA, 1018 bp, Homo sapiens
gcactccagcctgggtgacagagcgagactccatctcagaaaaaaaaaaagtgattccttcccaagaaaatagttgttataatagttgtcatacctgtttctgtggaaaagaccccatcccagattatgccagacaccatgccgagagtagggccttgtttgatagcacttcaggacttgatctaatttctgcttgtatccagtttttgaaatatttaatagatgtcatttgttgagagtatgctctggactaagcacttggctaagggcttcgtatatgttgttttgtttactctccatgacagctcaataattgaaagtattttaatatccctattttgtgaatgaggaaactgagacccagagatgttatataatttatcgaaagtaactagaaagtgatagcattcaaagtcagagaatctttctccagaacctccatcattaaccactatgttctttggcctttgctgatcattggattgtgttcttggatccattctcctctcaccactgctttactctgtatctctgggaggcccgtttccaaggctcccttgctgtctgactcagtctgggcaggtttagccagtggcaggcactagaagactgaaggcaggaggaaggggaaagccagggatttcttctactctttctgctatagaggccttctcctttatgactccagttccttccctctaggtcccactgggcagcttctacatactggccttcgcacctgggctccataaccctcatccctccagcccaagaagtggtggtggcttttctgctattgataatcccagaggtgccttaccaccctgtttggtgtgtgtactttttcatcacctgtaaaaccaatttcccataatatctctgttggaaggaaaacaaaatctcagctccatagtttaccacttctgtaacccacaggtgactcatttgacatctatgctcctcaggtactttactacttaaataaaggttgtaataccttatgaaaattaaaccagat

SEQ ID NO: 126788 - DNA, 1497 bp, Homo sapiens
gtgtcaaaatgataattttgttatgttagcctctagaaaatttaagttcagaaaaatgcactatgaccggttcgtaatttttttaatgccacacataggttgtattgtaatggcattatcaaaatatttgatgatgtttcagatatattgcaaagtctgtattccagctcttaagaaaaatataagcatgttaaataccatatttacatattgataatgtcattggtatatggtggctgtttaccaataaaaggaaaaaattcattaaccggttgcttccaaaattagaagttttaagttgcatgaaaccattaatagccttgaaagctttgataagttttcagtaataataacctatttaatcagatgatgatgtgtttgaaaatagtgttcaatatcagcaaatttgtacacagggaatgtaaataaggataactgatcagagttatccactgtatttataaggaagagtcggaaaaaacaatgaccttagttttttttaagcctgatgatactatggtttactctaataagatagctatattgataattatatttttgttactgtgcccttgcacattttggtctttttgttaatatttttattaataacacataattagtaaccactctactgtttcaagttaatctagtaatagagcttacatatatttgtataactgctataccactgaactgaatttattttacaacagtgtagaattcttgaaaagttaacgtagaaaatatccaaaaagcagtatttctagaaagtgtccaaaaagcagtatttctttcccttggttgtgagagtaactaattatataaatattacctcaaaaatacatacactggtatcacacagtctttctacaatgtttctgtattctgaaagctaaatattaagtactatttttccattcaaatattcatttagaatttcctttagaagatggcagtgattataatattaatatgatttcatttgttccagtgtttagacatgaaatcatcttccttgtctcatgaaaacctaaatataaaaaaaaggaaaatactggagtttttatttctcttgtctttgttacatcctctgtttattataattttagcaccaacttcacacctagctaatttttttcatcataaagtggatgaaatgagcaagtacctaaaaattttatttcagataaaagtcaggagttactgctaaaaaacagacatgtaggagacattcaacaggagtatgaaatgagagttagaccatatgggctgacaacaccataaataacaagaaaagggagtgctgaaataggagagaacagagcaaatgttagctcaaagtatagacttagaaatatcaaagtaagagctatctggataaatatatagatattgagtgcttggaatcctagcctactatgtgaaaattaagtctaatgtcagaataacttacagaaaaatagaaaatgcacagctttaaaatgggcagagtta

SEQ ID NO: 126789 - DNA, 1079 bp, Homo sapiens
gaaggaagtctttgcaggccaaaattgggacaacctgcttggacttccgcctcccggcctccggaaggcagtgcgcacgcgctcgctgcgactccggcgcggttgacttccgctcccactgtgctctgcgagccgaatcatggatcacactggtaaggaggcggaggcagtgggggtcccggttccaagcccccttggccggcctggggctggtcgcacagcaggcaaaagggattatgctcgccccacaacactagggtgtggcagtgagaagaaatctcacagatgccttcctgtgcccggcaggggcctgcggtttcctggcctaccgtctggtgtggtacctacctcctccgtgccggcaacaaccgctcctactctggttctgctgagctccgagcccggaccagtgggcgatgtaggccttcgggaagggagagccccggctctgttttatttagcccagctgctctggcctacgttatggagactggcgggtagattgcggtctccgagtcgcggaatcctctttacgctgggagtggacgggcgagaatgggttggagacttcctgctgtctcagtcagctttgggcgggtgctgcagtggtcaccccctgtcgtctctccgatcctttatggactagaggggtgaaagaagggagtctgatagagtttttggaatcaaactcggagcagtttttctacctaaaccaaaagcatgccccgcgcttcggctgaggtccttactcatcatttgagggtatttacaaagaggagtttaaaatcaaggcattctcatacttttctccaagtaagagtggctccaccctttgttatgtattttctggcttttgcttctttgtggttcttggatattgaatgagtgctcttggagttatgtgccccatacatttatagcgaccgtatcacaaatagagaaaaaaaggctttttcttgagtattgagttgtcctcactcatcagatatctacttggttatataattaggtgtgtatgtttatttatgtaggtgtgtatgtttatttatgcaagatacatgcagatatctataggtcgg

SEQ ID NO: 126790 - DNA, 1042 bp, Homo sapiens
atcagacatggagacagggatggttttcgttctttttctccttcttactctttttcttttaaaaaattctcttgtagttcaagacaatggttcttgggttcattaatggtttcatgtttctgtaaacttctctggaattatatgaaaaattttattcacttttctagggagaggtcctataacttttatcaatttcttaaaggattctgtatctcaaaaggggttaaaaagcattgccttaagtgttgatccaaaataaataaaattagcagttaaacttaatgtaatattgaaaatcagaacccagatctttaaccttgataatgttaggtatggtgttttaatacctgtggcagaataatctttaaaaagaaaaactaaaagaaattacaacttttttttcctaacacagacaatgagttacaaggcactaatagttctggatccttgggtggtcttgatgttcgcagacgaattcctataaagctcatctccaaacaagcaaacaaagcgaaacctgcaccgcgaactcaaagaactataaacaggatgcctgcaaaggctccacctggtgatgaaggtaatttgtttaactaataggtccaacactctttctgttttatctgattgcttcggacagtctgtgtgatcttatagctacctctttttgtcttacatattctattcattcttcaaccttcttgtttgacttctcattgtagcacattgtatttttattttcctttataaatattttttgatttggttccttttgttgttgaaagcaatactgcccattgttcagtaatctcaacagtattgcagaaagcataacattaaaagtaaaatccttctatccaaagataatccctgttgacttttttatacaaaagtattaattttttatgtgtagttgccattttttcatgtaatatgcatttgagatttttttcttatcagtacttacagatgtacctcattaaaaaaataggtttgggtatttatagatataccataatttatttaacagtttttccagttt

SEQ ID NO: 126791 - DNA, 1335 bp, Homo sapiens
tgttttgatgtaaatttattttaattatgaaagagtgtatattttttcatagcattgaccattcttgtttagatcctttcttctgagttctttgtaaattaatagggtttttgttatatgttatgtatgtgcgtgtgtgtatatatatttttttgtttgtttgtttgtttgtttttgtttttttgagactgagtcttactctgttgcctgggctggaatgcagtggtgggatcatggcttgatattccaggctcaagtgatctttccacctcagtctcctgaggagctgggactacaggtgcaccccacctgcctggctaattttttatatttaatttttgtagtcatggggtcttgctatgttgcccaggctggttttgaactcctggactcaacagtcctcttgccttagcctcccaaggtgctgggattacaggcgtgagccactgtgcctggcctatattgtatatattcttcatttgtcttttgaattttgtatacaaaatatttattgcagagaatctttttttttttgagacagagtcttgcgctgtcacccaggctggagtgcagtggcgggatctcggctcactgcaagctctgcctcccaggttcatgccattctcctgcctcagcctcccgagtagctgggactacaggtgcccgccaccacgcccagctaatttttgtatttttagtggagacggggtttcactgtgttagccaggatggtctcgatctcctgacctcatgatccgcccgcatcggcctcccaaagtgctgggattatagttattgcagagaatcttgaagattctatatagtcagatatccggtctttgcttttatgacttctgggttttgtgacattatttgaaaggccttcccctatttcaccagtataaaagagtttttccatcttacccttgattacaggttagcaaactatgtctgtgggccaaatgtagccctgtttttataaacaattttattggaacacagctatgctcattcatttaagtattatctatgggggctttcacactataatggtagagttgagtaattgtgattgagaccatatggtccacaaagcgtaaatatttactatttagcatttcacagaaaaagttcactgatactgctttagaacatttatggttattaaggggaaaaaaggtggggtctggcttttttttttttccctcgaaacattgtcccaactcttttccttgctgaatagggattttactgttatcatatatatgttaaagcagcagtccctaatctttttggcaccaggactggtttcgtggaagacagtttttccacagg

SEQ ID NO: 126792 - DNA, 1049 bp, Homo sapiens
taaaatcgatagaatgctttatgttttcattatgctattggcaatacaatcagtctcttagcataccatttttgtagctagactagaataaatggtgatcaatatcttaaaaatttgtgcaacaagcatgatcatcagtaaagttttacattagaaatagtttcatgaattgataagagcatttgaatgggagtcaagagatctgaggtctgttcctggctttgccacttatcttctatatgttgagttatgagtctccatacagtaatattctcaataatgaagtaaaagagttggactagatcaccaagatcacttctaactgatgttttaaagtaatcttgattgtcttattcttagaaaagctttgaaaggcatcagatgagctttttagtgaaaaggtctattttgccatgtatatgtgcttccaaaatgaaatttgagatttggaaagttaatgggcaatactttttttttctcagaaggatttgattataatgaagaagaacggtatgactgtaaagggggtgagctgtttgcaaatcagcgaagatttcctggacaccttttttgggactttcaggtataattaaaaatgaaaaattgtattataacaataaaatattttaagtattaaatacttaaaatgttttattggagtaatgcacagtacattaagaatattatgaacttataactatgattttcagcacatacaaatcatttgttaatactctattttcaagaataatttgaagtaattttcagtaaaatcaataactgttaacactaagaagaaaaactaatggtatcacaactaatggtggggaataaatggagattataccaagaggcttctatttctaattgttttaacaacttttataaaatattgaccaattcattgtgtagatacaatctttagaattgtgtaagaaggtaattttaattatatcatttcaacagataaacatcttaggtgaaaaggatgatacaccagttcatttctgtgacaagtgtggattgcctattaaaatctatgggagaat

SEQ ID NO: 126793 - DNA, 1050 bp, Homo sapiens
agtgagaccctgtctgtacaataaaataaaataattagcctgctgtggtggcacacacctgtgttcctcgctattctggaggctgaggtgggaacatcagccaggagtttgaggttacagtgagctgtgatcacaccactggactccagcctgggcaacagagcaagatctgtttcttaaaaaaaaggaaaaaaacgtgtggggaccatgggtgaaatttatagggtttacacctccagaaagtataagcaaatgcatgtgtgtacatttattgggaaaagagccatagtttttgtcatgttctcaaaaggctttgtgattgaaaaaggttattataattagtacttaataaatgttcattttaacaggtattctcaagtgtcttctaagccttatgtataggttactatatatatatattttaaaaatattataagttctaatatgcttaactgtaatatgtctttgtttacagattccatgcaagcatgttttttgctatgactgtgctattttacatgaaaaaaagggagataagatgtgtccagggtaagataagattatcattaccttttttaaataataaagttttagtgcaatgatttataagttggattaaaggttagggagtgatgtaaatcaggcaggagatgaaacatacagacatggctaatctttttctgtgagcccagcttgtgttaggtttctctttaatatagggcaaggtagccactatcagtcaactcaaattggtcaaaatgaaatctgtttgccattatagaagtattattataaacaaaaaagttactttttttaatgggacattaaagaagtattaagatatattgagagcaaagactccagaattagaattcctgggttcgaatccttgttctgctatttattagctgttttactgtcataggctattctttattgataaaatgagactgataatagtacctacctccttgaggtatttttaggattaaatgaggttttatatatatataacatatgtacacagatacatatatatagtagctggca

SEQ ID NO: 126794 - DNA, 3926 bp, Homo sapiens
ttaagaaccctaatgatgaggctgatgttacttgttgtagtccttgcaatgtcttctacttactgttttccacttagtattatttgctcaacaaacagttatcactcaataataccatactagtttgaattccatgattgtaagtaatctacccgttggtttttttcttgctgggttttttggcaaatggatgcagaaggtacaattgtttgagaaaactggataaattctaggccttgggaagaatgaggtctcttcttgaaacataccgtttgatattaggagttctgaagttgacagaaatgcctatcttaatggctaacagacaacaaagtagggaagattaaaggtttgcgtagaataactgtaacttctaattgtggacttttgctatgttttatgtaacagtcaaattttaaaaacaagcatatttttgaaaattacataattttttgtattctcttttagtaaatcacatttctttcccttctaatttagctgtagtgatcctgtgcagcgaattgagcagtgtacacgaggttctctcttcatgtgtagcattgttcaagggtgcaagagaacatatttgtctcagagagacttacaggctcatatcaaccatcgccatatgagagctggaaaacctgttacccgtgcttcacttgaaaatgttcatcctcctattgccccaccaccaactgaaatccctgagcgttttataatgccaccagacaagcaccatatgagccatattccgccaaagcagcacatcatgatgccaccacctcctttgcaacatgtgccacatgagcactataatcagccacatgaggatattcgtgctcctccagcagaattgtccatggctccacctccacctcgatcggtcagtcaggaaacctttcgtatttcaacaagaaaacacagcaatttaataaccgtccctattcaggatgactcaaattcaggtgctagagaaccaccacctcctgccccagcacctgctcaccatcatcctgaatatcagggtcaaccagtggtatcgcaccctcatcatattatgcctccacagcaacattatgcaccacccccacctcctccaccaccaataagccatccaatgccacatcctccccaggctgcaggtactcctcacttggtatatagccaagctccacctccaccaatgacctctgctccaccaccaataacccctccccctggacatattattgcccagatgccaccttatatgaatcatcctcctccaggacctcccccacctcaacatggtggtccacctgtaactgcaccccctcctcaccattataatcctaactcattaccccagttcactgaagatcaaggaactctgagccctccatttacacaaccagggggaatgagtcctggtatatggcctgcaccaagagggccaccaccacctccacgattgcagggtccgccttctcaaaccccacttcctggaccacatcatccagatcagacaagatatagaccgtattaccaatgataatagtattttgaatggaagatatgagggggaaaaaaacttatgtgtagtcaatcttttaagctttgactgttttgggaaggaagagtacctcttatcgaggtagtataaaacacatagggtcttgtttcttaaaatggttttaaatcttgaccttaagattgatttcaagtaccatactgtagtacagataagtggctcagttgagcacagctatattttaacatctctttgttcccctagtttagtaaattgacccagaggtgaccatttgtaaaaaatttgaaaaaatttttcattgttttacttcaaaagtattgttttgttaaacccaacgtttagtttttcttgtgatacattttgttaacctgtgtaaaaggattaaatttcaatatggttgtaaaaatgctatttttatgtgaatttaagtgcagccacatactgttttttaaaccatatgttttaccactaatttcccaaagttataataaaatcctgaaagtaaaaatctactagaatttgctgtaaggcagactgttaaatgatagagaattatttcacattttaggcactgaaatgttgaggtttcgaggtatagtaagtatacaatgcacttcacttggatgccttttcatttttaggcagcctcaggagcaccaaaatacattggaattctagtactaagatatatttgttcgtaatgttaaaagacattactaattatttggaaagagatggccaaaataatcaactctacaggcttcaagctggtgggggaatgctgttactcattaatgcttttttactgaatggtcggaatcacatatgcaccacacatactgatcttaagtaacattattttatagaactgtttaaatgggtttaaatggtgttctttagatgaaatgtgttctgttttgttcattgtcttaaactgaatagggctgaataggctttatgtaattcttcatttcatggtagagtttgatgctgtgtttaagtgggttcttgtttataggattttcaactacagtttgaatgccatggaggaatttgaataatatattaatgaaggacatattcttgtaatcacaaatttgcatttgctcaggtttcattgctgtgtgataggatttttcctctaacttgaaatttaaaaacttttatttcctattccttttgtcggtaaagcagtctgaatttggaacattttatcatggagtcaacagtgaagactaccagataattttgtattggagaagaggaaataacagctaaattgtggatttcagtgctttacatggtgcctttcgagtcagcttttacattataggggcttgttatagtttagctaagatgaccacttaacagtttatacagaactcatatgtataaatcaacattcttaggatattatttatatcctttgaataaatccctgtgaagtttttcctccccactaaaatggtgcataataaaacatgaaatatgtagtatgcagatatcatttattagatagtttgtagtgtatacatttagaacatacttcttttgacaaagggtgatctgattgctaatttaccattttattctgtcaggtacaggtgaaacaaattctcatcttgaatgatcagatgcaaaatcatttctgaaccctagagcagaagttagaaataacaaaatggccgtttcaaccttgactggccaaaaataactaataaacttttttgttttaagtcaggcaagtgattttctacatttagcagtttgaaagtccagtgttaatgcaatatttctagtgagaaatgcttgttattaaaagcatgggagtgatagtgtgaaatggtggtgagtgcttctatcatattactgtaggtacttggactggtgcaaacttgattccttttcatccccctgtttaggagctattaaaatattactgttaaaaatccaaaccattctttgttccatgtaataagaaaatagccaaaatcactttagagcttctcaactatttatgaagagctatcctgcttttattgaaagtcactagagttgaatgtggtaagaaaccacttagcctatgtattggacgagaaaatcagtatcatgataaaattttgaattaagagaacccttgtagagtttttaaaaaatgatttattttcaattaggtttaagaaatctatgttatgcagggaggcatatcagatgaatgttgtagcagacaaaagttttaaatcgtgttagacttgaattcatcaattgtttgaatgagggtgggtgggtagaaggataacaaaattactgttagtgtttctttccttacggaaaaagatgtgaatcccagccttatttcagggaagcctttgaagctatgatggacataagt

SEQ ID NO: 126795 - DNA, 1052 bp, Homo sapiens
cttgtggaaggatatacataaagatacatatatatgaattattgatttataaagttaaatacctattatatatgttagatgtgggtgtatgataatgaacaaaatagatggtctctgccctttaggagcttacattctgacttacttaggaattgttcttgatagtcgtctttaaattttcttcaaaaattttccttatattcaaagtattgtggccaggacataaatcttaatgtttaaaaatacattaccaaaatacatacaaaaccatgagagaaaatgtatttaattctgaacattactatttcctagcagcttttctggatataattgtacaatgctaaattagtgagtttggaacaaatctgtggaatgcacttataattattcctgagtttagtcctatcttgtaatcagtttttatttaggttttaatttcttttgagaagtgatgttttctaatatttaaaagcctgggttgtatagagttagactgtccagacagatttctggctttaccacctgtgactatctaatttagactagttacttgctctttgagtcttcatttactttgtttttttaaaaaataggggaaatcttagtactgacattattggggactcttttgacagttaaatgactatattttaaaaagagagtcagtaggatttcctggtggattttttggcttgatcagcttaagaaaaatggagttgtcattaactgaggtagaaaaaatgctggtagagcagattaggggaagatcagcagatcagccttgacatgttgaaatccagaggaagatgctagaaacatgaattaaatatccctcttttatattcttgttcatgcagtgtagggtcagccatttaaaaaatttcatttacatttctaagtggtaagttcctgtgtttagacaaaaatatgtatcaagtgcttaaataacttacaaaataattttaaagatacactgctcaacatgtattactttcacactttatgaatttctgtaatgtatttgtctcttcacaagttgttctgtctcccag

SEQ ID NO: 126796 - DNA, 1065 bp, Homo sapiens
ccaaaggttttggcctcagggccgcagttatctctcctttgtgagaccttgggggcactgtttaacctctctgggtctcatccaagaaatggaaatactaataatactccatatggttgttgcaaggatgaaatgagatgtctgtaggaagtgccgaggaatgcctagcacaaccaagagcttgttgaacttgtcacgctttactgtcgataatgtgcattaagcaaacgctagttttatttgtttatttcatcttctaagtataagaatacattgtagctcgacattttggcaccagcccctaaagcattcccaccaccacccccgctgcgacaaagccctgcgctccttacgacagcgtacgacgccgagcctgacaggaacgcctcgtgcggtagaaccgcgcgggccaatcgcgctgctcccgggtgatgacgtaggctgcgcctgtgcatgcgcagggaggggagaccttggcggagcggcggaggcgcccagcggaggtgaaagtattggcggaaaggaaaatacagcggaaaaatgcagagctggagtcgtgtgtactgctccttggccaaggtgagggccgagtaggtgaggtcgtgttgagccagaggcacggaaggtcccgctcagtgggtccggtacgcggcttaaccgtgttgggctggcggaggcgggcgcctgggccgcaccacccctggccccgcctctgcactggctcagcccggccctgggctccgaggtggccgctcatcctgcagcaggcgagggacggggctgggcccaggctgtggcgagtcctttcgggttgtgtgacggccggcggtcacacatgccacacccccaagcctgggccgagggccatcccggtcacacataggcctctaccttggaggaagtgtaagccacccatgtcccgtatagtctggctttttataccatttgcctttttctcatcctaattctgatccctgagtggcctaagtttatgcagtgggcaggtaaccctggggtcacttcttgaatggtttagatccagtcagctccaacagatagccctcg

SEQ ID NO: 126797 - DNA, 1066 bp, Homo sapiens
cacccggctaattttcttgtatttttagtagagtcggggcttcactatgttggccaggctggtctcgaactcctgacctcaggtgatccgcccacctcagcctcccaaagtgttggcattacaggcgtgagccaccacggccggctcagagctttatgacattaaaatgatccctggcactaataattagccatgttttctgaaaattgaataaaaataccattgaatacgtttttaaaattaagttaaatatgagatgatttgttgactattgataataaaaagatgggtgtggcaagctgaggctgaaaaatttaaatgattagttattgtcaaagaggggatattgatctgtagcttctgtgtggcaatggaagaagatacactaataatcctcgcttgatacgtttgcccaaaattgttctgttatcatcaaccttcagtagttctatgttttgaattcatatcttacataatagggacattttctttttctagagaggccatttcaatcgaatatctcatggcctacagggactttctgcagtgcctctgagaacttacgcagatcagccgagtaagtacttaagtaaaacatttttttcatcacattagctgacagttcctttctatttcaatgtaaaagcaagtgaatattggaataacttatgttaagtgtcttatagttcatttgttcatgtatttattcgtttgaatgtatattgagctagtgtgttccaggcggtgaacaaggtaaaaaaaccctgctcttatgaaacttgtaatttggtgataaaagacaaacaatatataagtaatggataaatattttgggaagtaactgaaaattaaagcaggtaatagggaggaagagagataattttagatacagtgtcaggaaaggcctttctgaggagatgatgtctgggcagggtcctgagtgaagtgggggagtgaggttacttcaggcagagggaaacaacactgagaaaggcctgaggtgggacttagcttgtgaagtttaaggagtaataagaaggctggtatgactggagcagaaacccat

SEQ ID NO: 126798 - DNA, 1659 bp, Homo sapiens
tatttaattctaacatcaatcattgaaggcagtgttttcatccccatattacagaaaggttaagtcattgggtcaagttcatacaactactcattggccgtgctgagatatgaagcccagaatgtcagattccaaagctcaggctctttgcttcatacatacttgtcttccagtatcactaaattccgtcagttattaaatcaatagaatttaggaaggtcagtgaatacaatgtgagtgttacagaactcagttgtgtttctgtatgttgtaatgaatagaaaataatagaaaatgaaatttgagtatttatgccatttttcagtagcatcaaagagcatcaagtagtagtaataaaatagtgcagaaactatgtagaaaatgctgatttgtactgtaagaggtttaagtatcgggttatttgtttgctcttccaaagagctctttttggtaaatattaagcaatttactattttatatcaatttgcttttatcgtagttgatgctgatgtaacagttataggttctggtcctggaggatatgttgctgctattaaagctgcccagttaggcttcaaggtaaggtttgaactcaaactaagtattgatttattttaatttgggaagggttgatcatatttataaagtactttgcaggcaaaaacatggtaaatacttccttaactctataaattacttgtaagcctgagactaataaagattaggttcatttggttgtagtattctcttggaatggaaagtgaaatctattagttttcttctcttcccagtacttttcattttggcatctaatcacactttggaagatacagtgatagaactaaaagcatatatttggtaatgttaagcacacaaaaatatcttttagaataattcacttttgggtcagcccaaaagtgtttattattattcaaatgataaattataaaggactatatattttagtctgtgaaaacatagcccgaatagcttgttttgtagaagaattaagacatatatttggaattttagtgatctgaaacattgaggttatgtgcagttaaataatgttttctttggttgtagacagtctgcattgagaaaaatgaaacacttggtggaacatgcttgaatgttggttgtattccttctaaggtgagcatgtgttttgtacagcacagagattgtttttggctagcaaccaactagaaggatggattgagactagattagacaaatacacttgttaaaaaacaatccaagttgtggcacatttcacacagagaaaaaaaagaatgataaaaaacacacttctcttttgtaaaacttaaagagtgctgtcactagtctgccacacattcctgaaataacttccttgtctcagaatgcctagctttccattcaaacagactctgatgttctagttttttctctttatctttccttcaccagtgtaacagataatagatagtaaattgttcttttaggtcctttttgtatgtaaacatgactgcctttttcacctgccaccctgaagtgtgtacttatgcctttacttttaaagaaagtaaaaatgtctttttcattcttgtttgttgaatgtttttcacatcattattgtttgtctttgattaataagagaaactgaattggtgtagt

SEQ ID NO: 126799 - DNA, 1053 bp, Homo sapiens
aaataaatgacttagtatttttagtgattctactgagatcacagtttataaatacatttatctcttcatatccttggaggattggttccaggaccccccttggataccaaaacccacagatgctcaagtgccttacataaaatgacatagtatttgcatataatctgcatacttcctcctgtatactttaagtcatctctggattacttataatacctaatacactgtaaatgctatgcaagtagttcctatgctgtattgtttagggaataatgacaaaaaaaccatgtgtacatgttcagtacagatgcaaccatcaatttttttcctgaatattttcaattaatggttggttaaatctgcaaatttggaacccatggatatggagggtcgactgtactaggttttttcaaattattttgattatatcttttgtttttcttacagatagatgaagatacaatagtgtcatctacaggtgctttatctttaaaaaaagttccagaaaagatggttgttattggtgcaggagtaataggtgtagaattggtaagtgttgtctttctgcctcttattacctccttggagttggaagggacttaaaggtcccctttttgattttttgtataacattacaggctgatcagcattgagttttgcttaaacacttctagtaataaagagtttacttttgtttttttcaagacaacctatttatgtatttactcatttagaatgttctcctttattttagtctgtttccttgtaccttccacccttccatttcctagaactggtcgaattcttttttaatatgacagccattcagatatttgaggacagcttttatcctgggcaaattgcattccaaataaagattattctctttaccatcacatacatgatttggctcttcccttctctatcctcatcttgatgcctcttaacttaggttttagaaatgtcaaactacttgcatttctttgaacaccatgttattttagaccttctgtctgccttgttctcccttcttgtccatctggcagctttcca

SEQ ID NO: 126800 - DNA, 4313 bp, Homo sapiens
ttgaaatttatgattaggttaatgctagaaagagaatccaatattctcattgttgtgccttcttatagtacattcagaaaaatttaaattcccaataataagtaaaattgaatcaatatttttaggcagatacatggggaaatcaataataaaagattgcttactatatgtctggtactctactgattaaatactttaatggcatttaacttattgaattagtttttaaataaatatttaaattaaatagttaatagtatttaaatagtttaatgacttttactcaaagataagaagctgaattcattgactaattaatgactaacttgtcacacagctagtgggtggcagtcagtagttgaatttggatttctgtgactcaaagacctgtattcttaactgctgttttattatactgtggtttttgtgagattttaataacagacctctagattttaatgatagatctctttcattgtctgactcttatgtttatattcaaataaacttatattgttaaaaatgtcatcagtgccggctgggcatggtggctcacacctgtaatcccagcattttgggaggctgagatgggcagatcatgaagtcaagagatcaagaccagcctggcaacatggtgaaaccccgtctctactaaaaatacaaaaattagctgggcgtggtggcgcgtgcctgtagtcccagctactagggaggctgaggcaggagaatctctggaacctgggaggtggaggttgcagtgagccgagattgcaccactgtactccagtctggcgacagagcaagactctgtctcaaaaacaaaacaaaacaaaaatgaaaatgtcatcaacacttgagaaattgctggccttaaatttctaagcctatcaatttatgtaggtgtgtatttaacatttatacactgtttgttatctagtattgaagctgcttctggtggtaaagctgaagttatcacttgtgatgtactcttggtttgcattggccgacgaccctttactaagaatttgggactagaagagctgggaattgaactagatcccagaggtagaattccagtcaataccagatttcaaactaaaattccaaagtaagttggataattgtctgcattttcagtaattttaaaattgatttcaaacagtattttgaaaagtaagatttttatgcttaaaatatgtattggctttggggaagaatagtaaacttacaaaatgtaaaataaaaaataactgaattttactcaaagataagctgaattcatagatttttgaagagctgcatttgatgtattttttggtgacttgtttactggaaacttttgttaccataatgtaactgaaggtaagtagctgtgatttcagaaattcattgtgtttcttttgatttctgtggtagtatctatgccattggtgatgtagttgctggtccaatgctggctcacaaagcagaggatgaaggcattatctgtgttgaaggaatggctggtggtgctgtgcacattgactacaattgtgtgccatcagtgatttacacacaccctgaagttgcttgggttggcaaatcagaagagcagttgaaagaagaggtaagtctgaacatgggtggttttaagccaatgtgtgagttgtgccaatgacattggtggttgagaaacagcattttatcattatgctaatatatttaacagctgtgaaatattgtttagcttatatatttttcccttgttagcattataaagagatcattcacagatttatcagcagtaattgagaggaagagaagttgcctatattaaaaaactagtaattccagatcttttatatttggctttgaaatataaccagatggacagacatttgtatttgcttgtattcgtgcctgagatatagttcattaaccagtcttctggtctttcctttccttctatgtgctttgcgaacaattcccttcttgggatttattttctgaacaaatggtagatgattttacaaattggaaagaacttttctggcagttacgtagattctttttttctgactgtcacagggtattgagtacaaagttgggaaattcccatttgctgctaacagcagagctaagacaaatgctgacacagatggcatggtgaagatccttgggcagaaatcgacagacagagtactgggagcacatattcttggaccagtgagtattgtaaaaccagagaaatcccattaagatttctagaaagcattgctgtttattaattataaaccacctggtgttagtctgaggttgctcatttccagcaaaactttgaatatggctctctgtgcatcatttctagaaggataccagcagcactctcacagtcttgcccactgtatcatctactttgtcctgcagccaagattctctctttaaaacatacaccagattatgccccttaaaatcctccagtggtgcttttcaacttcagattgttacatccaaggcctcactgaatctgtttgtgcctacttctctgacctcttctttttctgctctcttttactcattaatgccatgtcacatgggccttctctcattttcacaacagaccaaatatttgcattttagggcctttgtgcttaagataccctctgcttagactgttctgcctccagatctttgaatggctggctccttattattcaggtctcagctcaaatgttacctcctaagggaagcctttcctaccactgagcctaaagtatgtatctttcttgtagatatctcttgtatctgatgtaacaataatgagaatagaatatttgagtgctgtgtcactttagtatacattttgttatttttacatcagctttttgaaataggtgctgttatttttgaggtgaagaaactgaatgaagcacaaagaaccaatgaatggttaaggtagtaagtggtagatatgaattgaaggccctttggctccagagcccaagctcttctgtgtcaccttttctattaagcttttcctgacttttcttcaactgataaagaaacagatttaaggcgtttttaagatctaaaagcttcccctcaacaattgctatcctattagcatgtagtttttgccttggaagcaaatttacttggcttgttattttaaagggtgctggagaaatggtaaatgaagctgctcttgctttggaatatggagcatcctgtgaagatatagctagagtctgtcatgcacatccggtaattattaacaacatatagaattgatggttgcctaaattttcttctgacccacaaatatttggattttaattttaaatttcttcccttgcagaccttatcagaagcttttagagaagcaaatcttgctgcgtcatttggcaaatcaatcaacttttgaattagaagattatatatatttttttctgaaatttcctgggagcttttgtagaagtcacattcctgaacaggatattctcacagctccaagaatttctaggactgaattatgaaacttttggaaggtatttaataggtttggacaaaatggaatactcttatatctatattttacataaatttagtattttgtttcagtgcactaatgtgtaagacaaaaagctacttattgtagcatcctggaatatctccgtcaactcatattttcatgctgttcatgaaagattcaatgcccctgaatttaaatagcttttttctctgatacagaaaagttgaattttacatggctggagctagaatttgatatgtgaacagttgtgtttgaagcacagtgatcaagttatttttaatttggttttcacattggaaacaagtcagtcattcagatatgattcaaatgtctataaaccgaactgatgtaagtaaacggtctctcacttgttttatttaacctctaaattctttcattttaggggtagcatttgtgttgaagaggttttaaagcttccattgttgtctgcaactctgaagggtaattatatagttacccaaattaagagagtctatttacggaactcaaatacgtgggcattcaaatgtattacagtggggaatgaagatactgaaataaacgtcttaaatattcatttactggttatcatgagtacgtgttgagatggtcatagttttttttatgactacttctagtgtatattctaatttcttttctaggcctgaatgtatctttattttcatgttataggacaatattaaggcattttaaaggtcatcatcctttcatctattttagatacacctactaaatgtttaatatatacttttggagaagt

SEQ ID NO: 126801 - DNA, 1514 bp, Homo sapiens
tggctatttgaacagtttctaaaaagaatcatttgcattccaaccccacaccccatttctcttctcctcactcacttcttgcatatgctacaatctcacctttccttcctgtatcttttgtttaatctttttcctctgatttccttataagcaagtcttcacaaatcctaatttagtcaagatccaaagagcctccacttcttcaatatgggcttctctaatgtctaatctacttttgaaaaatctgcgcttctctatgtaatttgcaatacaattatgctacaacttttctatagaaaagtaataatcaggagaatgaggacttagccctaaggatttgctgcaactccagaattttttgaaatgttctttaaaatcatgtcaattttgcattcaattccactgtttgaagataaaattttaaattacttaccagtgaatatccttggtggcccttaatccagaatgcatgccatgattacactattgctcttaaatgtaattactgacactaacattaccacttctttctgtctaaatgtggaactatagactttagatggtgaacttgatgaaaagtataaaaaagtagaaaatttaattgccaaaaaaactgaagagtcagctgatgccagaaggaaagccgaaatgctacaaaatgaagcaaaaactcttttagctcaagcaaatagcaagctgcaactgctcaaaggtgggtcttttcacacaggcttattttttaaattactttaaggcatccatagtttatttaaaagtgaaaaatatattcactttgtcttgagatcatcatagtataaattgctcagactttatatatatatatctccccacagatttagaaagaaaatatgaagacaatcaaagatacttagaagataaagctcaagaattagcaagactggaaggagaagtccgttcactcctaaaggatataagccagaaagttgctgtgtatagcacatgcttgtaacagaggagaataaaaaatggctgaggtgaacaaggtaaaacaactacattttaaaaactgacttaatgctcttcaaaataaaacatcacctatttaatgtttttaatcacattttgtatggagttaaataaagtacagtgcttttgtatatattttggtgtacttgttactttcactgattgttgatgaatcccttttttcactgtaaacgtggatttataaacaagtttactgcgtccatgaagaccctaatttatgttgtctataaacaagctattatatttatttgacaggtaaacatcctccaaaactccacacccttgactcccctcctcccaatcacctcccagtgggattcccaggttgaggttaaggaggacaaatatagtctatgctaccatcactatttcaatggttgctgagttgctccagccatcaaaactcctgtaagtaagtattccttgctctaggaatgagaaaaagcaacattttagaaaatcagcaggatgtactagggtttgta

SEQ ID NO: 126802 - DNA, 1009 bp, Homo sapiens
gtttgcaggtgtccttaaaatgctttctcaacacatcatgctccttggggaggtggggttttttgtttttttttactgtcagaaaaaattttacatcaatctcagcttagatcatcagaagtactgaaagaatgaagtgaatatatgaaatgtagcaaagactaaagttagatacttcatgtaacttttcctgaaatattctttttagtaattacttcttttggtctagagcaaaatggcacagcagacttttaaatcttcctccaaacttgtactcatagtaattccatttcttaaactaatgtcttgctggaaaattgacatgcttttagattgagtctgaaacagcagcttctgaggaaaccttgttcaacgcgtcccagcgcatcagcgagttagagaggaatgtggaagaacttaagcggaaagctgcccaaaactccggggaggcagaatatattgaaaaagtagtatatactgtgaagcaaagtgcagaagatgttaagaaggtacgtaaatctttgtaatttcagagctatgttgttaaaggagccaccagtctcctccttgcctgccttagagtaagggacatggacctaacagaaacagaattcatcagaaatatcaaatgacctgttttgcaacagccgtctttagaagtgtggatgggaaagaatatggaaatatctaataagtatgacctatgtcctcaaatccaaatttggacaagagtttagaagaacggaattaacttaggggtagaagtctcaaaacaggctttttttttttttttaaaccaactatattgacaaaaaccagtcatattgaacttttatttctgtgcggtagtcagttaaattcttcatggcatatagtaattatcaggccatttgagaatattttacaagcaggttggaacagagaacaggtagtaggaaaccaaatcttatctctttgagactcattttgaattaactacccctcacctctcattcgaaggcactatatt

SEQ ID NO: 126803 - DNA, 1065 bp, Homo sapiens
gcactttgcttcacagtatatactactttttcaatatattctgcctccccggagttttgggcagctttccgcttaagttcttccacattcctctctaactcgctgatgcgctgggacgcgttgaacaaggtttcctcagaagctgctgtttcagactcaatctaaaagcatgtcaattttccagcaagacattagtttaagaaatggaattactatgagtacaagtttggaggaagatttaaaagtctgctgtgccattttgctctagaccaaaagaagtaattactaaaaagaatatttcaggaaaagttacatgaagtatctaactttagtctttgctacatttcatatattcacttcattctttcagtacttctgatgatctaagctgagattgatgtaaaattttttctgacagtaaaaaaaaacaaaaaaccccacctccccaaggagcatgatgtgttgagaaagcattttaaggacacctgcaaactttggctaaagaacattcacaaataagcagctgtgcgaagagggatttccacataaatttccaacttaatgtgagtgggaaaataaatgttaaactctagtagtggagatttcagctaattactgaagacatggagactagggatgttctttgaatttctatagaattgtgagatgatgtatggtctgggaacgttacagctgtaaactctaaatacacaaagttatttagggaaaaaaaaatatctgggcaactggtgaggatccacatctgatctcctttcaaagtagaatcaataaacattgacttttaaaagctagccaaagtaagcagttgagcccatgacaaaagaatcaatttcactgagcactcaatttttctttaaaatgatcttcaaggatgggtctaattacatagaattaactgaataacagtactgctataatgaagttaataagggtcagtataagacataggctaaaatttgtaaatatttcaaacctaaggaccctttaattagaataaaattcttagaaattataattcttagaagataaagtttgagtgaattg

SEQ ID NO: 126804 - DNA, 1876 bp, Homo sapiens
gttcaagtgttaccagtaaagatggttttggctgcaaattacagaaaactctcaagtgaaagggacttaatcaaaaaggatgtttattatctcacatcttaataagatatccagtagcaggatagcttcctgggtctgcgacccacatacttttcatctttctactctaccatcttaagcatatcagctttgtcctctagctcctcatggttacaaggtagctgccaaagttccagacatcatataaagattaataatggaagaagagaccacctattccttgcatctttttaaaaaggaggaagtcttccctagaagcctttaagcagtcatccttataaacctcactggccagcaataagtcacatgccaatgcataaatgtcactggaaaatggaaatgcgattacagtaattcacaaactaatatttaatgctgggttgataattttacctgacttagaggcaggtacctgaaaaaaaatcagtattctgttagcaagaaaaaaggcatggctaataaggagtcaacagtatttgctaaggatatcttaggtaatattttatggaagccatcattcaagtacatattttatttgaataaatcctctggggtccatttttatgttcaatagtttaaaacataagcaaagcttgaaagtaaatgaggatctgacgtatttgaagcttaacttcataaactttttttttcaccatcttccacattttacatttgaaactccttggctttgttgacaacccattattccggttctcctgcttctataattttctccctttctataatttcctgaatctagatcatttgtaggaaatatcaaatctccatatctgcattcacaagtttctgagctattcgtccaacctcaattaaaagatttcattgcctttaagtctcagctttaagctctggccctctatggttttccacaatgttcagattcactctgctatactttcccgtaacatactctgccgttcctgtctccccatctggaattgtcctttcttctttcaaattctattatcccttaaaatctgatcagctcctcatcttccacgaaggtttccctcactacccagcctaaaacaaattctagtagtactcaattgtctgcagttacttttttgtgtgtgtaggtctcatctcccctcaaaatcccagatagattataaactcttaaacaggaagttagtgtctcttggtgtgtaaccccaccatgctagtccatagtagatgaccagtaagtggttgaatgaatgaaccatctattcttttcacctctttttggggacatctttgcttttcacagaggatagtgctgatttggacagcattgaagcagttgctaatgaagtattgaaaatggagatgcctagcaccccacagcagttacagaacttgacagaagatatacgtgaacgagttgaaagcctttctcaagtagaggttattcttcagcatagtgctgctgacattgccagagctgagatgttgttagaagaagctaaaagagcaaggtatctaaagacatggcatctaaggggcttattttgtgtatctatcatggagtaaaaagtatctctttaaccaatgaaacttctaagaaggacctatgcgagtctctctgggtcatttcaggaaggctattctttaaagaaaagaacactgagagtacttttttcatgttcagcaacaatatactgtctcattattttttactcagcaaaagtgcaacagatgttaaagtcactgcagatatggtaaaggaagctctggaagaagcagaaaaggcccaggtcgcagcagagaaggcaattaaacaagcagatgaagacattcaaggaacccagaa

SEQ ID NO: 126805 - DNA, 1575 bp, Homo sapiens
caggtacttctagttctgtatctttgtggatgtttagctagagccatactgtgtttttttttttccatgtctgccccatctgttgaaacaaaacagatcttctatgtgtgctgtcagattgtttttagaaagcaaccgaggttttacacttatgttcttaagactcatgttttacagcatgcagaatacactttattttctgaagctttttgtttttgtaagccagataaatgacttatttagttgtaatttgagatataatggaattataattatcttaaaattattaggctaaatagttgattgtatttatttaaaaactacttttttgtactttttaataacaatacttgtttgggaatattctgttaactccttttcactgcagtaaatctttgtcttcttttcagtatgagaatttccacaaacagctctaaatgcaattttctccctgctcagccttttctatcatatagcacacttgtattataatttatcaatttgcatttgtatgccatgaccaagtggtgatctttgagaggttttggtaggtaagaaaggaggactctatgcatgtgtgatggcagtcgggggtggtaatttgggaacacttcatctacctttgttcctttgtttgtactgttttctttaacctgtggaatgttttcccacttcccctgctcaaatcccaccagccaacagcttcttcagctacaactgtagcattcctctgcagtctctcctttgtctactttctttcatagtgactgcatctgacctattcttggctattttatgtggaatgatccagtcctaactagatgggaagttactaaaacgctaggtaatagatcttttatgtcaccatatttactggaggagttaacatggtgctggtgctggtcccaaagatggttcacaataggttttttttttaaactctaactggttagaaaaaaaggaaggcattccttggcccttgcactggcagaattcaacttgatatagcagatgtttgcatcctgggcagagctcatatagtattttaactcatttgggcagaagatattgatgagttgtaaacttccattgtttccttggaaataagcaggttagtttactcctaaactctctgctcctctctccattctgtctcccaaacactgttttcaagcacccttgctgaggaccacctacacattctctggggccacccaggccctgcacagctgttttgctgcagcagattcactatccgaagtattgtgcctgatccttggcttgttgcagacctgtggaacacccccaggggcctcctgttccgagactgaatgtggcgggccaaactgcagaactgacgaaggagagaggaagtgtggggggcctggctgtggtggtctggttactgttgcacacaacgcctggcagaaagccatggacttggaccaagatgtcctgagtgccctggctgaagtggaacagctctccaagatggtaactcagtggatggcctcagtttttgttatgtatgtttgctttcagctgtggactaaaggatctgaaagggagaaatca

SEQ ID NO: 126806 - DNA, 1037 bp, Homo sapiens
tggtttcagggttaatcttcaccaggtaaagttactggaacaaaggaacataatagctaatacccgtgaaaaaattcttttgctccctttaatttttaatggaagccccttctagaatgactctgaattcctacactgagatgggttttataattcaaatcagaacaaactaaaaaaggaatgtccaagctgggtgtggtggcacatgcctgtcatctcagctactcaggagggtgaggtgggaagatcgcttcagcctaggagtttgaggtcagcctgggcaacgtagtgagactccatctctttaaaaaaaaaaaaaaaaaagcgggggtgggggtgggctggggtgttagcctgtaatcccagcactttgggaggaggctgaggtgagaggaggattgctggagacccggagttcaagactagcctgagcaatgtagtgagaccctgtctctacttaggaaaaaaaatattaaagaaatgtccacagtgtaaaaaggatcaagtttcagtgcggtgtcactgagtagctaaaacagtatgggagaatagtcatgattcattctttagttgaggaccacagagaaacagaagaggggaaggctggaaacccatatgctgctgcttttaatctgtcttggttacagataccccattccaggatccagagacctcagcctaggagtttcagtcctgctgattcatttgcaaattattgtaataatgacaaaagatggtttgtttttctttgttttttttttttttttttttttttttgcttggcaccatagcagtaaggccacatccccaaaccttaccatttcggcagcggctgaaaggtctaggctttgtagcttgcctgccagttcatcaaggaggcgagcctgctcctcttgtttttccttgaactgggattctcgctccatcatcacgtcttctactctgtctctcatgagggctgactgctccacagtgctgttgggttctgtggtggaggcattcaccctctcctctgcctcaagagacatctggaaata

SEQ ID NO: 126807 - DNA, 1123 bp, Homo sapiens
ggagggctactatattagtcatttgagtggatccgaataaaggattgagaaaagtcatctagtcatataatcttcaggctgcctgaaaccagctatttataaagaactggatgtttgcttgtgtatagaaacaagattgcatgattttcttaatttttcatttttcacccagatgtttgccatactcgagctggagtaggtgctaatgggacaaaacatattcattgctcatgaaaactgtacttcataaatattttttcttgaattttaaaactttacagtaaatttaggacccgaagacaccaaatatagacactgcttggggaggaagcctagtatgatgaggttaactgtgggcaatttcatttcctaccctaggtgccttggatagcattaccaagtatttccagatgtctcttgaggcagaggagagggtgaatgcctccaccacagaacccaacagcactgtggagcagtcagccctcatgagagacagagtagaagacgtgatgatggagcgagaatcccagttcaaggaaaaacaagaggagcaggctcgcctccttgatgaactggcaggcaagctacaaagcctagacctttcagccgctgccgaaatggtaaggtttggggatgtggccttactgctatggtgccaagcaaaaaaaaaaaaaaaaaaaaaaaaaacaaagaaaaacaaaccatcttttgtcattattacaataatttgcaaatgaatcagcaggactgaaactcctaggctgaggtctctggatcctggaatggggtatctgtaaccaagacagattaaaagcagcagcatatgggtttccagccttcccctcttctgtttctctgtggtcctcaactaaagaatgaatcatgactattctcccatactgttttagctactcagtgacaccgcactgaaacttgatcctttttacactgtggacatttctttaatattttttttcctaagtagagacagggtctcactacattgctcaggctagtcttgaactccgggtctccagcaatcctcctctcacctcagcctcctcccaaagtgctgggattacaggctaacaccccagcccacccccacccccgcttttttttt

SEQ ID NO: 126808 - DNA, 1142 bp, Homo sapiens
tatcccatagggttattgtgagagttaaatgggatcattcatataaaacatttctgtttaaagtattattactgctaagaaggggttagcaaccactgaagtcacgcatgtgctagaggaagctgctacagtctctacctgagccattggtcaattgttgtcgatggttgacaccttcccattttcacagtgaagtgagtattctaaatgccacatcttgtcactgaggttcatgattaagtagatcagctagcattgcttattcccttctagcctgtgactgtgaccccaggggcattgagacgccacagtgtgaccagtccacgggccagtgtgtctgcgttgagggtgttgagggtccacgctgtgacaagtgcacgcgagggtactcgggggtcttccctgactgcacaccctgccaccagtgctttgctctctgggatgtgatcattgccgagctgaccaacaggacacacagattcctggagaaagccaaggccttgaagatcagtggtgtgatcgggccttaccgtgagactgtggactcggtggagaggaaagtcagcgagataaaagacatcctggcgcagagccccgcagcagagccactgaaaaacattgggaatctctttgaggaagcagagtaagtagttaatgagccagaggaattactcataaagctgaaaaaatattgtgagttaacagcaaagatttcctggcatggtgcttccatcaggaggttttgttagtcctgtgggtgagaacagattctgagccatttattttccagcagtcttgactgggcatttgggtgagtgaacgttggcacatcagtggggaccagccttctggaggctgcagtacagaatatgcaagcattatattcagtgctcctccttgcaaatcatgttctaagtcagtaaaatgggaggaatgctggatttagaagacaaagatccataattgagtcttggctctgatgctaggcttgtgaacttggatgactcaattcctgagcctgtattttctctcctgtggagaaggggtaggataatatatgccattaccttatgaagtaatgaaaggatttatatataaaataacaacaggattgcagaaaattataaattaagtattgctac

SEQ ID NO: 126809 - DNA, 1027 bp, Homo sapiens
gctcttggaaaagggcagtgtctctaaacccaggcaaacggtaaatgtggggcataggcaagagggtccgggtagtggccacttccccatcatgctcgtttctcattttgtgttttttagtagaaaaacacagtgtgttcttttgcccagacattaatctttagaatgcctgtattttctaatgttgggatttctttcacaaccacccaccttaatatttccattgtgactcagaaaatcagacttcattcgattctttagagaactataaatactgttgtcagtagagtgaagtcttgtcttatgtaatcctaattacagaatgtgttctcagaagaggtaggctagaccagagctgggcagaccacaggcagaggccaaatccagccccctgccgatagtagctaatataagttttacacccacttgttcatgtattttccctggctacttgtgggcagcaatgccagagtcaagtcatcataacagagacagaatggcctgaaagctggatttactatttcaacttttacattaaaacttgatgacccctgtgctagacaggcagctcatttctgcaggtaaaattatattcatctcccaactttcattccaaaattgaacctatattactgaggccaaaaagggaaaaggataaaagagaatgtcagaaaaaagaaaatcccatgtaagaaataaaaattatttaaattgcccttgcttttagtaaatagaaatgcctaagtaaagtatcagtaaaattcttggcattgcagcagatcctggagtcccacgttgctttgaggcaaggtccacggcagaagaaaaccccattacctgaatcttagggtgtagcagtttctctgtcccaaggcaaatttaagtttccaacaaaaaggaggataatcagcccagtactgagtgaccaatggtatagagtggggagtggacacagagagaacagctgatactgttctgccacttgcaggctatttggggacatggggtacataaaatgaagtaacaa

SEQ ID NO: 126810 - DNA, 1617 bp, Homo sapiens
taatagagacggggtttcaccatgttggtcaggttggtctcgaactcctgacctcaggtgatccacccgcctcggccttccaaagtgctgggattacaggcgtgagccgttgcacctggtcatttttatttttttctttacatccacattttctggcaggagtgaggtctcaagatgtgactcagtgcctgggagagataacaggaaagaaaaaccatgtagctgtccccatgataaatggcatccagtagagggtactgatggtatgctctgcccatgaacttgctggttggatggacttcgaaatcctaaatacccactgtggtcccaccttttctagtggcattgatggaatagagccttccagcttaaggaagagaaagaagtagcatctctaacatctctcttttggacctctttatttctctcttaccgagatcaactagcatttcctcttgctgcagctgcacagcccccaggctcctggctttgtttatacaaacatgtgtggaatgctagggaccagcaggactggattccttaaaagccttagtagcttaaagggcttttacctgctatgtccaacacgtttattacggctgttctctgccaagagtttgaaattattagatatctcaattcccactggcattttttaaaattatttccagttaagccttcaattttaaaatgactcaccagcatcttgtcaaatctgtgtattttgaacatacttttaggtgaaatgtgtcattgtgtgtatctgggaaatgtcagaactgtgtaagaaatcacgagaacttctaaacagtaattttagctttatttttgaatcacctccatttctttccttctttgcatttcaaggtcaagatgtgaagtgggaacatcttagcatttagatgtggctaacatccgcatgcctgtgtatttgggagtgtgacaataagtaaatgtgatgttcttttgcagagtgtgtctgtaattacctgggcaccgtgcaagagcactgtaacggctctgactgccagtgcgacaaagccactggtcagtgcttgtgtcttcctaatgtgatcgggcagaactgtgaccgctgtgcgcccaatacctggcagctggccagtggcactggctgtgacccatgcaactgcaatgctgctcattccttcgggccatcttgcaatgaggtgaggggctgctgctggggatgatgcctttatgagctcaggtgtcagcccatggtgactttgccccagttagagcaaggcaccagggcacacagcttgaaacacagcgtggcctggatcttagccctcatttgtaccccttggctgggtctacataactgtgcacagagtccccatcagacacatccatagcatttcagtagagggtcccagctgcagatgcagactcacttaacaatagacaagggtgtgctatttctcttcagtacctgggcgctgaagcagactcttttcttagcttctcgaaaggaaccaattagccatacccagcattgtaaaaagtgctgttgtttcctgacacatgctaaggagggcatactccctaagtcaggcgagtcaaaggtggcccaggattgtggctgatctgtga

SEQ ID NO: 126811 - DNA, 1023 bp, Homo sapiens
ttgagcccggaaattcagggctgcagtgagctattatcatgtcactgcattccaacctgggtgataaagcaaggccccatgtcttaaaaaaatgtaatccttggattaggatttctacatgaagctatgctttacattgttagtttgctcccaacatgctccacccccatgtgctcagaagctaaagtctcatgtgctaggacctaactgtccacagccgctgtggcctctggggcagttgcaacactgttagagactacaaaacattagattggtgcaaaaagttactatggtttttgccactgaaagtaatactgccttcctctcacaactcaaagcctattctttccccttcagatgtgatcaccctgggctctttaaacagtgcagtgaagatgaagcaccgccacgatcagctctctctaggcatgagtgtcggtgcactggtgagctttcagtcaataagctaaacatcttgtgtttggttttatcgggtgacaggttccagatgtgacgactgtgcctcaggatactttggcaatccatcagaagttggggggtcgtgtcagccttgccagtgtcacaacaacattgacacgacagacccagaagcctgtgacaaggagactgggaggtgtctcaagtgcctgtaccacacggaaggggaacactgtcagttctgccggtttggatactatggtgatgccctccagcaggactgtcgaagtaagatgcacatttattctgcccacttcttagaatgacttccacctttttttcattatcagcagattttattcttcctgtatttatttcacttgggaaaacacttgttcagagaggtaaaatttcactttcaactaaggaaagatgagaccaattttttttttttttttaatgagacagagtctcactctatcacccaggctggagtgcagtggcatgatctcagctcactataacctctgcctccagagttcaagtgattctcatgcctcagcctcccgagtaggtgggattgca

SEQ ID NO: 126812 - DNA, 1051 bp, Homo sapiens
ggctgaggcaggagaattgtttgaaccaggaggtggaggttgcagcgtgctgagatcgtgccactgcactccagcctgcgcaacagagcgcgactccatctcaaaaacaaacaaaaaaacagccaggtgtggtggtgtgtgcctgtagtcccagctacttgggaggctgaggcaggagaatcacttgaacccaaaaaacagaggttacagtgagctgagatagtgccactgcactccagcctgggtgacagagcaagattctgtctcaaagaaaacatgaggagtggagaagagtgtgcccaaacagaacagttttcaagactttccttggaacaggtttcttagaactgtggggtcatggcctgttctcttctgtgactgatgcaggtgcttggctggttactatggcgaccccatcattgggtcaggagatcactgccgcccttgcccttgcccagatggtcccgacagtggacgccagtttgccaggagctgctaccaagatcctgttactttacagcttgcctgtgtttgtgatcctggatacattggtaagtcgtgtgcatactttgggaggcaaagagagagaaaaagatgtctttatgagttcattgttaatgagaaaaaaagatgcaaagtgaaccaattaagtctacttttataatttttaattaaaaattagaaaagatgctcttttcctatttggcacatggagtggagtcaattcatattgagtctctgataagaacgttataacacaaagcaggaaagtaagctcgtggaaatctagaaaccctgtggaacacttttctgttattaaacattagaaagattaacttaagttttactcctgcctttctttatccaactcctagcaaaagtatctcaaagctgtgaggttaccaaatagtagtcagaagaaagaaataatatcatccagggaatcacaagatggccgaatatattcttcactgttaatgatactcacattatctatcaagattcaattaatctagctgggttgttaaaaactccctcttatttcatcctt

SEQ ID NO: 126813 - DNA, 1085 bp, Homo sapiens
tctcagttacagtttgtctttatctttttaagtaatatttcagtgaaagagcaccactgaagatggaattgatattcaagaaatatgcaaataacaggtgaccaggggaaaagtccatgaggataaagcatttccataagcagggtagggagaggggaatggaatcagagaagcatcaaatacctgaaatgtatgtttttctctttgaaacgtcagaccatcctctgaaggtcactgggctttggtctaatgtcctgtgatatttgagctttgaaggcaaggggagaaaacattaatgacctcctgcctagaaaaactgttttgatctgccaactctgcctcccctttcttcccttccgctcatcatagggatgatactgttttaaaccagaactctgaataatccaaagtagttaaaggagaaaggatcagggagagcccgatgatgtgctgctccgtgtcatgggttctggcctctctttacccacagcttgtgaatgcgaccctcagggttcgttaagttccgtgtgtgatcccaacggaggccagtgccagtgccggcccaacgtggttggaagaacctgcaacagatgtgcacctggaacttttggctttggccccagtggatgcaaacgtaggttcctcaaaagcattgttatgcattcattcagattaactcagccattgtggcagggttccattgctgcagagccgatgcttccctcctgaagttgatcacaccaacccatgagcattctgaattggggacagggtgcttataaaaggagcatgtttccattgaatgagtttctcaaggcagttccttgtttgcctgtttctttagcttgtgagtgccatctgcaaggatctgtcaatgccttctgcaatcccgtcactggccagtgccactgtttccagggagtgtatgctcggcagtgtgatcggtgcttacctgggcactggggctttccaagttgccagccctgccagtgcaatggccacgccgatgactgcgacccagtgactggggagtgcttgaactgccaggactacaccatgggtcataactgtgaaaggtatgcaga

SEQ ID NO: 126814 - DNA, 1461 bp, Homo sapiens
taaatgtaccattttctttctttcttttttttttttttttttgagtctcgctctgttgtccaggctggagtgcagtggtgccatctcggctcactgcaatctccgcctcccgggttcaagcgattctcctgcctcagcctcctgagtagctgggattacaggcatgcgccaccatgcccagctaatttttgtatttttaatagagacggggtttcgccatgttggccaggctgatcttgaactcctgacctcaggtgattcgcccgcctcagcctcccaaagtgctgggattacaggcgtgagccaccacacccagtcaaaacgtaccattttcttgaatccagtttctcaaacgtagtgatcttttgtgaggcactcaaccttgctgacgactgaggtggtgatgaggatgtatgagatcctctccttccctcacaacctggctgtgcagtgacagactgaagccccgaactgtaacgaaagactgaaggtgacggtgtaacagcagagagatgcatgatcctagaagatgggcatgcaccagccagcccgagccagggctaccaaaacgttttcctagagaatcagagctaggccttaaagtgtgaatggaattgtggaaagttggcacaaaagtaagaaatagtgtgagtggaagagagaagagagggttttgtttttattgagaatcattccacatagcttgatgagagatatggttggagatgctgttggcaaaaatactaggattagtaaaggaatttggactataatattcacaggaagctattgaagcatttcaagcaggggattgtcattatctgagctgctttaaagtggactgaaagggacattgggaagaggcagaaaacagttgagaggtgtttcagcatccagggcagaagggatttgggctggaaccaggggagtagcagaggtagtagtaaagagaaaagtgaagagcaactgtttgttttccatttcaacttggcaattgattgattcagagaggtctttttataaacaggcagtggtgggctaactatcttttcattgtttgtttcttattctagctacccgaccactgggaaaaagctgtcatcacagtgcagcgacctggaaggattccaaccagcagccgatgtggtaataccatccccgatgatgacaaccaggtggtgtcattatcaccaggctcaaggtcagtgtgacggtggtttggcagctcaacgggcttcatatgcaaattagtatttttctaatattttgcgagttttcaagtcaccatttcagagccagacgttgactgctgacttttttcctttggaattatcgatgcagagctttgtttttaatttttattttttggatgcatgaaggttgactttcgttgttgtctttcttttttgtttgggggcagatatgtcgtccttcctcggccggtgtgctttgagaagggaa

SEQ ID NO: 126815 - DNA, 1071 bp, Homo sapiens
cattttgatttgttgcattggttaatttctttattgtttatccccaattagactgtaagttcttgaagacagggactatttttttttctatttctctttctgtatatcatttagccagaaataatagacttagtgaggaagtaaggattcattcagaacaaagttcacaatggactaaaatgtgagaatacctgcactgggaagcaaggctgctagggccaatatttgatcagtaaatatttgctgaagagtatgaggagtgtggctcattggaaagcaaagagtcggcaccagaaagagaagccgttttcagaggatgggttatggaggctgcagaaagccaggcagaggcatcatggcttgatatcataagaaacaattgtgggttttcgtgaaacaatgaaagcagcactgtaggaagatcggttggcccgtggtagacaggatggactaggcagaagaggaagaagaatttgagaggtcagtttaggagattgttagagtaacaggtatggggtgatgccatcctggactgacgcagtggcagtggcagtgacaatgagaggaagctgctaagttgagaaacattttgaagtaaaagctgagtattgggataaaggaaagagaaggtgatgtctcacctataccatgagaagaattttaaatctactggcagaaacagcagagctgaggataagaagtcagtgtgggtggtgatgatctgtttgggacaagatgaattagagatgacagctggccagtccatggaaatgtcccattgatggctggaaatagagaagcagagcccagccacctgctgggtgctgagagctgtagggtgagggccatctgcataggaaagccacaagaatgagttcactgaaggagccagtgttgaatcagagccatgcctatctgtgatgacaattcaagcctgtggacacagacttgtgattggcagggccgctgttaagggaattcctttcacatgatcagctctcatggagccattccttgtttagaattgtgctgcagatagaggcagcaccgggagcctgctggcgcctttgt

SEQ ID NO: 126816 - DNA, 1077 bp, Homo sapiens
tgtatagtgagctaaatggatttttggtagtacaacaaaagtttaataatccatgtctattatattgacaactaacctgaactttggaataattaaagaagtggccaggcgcgttggctcatgcctgtaatcctagcactttgggaggccggcgcgccagatcacctgaggtcaggagttcaagaccaaccaggccaacatggtgaaaccctgtctctactaaaaatacaaaaattagccaggcgtggtggcacctacctgtaatctcagctacttgggaggctgaggcagggagaatcgcttgaacctagaaaacagaggttgcagtgaaccaagatcacgccattgcactccagcctaggcaacagagcaagactctgtctcaaagaaaaaaaaaaaataataagacctaattaatttaaataatctaactgaagccaagttaatgaagttttgcctagtagattacctgttttaatgaaaaagaattggcattggttgctaggtaaatgctacttgtaaatgtttaataacattgaaaaatataaacatttttacagcatccttcaagattattttaacaatgaaatgtagagttttcatatctggcttgaagcccacccccccctttttttttttttttttgagacagagtttcgctttgtcacctagactggagtgcagtggcattgatcttggctcactgcaacctccgcctcctgggttcaagcgattctcccacctcagcctcccgagtagttgggactacaggcaccagctaccacactcagctaatttttgtatttttagtagagacggggtttcaccatgttggtcaggctggtcttgaacttctgaccctcaagtgatctgtctgcctcaggctcccaatgtgctgggattataggcatgagccaccatgcctggccccacctcttttttgaactcaccgtggtgaagccccgaaccctcccttgatgcattgcttctgcatctcttttagcatttattttgctcttatagttgtgttaaaaaggtctctttggacagagattatgtcatctttgtttttgcatc

SEQ ID NO: 126817 - DNA, 1052 bp, Homo sapiens
aaacctttttaaaaaaatggtgatttggctaagtggtaaatcgtgcagtaatataaattggtttccaggtggtatgtatgcatttagttctacattataacttttgtagatttctattacaataggttttcttaaaaaaatcttaagtaactagtttttttttttttttttaattttaagtaattttcttcatctgggttcttttcatagatactcagtaaaatatttcttgtgcatccactatgtaataggaacattctagagatgaggcatgtagccatcaacaagacagacaactcactgcaggcagggagaaaataaaaacaaccaaacaacccttttctgtggtgagctagagattagtatgaaaaagggttttaaactttcaattgattatggagaaacgtggctattcatacatctcttcctttgttctctcctgtttttataactttcaaggttcacggacactgcatgtgcaggcataacaccaagggcttaaactgtgaactctgcatggatttctaccatgatttaccttggagacctgctgaaggccgaaacagcaacgcctgtaaaagtaagtctgtgttgaagggacattttaaatccattcaggctctagtatccatttcctaattagaggtactgtaacagtgtactgttttgcagagggtagaaaagttactgtcttttttccagcttcaccctgatactcctagacaaccaacaatctgcattcagttaattaatattcactgaacagcctctgtgtgtttgacactgagctgagtagtttggcagctacagtagaaaactaaggtgctgtccttgacattgtatctgttttgttttttggtttttttttgtcgcctaggctgtagtgcagtggcacaggcggctcactgcaacctctgcctcccaggttcaagcgattctcctggagtagctgagattacaggcacgcgccaccatgccctgctaattttttttgtaattttagtagaggagaggtttcatcgtgttagtcaggctggtcttgaactcctgac

SEQ ID NO: 126818 - DNA, 1665 bp, Homo sapiens
tctagttactatagaatgaattggtagcccagcatttacaataagcagaagtctgcagacctaggaagaagagggaaagataaaattgatttagaggtaacttgtatttgagaaaaaataatttgccccacatcctaatactaagcttatttatgcttatgtcactatataatattgagaaacgtggaaacgttttgtaaaactgggacaaaaaagttgtggaccaaaatgttgcttaaaaacttgaaatgttctctccttaggttgtagttattctatagcgttaacactattttggtaacttggatgtcatttaagcggtgggaaatttcaaattttcccttccaaaaatagagacaaaaatgtttctaactatcttataataacaatgagaactggagtgctttgataaatcttttcctacctgaatggaattttctcatgttgaaactgacattaattgctgtgggaagcagatggcattgtgctacttcaaattactgtctgcccgcaggttccagcagtcatgcagctgcgttcttataatttctccactttcacacttcttcctaaatagctgttctgcaaacagacccatcacagaatagctactcttttttgttgtcgttcaggcaactctcctgcctcaacctccagagtaactgggattacagatgcctgccaccacacctggctaattttttttttttttttttaaacagttttgctcttgtcgttcaggctggagtgcaatggcacaatctcggctcactgcaacctccacctcccaggttcaagcgattctcctgcctcagtctccctagtagctgggattacaggcggatgccatgatgcccagctactttttgtatttttagtagagatggggtttcaccatgttggtcaaggctggttttgaactcctgacctcaggtgatccgcccacctcggcctcccaaaatgctgggaatacaggtgtgagccaccgcgcccggtctaatttttgtatttttttagagatggggttttgccatgttggccaggcaggtctcgaactcctgacctcaagtgatccacctgccttggcctcccaaagtgctggaattacaggtgtgagctaccacgcccggccgacattcttatgaaactgatgagagggcagtaacctttcctctttgcagtcatgttatgttaggcttcactattggagtcatctagatcatacaagaggaggaacttaagctattttcatgtgtcatgcctttctctaaaaagaaatgatgcaaggaaaaaaaaaaaaacttcttgcttgtctgatcagacttttcatcttcttgatgaccttcctagatttattaaaaattaccaacttgagaatcaagtttgtgaaactgcatactttgggagataaccttctggattccaggatggaaatcagagaaaagtattattatgcagtttatgatatggtggttcgaggaaattgcttctgctatggtcatgccagcgaatgtgcccctgtggatggattcaatgaagaagtggaaggaatggtaagtaagccctctgtgcacctttctcctttatgtggctggtaataaaatgcaaagtgaagctagtcttaccttaagccttttacattttctgggggttttagttttacag

SEQ ID NO: 126819 - DNA, 1767 bp, Homo sapiens
ggcaggagaatcgcttgaacccaggaggtggaggttgcagggagccaagatcgtgccactgcactccagcctgggtgacagagcaagactctgtctcaaaaaaacaaaaaaatgagatgtggaagttgcacacgtcacttctgctcacatctcattggccagaattagtcacgtggctatactgcaggagacactgggaaacatctctaggtgtttcatgtgctctactaacactcttggcgagggctcttactgtcaaaggaacaagggaagaaagaatactgaagagaaatcagaagtctctgccattctcaatatactcaataaaatgagggttgcatttccgtttaatagaaaaataagctgaagcttatagagttggatgttattacgtaaagtgatatggctattaaatggcagtcagatcttgaatccatatgttacggtgctcagttcagagctctttaccacattcaacaactgctcttattacacaattacattttaatcttcttgggaggcatgtatggtaattaaaagaatgggctcactgggcgcggtggctcacacctgtaatcccagcactttgagaggcctaggcgggtggatcacgaggtcaggagtttgagaccatcctgaccaacatggtgaaaccccgtctctactaaaaatagaaaagttagccaggtatggtggtgcgtgcctgtcgcttgaacccgggaggcagaggttgcagtgagctgagatcacaccattgcactccagtctgggtgacagagcaagactctgtctcaaaaaaaaaaaaaaaaaaaaaaagggctttggagtcacaaagtcctggatttaaatgtgttcataaatcataaatgtgttcagtacatcaaagctgttgctacatttgttgctgttgatgttgctgtgactatcagctttggtttgggttttgcacaggactagttccaaatgttggaatgaaaggtgagcctgcctctcctgctactaaggtgcaaccagttgagtagaggcggggctgattcttgctgatctttcccagctgcacaaggccctatttttaaccaaggccccaaaaaacttccaagcttgaagcaaggaagagtggagtggaagaagtccagggaatattgccagaaaaatgctgcttccccatttaaattaattttacatgtggcccagcctgtctctggtctgtaatttactcattcattctcttgtaaaacaaatatttaatagatgtgtccagctctgtgccaatttctgagtgagccatgaggcctttcctgcatgtctcaaaatgcagttatgaaaaacgtccacaagggctctgggacagacaccccctaagtccctaaaaggactcaaccatctgctccctttaaggtgaaatttgtgggacttggaggatgtgttgtctttataattttgattcttttgtcttttgtggttaaatgacatcggagaatctttttctatgttacggaagcatgcatgttagctgatcatgcatttgatttactttgtaatcaagggagcaatatctctttagttgtctattgttgagacctgagactcacttcaaaagtgatttgccacttagaatagcagtcaagatgaggctcgctttttaaatatggcaggagagagtggggggagcatatttgctctactgaggggtttccacaaaggtcagttcaagggtttctaaatactccagctgctcttcaagtttgttgtttggcctcttgtcaa

SEQ ID NO: 126820 - DNA, 2477 bp, Homo sapiens
gtatatatcatattttgtttatcttcatcagttgatgggtacatgggttgttcccgccttctggctattgtgaataatactgctgtggtgaacattcatgtacaagtgtctgtttgagttcctgttttcaattcttccgggtgtatacctaataatgtggaattgctcgattttccagcttcttgagttattaatttcttcctcttgcttttccaaagcacattgcatgcaaccctactatggtgtttgacatagcatattgcaaattattgacacccatatctgcacctcattggactgtgtataacatatacaacatatagtccactggctgatactaaggaggtagtcatacctttattgaatgattaaatgaacgaatgaaggaacgagcactcaaacttgccactcatattacagtggacatggtgactaaatatacgaaagtgtgtttgctatttaggcctgtttataatcagcttctaaagagaaacagtttacttatccagtagggtggggaaaagtatacattttagaggttagacattttccttgcaagaagagtctctgtggaacagcttgaattatttgaaatccagccacagtctgaaatacaaaccatatgcagttcaagtttgtggcatgcagttgagtgacatttttacctgagattaaaaaaagtagagactaccaataaaaaacatcaaatgagatttttgctcctgcctttagacattccgtccagctgctatgctgatagaacgatcgtccgactttgggaaaacctggggtgtgtatagatacttcgcctatgactgtgaggcctcgtttccaggcatttcaactggccccatgaaaaaagtcgatgacataatttgtgattctcgatattctgacattgaaccctcaactgaaggagaggtttgtttgcttctgtgttttacattctacttgcaaatctactttttgattattgcagaagtaccaattactcttgtttccatttttaggtgatatttcgtgctttagatcctgctttcaaaatagaagatccttatagcccaaggatacagagtaagttcattttcaaacaaaagtgttttttgttagtttgtttgtttgttttgttttgttttttgagacagagttccgctcttgttgcccaggctggagtgcaatggtgcgatctctgctcattgcaacctccgcctcccgggttcaagtgattctcctgcctcagcctcctaagtagctggaattacaggcatgtgccaccacgcccagctaattttgtatttttagtagagacggggtttctccatgttggtcaggctagtcttgaactcccaacctcgggtgatctgctcacctcagcctcccaaagtgctgggattacaggcatgagccaccacgcctgacccaaataaaattttttgtttgtttgttttgttttgttttgtttttttgagatggagtttcactcttattgcccaggctggagtgcagtggcgcgatctaggctcactgcaacctctgcctcccaggttcaagtgattctcctgcctcagcctcccgagtagctgggattacaggtgcccgccaccatgcccagctagtttatttttgtatttttagtagagacgggttttcaccatgttggccaggctgggtctcgaactcctgacctcaggtgatccacccgcctcagcctcccaaagtgctgggattacaggcgtgaaccagcgcgcctggcccaaataaaagttttgatggtaaacagcagccatggaataagtcttactcagaatctaaatattcagtgctaaatctacctttttcattttccttctttctctgtgttacctgaccagagggtcttgaaattagcaataattactctccactgatagggaatacatttacatctgatataagatgtaaatacaatacatccgatataagattgataggttatcaagtaattgtgttgatcataataccttattttattgctcagtatattagggtatatattgggcttttgtatcaaagagtctccccaaatctagttgttcaaataaggtgaaagtttctttctctcttacaaaacccaccaaagagttttctagagaagaagtgtagctcaattgccataattaagcttaccagataaaatacaggatgatgcccagttacatttgcaaataaataattcttttttttagcataactatatcccatatatcccatataatatttgtgactagtacaagtgtgtctcatgcaatatttgtggttggtataaccatgtcctatgtgatatttgagacatactttatcctaaaaaatagttgtttatctgcaattcaaatttaactgagtgtcatttatatttacttgttaaatctggcaaccctagttataaggccatccatgtttccaggtttattcacatggttagagttagaccaccacca

SEQ ID NO: 126821 - DNA, 1066 bp, Homo sapiens
cctgatacaggaagaccacagtgaaatttcagggtgttacctgtttctaaaagagggcccaaattttagatttcaggggtcatatttatacaaagtcaaaagtaattttaaaagaagacacaaagtgtaaaatattcagaatcagaatacttttccttcatttttaaaaaggaggctggccgggagcaaaatggctccatgcctgtaatcccagcacttagggaggctgaggtgggaggatcactggagcccaagtgttcaagaccagcctggacaacatagactcagtctctacaaaaaatttttaaaacttagctgggcgtggtggtccacacctgtggtcccagctgtctgggaggctgaggtgggaggatcacttgagcccagtaggtcgaggctgcagtaagcgataatcagtccactgcattccagcttgatcaacaaagggagaccctgtctcaaaaaatttttttaaataaaggctgatatttctggcctctaacaaaagcagaaagtatcagtttcacattcggggcaagttccaagctaattgctcagaacatggtcagcccacccacctgtacaattgcccttcagaaggaggacagagtattgtgtgtggtttgcacagcagatcccttaaaatggagtcacttttacaaagcagaaagcccattctggagacctgatcaattagaccaaaggaatgtggtaaagtggattccgttcatttgcttccaggtttatacagagatgtctagactgcttcctcctgattagaagggaggctgtaattaaacttttttaaactttttttttttttgagttctggtgattgttctccagtactagtttccttgactacaagttattgaaggcagttgatgttacttttctaatattagcatttaaattttacctacaatattatgctaacacttacttgagaggccaggacatcctgtaaatgaatcaccagattctgaaatcagctttgaccaaaatgagaatcacactgtttgtattaaaagcaactggaaagactatcctctcagtgatgatttct

SEQ ID NO: 126822 - DNA, 1033 bp, Homo sapiens
aaaaaaaaaaaaaaaaaaaaaaaaagactgagagttatgtcactgataaggcttttaaaaggtactaattaggaagatgggtggcactcccaaagtcaaaggtcaaccaaataatggtgtctatcaccaacgggattaaaaagtcctctggatagatgactggattgtcagctccatagttcatgatttccaaataggatcactgagaaatcatttagtcccagatccttactagactggaggctaacactggcatttcattagccatgctgcagagaacaaacacatcctacaacctctttgcctggcaaacagcccaatatttgaaatagaacctaatcctggagtgagaccgagtgctgacttgtttctgatgtgataaaaacacagcactcagctctgggtgggctggccttcataaatctgattagcagccttagtagcaacaagcatagcagctatgatgaaataaatgctctctttccagaagaacaggctttttcttttagaggaactgtaactgtagagttaattaatgtagaaggccaagggcattatggttggagagaggagcaagaccacttctatttgagagaggagatggcttttactagtatttttatcacttctgaaatgtgctcatagcaaagatccatcttacccatcttcccagggtaaaaatactggattgaaaattaggattcgctttctgtccaagccatgaatagtagtagagtgtttaacttgctcattgaattgtttcctggatcaccctaggtaataattaacaacccagaactatgagatagtctactctattgctacaaacctatcactctgatcctctcatacaaagatattgcctgaaccttactggctttaaaataaaggtgaaataagcagcacttttcatttagaaagcatttcctgagtactgactatgtgccaagcacaggattaggaactcacagggaggtgtggtggggatttcagggactcactgaaagcagaacttgacctttcaaagagagaa

SEQ ID NO: 126823 - DNA, 1040 bp, Homo sapiens
gtaggcaccattattactccacttacccctcaagtcagagaggtcgagtacctgccaggtcgcccagtaggaacgtgacagagctgggattagaagcttgtcgttccgtctccagaagaaaggcctcactatacccccactgcagggtcacaaaggtccacaggccaaggaggacaggctgtctcagaaagggcagcttcggtcaacacttggtatatccaatcagtgattctggacccctgcaggctgcatgtggttactggttctggattatttatgaagaatctactatgtataaaaatgacctgttgttaaaattgttagaaatgtttaggaaaggaaaaagtgactttatccaaagttagattcaccctcaaaatcaagttgtagcatttgttgtccttctataggacaaaagacaactcctttagaaaattatttttcactcagcagtgtaatgcctacagttccagcagcaactgccagatagtttgaggtgaggaatcgtgataggtgggccttcttgtgtgccagtgatggagagacaggacaaggtcacaaccagttcttgtcactttttacatataaatgtattaaaaagaacaaatattgattcacctctagtgaccttagttaacacatcgcctgtaagagcaaatgctgccagcattctagaatgcctcagtttaccattacgctgcctcccttttcccagttcacaatgcttcatcctttggggctgctgggttaactccagtgtgaaagcaccgtcttccactgcccctgctcctgctcctgctcctcctctcctctcctctcctctcctctcggttccgcggtgtaaggatgtcaatatttggcatgaaagcctatcattggctaatttttaaactctgcattcatgatctacttctctctctttctctgatttctgctaattttaggacactggactcaactttatctatagttatttcatcaatcttcctaccattacaccatctctcccttttataccctggatttctaaggtatatttc

SEQ ID NO: 126824 - DNA, 1027 bp, Homo sapiens
gctgtgctaagttccaactactgaggtcagaatatatgcagggttaagattaaaggaaaatttcccttggcccctaccttaaccccagagaagaaaaatggatgcttatgcagatgattttcctagtgaaggtaacagattcacactcactttgtttcatccgtttcacttctcctctctgacatacatgcctttttttcttccctggttattttcctattgatactttcaaaagtacaatccttctagccttgcaactttcacattcatcatggtcatgttgaccttgaacatggcattttatgtctgacttcaaaatataatgtgtttttattctcattgtgataatttctgtaatgaaggtttaaaggagctaaaggaagtgctcttcatgaagatatttatgttttacatgaaaatggaactttggaaattcctgtggcccaaaaggacagtacaggaacttatacgtgtgttgcaaggaataaattagggatggcgaagaatgaagttcacttagaaatcaaaggtaaggcagaggtaatgtgtttaatttttaaatgactttgaacaaattctccagctttgccaaatggataacgatgactctacatttcagatcctacatggatcgttaaacagcccgaatatgcagttgtgcaaagagggagcatggtgtcctttgaatgcaaagtgaaacatgatcacaccttatccctcactgtcctgtggctgaaggacaacagggaactgcccagtgatgaaaggtatttgaagacgatttctttactttctcttcattctttctttaagctattcttgaactaaaggtctactatgtagtcaattatggtgatgtttttagtttctgaagtctgctgtctccaaaatagagagataagcattttctccctactgtaaaatatatgcacccaagaaggtatcaggtgattgaaataggaccctgagaatgtttgtctatctttgcgtgctggtctcttgtgtaattcaggatgggaaaaaaccc

SEQ ID NO: 126825 - DNA, 1002 bp, Homo sapiens
gtttttctctgtacatgtttaatcccagctgatgaaaaattataattcagtatcattaatataatagtaattcttttgattaacatagtagcttcatgtaaaaatttccaagagttccttattagtcacaacgttgaaaaaaataattaggccccatcagtaaagcaactcatgctggcattcatactgtatcattgacatcgaagtttatggtgtgccatcaattagtatagttctgattatgtgaaaacgtaaaactgtgagcattatttataaaagtgtggtgctaattaaaatatctatgtatttcttatgattttttaataaagatttgttacaaagttgcatgaaaattcatcctcaaaagtagtcataggtggattccttttttgtaacatcattatttatttatcctatcaggcctaccccaattatttactgggcaaaggaagatggaatgctacccaaaaacaggacagtttataagaactttgagaaaaccttgcagatcattcatgtttcagaagcagactctggaaattaccaatgtatagcaaaaaacgcattaggagccatccaccataccatttctgttagagttaaaggtatattgtttaaaatccattcttcttgccttcatgagagaccctgaaactttaattaaatgtggttttcattacatttttagtaatggtaaatgtaaagttatgtcaacattcatggtaccttgactctcttctcattgctattggtagtgcatctaaatcaggttaaaaatttacttgttcaaatcttcctcacaaaagaatcccagttaatgaatataggaataatgaaggaaatagaaaagtcaatattagaatcccacagtaataactagagccggcaagatcaaacaatgaatgctaaaattagtgggtgaaactttaaggagaaacaggatatttgcatagcttcaaagtgtttctatcccgcagaaattaattactggggaagttttag

SEQ ID NO: 126826 - DNA, 1032 bp, Homo sapiens
aagaagctcctaaagttgtgccatgggcaacactgtgaagatcttctatagatattcagaaaccgttagaggttttctttttttaacatcagtaactaaacttggtaattctgtttgcttattgactaattaaaaaataagaggatataggagggagggaaatgctagggacctctcggggtgaggcagtgtgagatggctaaaagctccagaaccttccggaactggagctctagatctggtacttcacatatcacgtgacatttaagcaggtgacaccatcctacaccttgaattccttatcagtaagttaagaaatgtaataaaagttaccttctggaattgttgggaagataagttaatgcctggaggagactcatcgctgtgcctggcacatagaaaaggctcagtgaatggtagccattaggactggattattttcttgtctgttaaatgggtagaaatacctgtttttctgttttctggggtttttatgaatatcaaataagatcattagttatagtgctctgaggagtagagattttgagctattatcaggatgttgttccattatctgttattggggtaaaaaccacctgtttattgttcaccattccttaggtactagtccaggttctagttactacattcctggtagagcctctactgtggaagattcctttggactaggaggaaattagaaacgtggtccttaaagcttctcacagtttgtcttgtttgatcattatcatctctatagtcctattatcccggactacttttttctgaggtgcattaatgattgtgtagtggtgtagatgtaattgactctgttgatgtgttaattattagtcgtcattgtccatttctctctaacctttcctccacagtctcagacttaaaatctgtgattgaaaagcacagcatggctagagatgtgcatttgtgtacttcttccttaagataaatatttaaaatataaaaagtgaccatccccaagttgactgctgaaaaatgtctttcacagtcaag

SEQ ID NO: 126827 - DNA, 1058 bp, Homo sapiens
aaaaagacttttatcttataattaagttgatttgtaaaagtgaacctgtattttattacaaaatcctaatagttatacaattttaatgctatttatttatttaatttatttctttcttgagatggagtctcacttgtcacccaggttgcagtgcaatggcgcgatctctgctcactgcaaactccacctcccgggttcaagtgattctcatccctcagcctcctgagtagctacaattacagatgcataccaacatgcctggctactttttgcatttttaatagagacagggtttcaccatgttggccaggctggtcttgagctcctggcctcaagtgatctgcctgccttggcctcacaaagtactggaattacaggcatgagccaccatgcctggccaatttttaatacaatttaacagtaaagacagctatcaaaattttgtcctacaggatcattttaaggctgagtttagttgataccagtcaaatcaagaagacccagcacccacagaaagaatacttgccccatgaagctgaagattaaaagctcatgaataaagcagttactctgggatgcctagaacttataaaaaccaagacagggatctaactccaagtaaaaaatatttacctctttattgttttataccagtaaagtttgattcaatatgtagtcatctggaaaactagaacaatcttttcttatacaaattaacttcctccctcttcattgtgacatagcatgaaggcaaggcacagatttcaactaagtgacatctcttgaaacattagcatacttggacagtccctctattgtgatcgtgatgaactttttcacagaatgactacttaccactgaaatgcagcattcctggaagctgaatgacaatgcagtgaagaacattctgttctttcaacccaggcgactgctcagctttccatttccacatgaagtctgagcagtgctctctgtcctggggtcagatggaagcatattaaattcaatgtgcaacatttctgtagggaggctaaattatacatttcctgatatttatc

SEQ ID NO: 126828 - DNA, 1089 bp, Homo sapiens
gagcgacctgtcctcaggcctggtgcctggagactggggtgatgcgcgagatggcaccggggtgaaaatggaattgaagagtgacccagggagagatctaaagaggctctggagagaggtcaacaggagatgtcagaacagatggggaagtttgggaaggaagtgtcagaagctttagattttagtataagtgtggctgtcacagactgttcgtaggagtgggaggtgcaatgcattgagctggttattggaagttgccagatggctttactttccttcctatgcaggatgtaaaatatgtcatccatttctatttaggaaaaaacattcaatgttgttttgttttagctgaagcagtgatagtggtcagcagtctggaaattctacctttttgcaggttacatttctcttaatgctctgcacgcgttgatcctacctaacctcaaattcctgcctagcctccatcctgtgaccaaagtgaatctcactcctctggggccgtgtgagactccacagccaccttctctttctaggcaggtgttttgtgccttccctcacacaaacagctccctgaatatgtcacacccctcgttccccagcttaagggctccattcacctaatttcattttgcaatgccttgtggaggtaggaggcgacaaggaattgaggagggtgacagtcccagttctcctacccgccccgcctctacagtcatcccactgaacccaaggaggacatttcttactgaatgagggtcggctccatttctttctcttctaatccctttcagggagtgctcagcttggtgaggaatgaaacccaatgctccatggcccctttccagctgggtgcagttccaaactgcattcaaagccaacactaattatgttcaaagtttcatattagtaacggagtaaagacatatgtgagctaatattaaatatcaattttccctaataagaggctttggctattttattgtggatatgaagctgtcttggtatctgtatgtgaagacactggcatagaacctcatatgtcaggaggggaggatggtgccctctggcaggaagcttccaattttccgg

SEQ ID NO: 126829 - DNA, 1087 bp, Homo sapiens
cgcaagcgctgctggagggctccccgggccccggggctggcgaacaggccgcttccttccccggatcgcctcccctcccgcccgcgcccgcggccacatcttcgtcccccgtacgctggcgggtggcccctgcgccgcgggcaccgagggagggcgccgagcggtggcgtttctttcgcaccccgcctctctccttcccttttcttcgcatcaggggctccagcccttggctaccaccggcgcagaactgtcctgagaagaaagctttcttttcctttccgagtcccagatggttaacgctcagaagtgcgggtctaagagactgggctcttcctcgccccaggcttttgcaggaggagatggagccaagtgtaatgaggcaggaagcattggttgtgcaccaggagctccccctggggtggtcctggaaaggaacacagtaacctctgaatacaaacctcggaggctgggctgctttatgggactgcattgtgctaaccatgccctgctgttaaaatattgtaataatggcagtacttgctgaagtactgaaatggagttaggcaactgatacttgctgctttaatggtaacgatagccaaccggttttgagagctttagatgtgctgggcgctgcgcatgttacatgtatcatctcatttaattctcacagcaaccccattttaaaaattaggaaatgaaggcttagagaaaccaagtaactttcccaaggccacacagctaggaagtaggggagtgggattgtttttgtccttgtgctttacaatccaagactgagactgtggccttttggaggcttatcagtttaggggaaacctaaaccactgagtgttcaaaaccagggagatacattacaagcccatttaattcggagctctgcagaactcacagtagcaggcaatattgtgattcagagaactgtattgtggaatagccttttattcccatgtaactcctttacatattcttttattcctgttagcttttaagtacgtggctgttaacccacaatccaacccattacagtcactgaacaacatgttcttagtaaccagggcctctgtga

SEQ ID NO: 126830 - DNA, 1065 bp, Homo sapiens
atgtacctgaaactattgtatttgcttttttctgaagtttgagagcaaaaggaggaaaagtcctcattgggcagtaaataattgaaattgcatagttttctttgtttttatctaattatattatgcattcccaactcaacttgccatatgctgcttagaaatacctcacagcttgtagcgtgctgctattatagatacattataagtccttaatatttttcttaagttaggcttaactgagtcatctgccttacgcaattatagggagatgggagaaatgaaaatgctttaaaatgtactttttgaaagaatttctttttaagatatcaaatggggcttctcccttgtgctggtaagtagaatcacaactgggaccattctcctcagtgtgagttgggagactttctaaacaatagaaattgcacatttcctttcacctaatgctaaggtaaacttcgttcataccgtttgcatgtcttgtatcttgacagggactcagtatgggccttccaggcacagaataaaaggattcttttgtccgaaagtgagctttgagaaatctttttgaccaatatctgctaattctatagcagatgggtttgttgtacagattatttcatcacccaggtattaagcccagtacccagtaactatcttttctgctcctctccctcctcccaccctcccccatcaagtagaccccagtgtctgttgtttctgtctttgtgttcataagttctcatcatttagctcccacttatacgtgataacatgtggtatttggttttctgttcctgcattagtttgctaaggataatagcctccagctccatccacgttcccgcaaaagacatgatctcattcttttttatggctgcataggattccttctaatctggaatcttcattttgtcagatggaatcttttcattgggctataacaaacttactctcaccataactacattcacttatgagggcagagccctcatgacctagataccccttattagcacccctctcccattgcattgggaattatttctaatacgtgaagtttggggg

SEQ ID NO: 126831 - DNA, 2204 bp, Homo sapiens
aaaaaaaaaaagtacttcagatagagttgtccctagaggcatttgagctagatgggatttcccctagagggtagagagagcccagcctgggttataactacactgtgcactacttcttcctaaaccacatttttttttttcttgagaaggagttttgctcttctcgcccaggctggagtgcaatggcacgatctcggctcactgaaacctccacctcccgaattcaagcgatactcctgcctcagccttccaagtagctaggattccgagtactttgcaccactatgcccggctaatttttttgtatttttaatagaaacggggtttctccatgttggtcaggctggtctcgaactcccgacctcaggtgatccgcctgcctcagcctcccaaagtgctgggattacaggcgtgagccactgcgcccggcctgaaaggaatcttttgaggggaaagggagtcacaaaagtatgcagtctgagggcataaaggggaatctcacaactttgttttggtggtaggagggaggggctccctctgagctttttccccccagcaactagtaacagctgagctgctgattagtggggtagctaggacctctgaagtttgaagctcagaattgtacctaacccgctatgccctagaaatggtcctagtcacacttttgaatatttcacaagtgtctgtgccagtattgtgactagaacatagctaacacttgagtgcttgctgagtaccaggaactgagctcagcaggttacgttaaattgtcacaataagcctacaaggtgaatagcagtattatccctttgttagaaaaagtggcccaagataattacagctagagagcgatagagctaggaccagtccattgtcttagccacaactcttcctgtctctctttcccggaatgtctttcctggaatgttgtgaagtgacttcaaatctagtttactaaactgaatctgtgaaatctggggtttaatcagtggagaaatgtacttgtctcagtaaatgtcctctcagtcttcataacttcagagggtttttttttttttttttggaaaaacaattattacaacatcaaattatgtgaatacttctctttatctcttcatttattaacacagtggtcttggaaggtttgcaaatctgggagtggggagaagcgagattgtctgggggaatcgccagcattaagtactccaggagacagataataaatgttacgggatgcaatgggcattggacagcccctcatgaataattcttccacccaaaataccaacatttctcccttttagaaactctgagctactcatccacaaaatgcaagtaatgaatttcttccacaacaaattaaaggtatactttgcccagtcagggtgcataaaccatttgtaaaattccattccagttcaatcccaactggaattatttttgcattcattggtcctcctccttttttttttttttttgccaagtttaaatacaatcaaactgttcacttaatctcacttttttggagcaaatctatggcaattactcttccatgactaggaaataggaaggaggggatcacattaaaaaaacagtttgttctgttcctggcaggagctatgtaccatccaaaaaagattcatagagtacagatgtccctaggctaaaccgttggctgtgttggtccaaggtttgataaatgtctctctcagaagtcacactgattgctttgtttattgtaacctttattcagcttgatgcgagtggattgaaattcattacacttcacagatatgcattattagcttggataattaattattttgataaaaataaagtattgactgtaacgttgacttatcttcgtgataaaaatctttaacattcttatagattcattccttgcccctgaacaatataaattttgagatggtattttaaggacttcagtctgattgaataggaacaggttatatggtccaaaatggttgaatgttccagtaatagctgtagctaacatttattgccatttaatcttcacaacaaccttacaaggcaggtatcatcattattcctattttatatagtaacactgagatgatagcgagaaaagtcatatttcttgactgctttctcaatatcaatgggaaattataaaccacatcattaacatgtctatatagcaatctttacaaaattat

SEQ ID NO: 126832 - DNA, 1148 bp, Homo sapiens
tatgcatatttacatatttgcacctcatcataaggtcactctagtcctaaactgatgtagttcatctgttttacagctgaagttaagtatgtcccttatttgtgcttggcttatttctttcttaaataatacattacacaagtgaactctggccatggcttctttctttctttcttttttttttttttttttttttgaagtttcccatatatacaactcagttctttttttactgacacctaatataaaccacgtagcatggcacctaccatccctatttctttagctcttttcactctcaaacaaaaggcaaacccagttgtgtggtgcaccagttttcagccattcttgtcctcatttgtacttgaaactggttatctgaagaactgtaattcacctgagataaccctcattttataacaaggccagtgcttgctttatccaaaggaacccaaaaagtaaattctgcaaataatacaagatggcaatagaaacagatgtgaaaatgaattttcagtcttatacaggtaaaatatttgcccttttcaaaaaggcaaagaggaggaatggtctattttataaatgtaataaattcctcaactcttattttttaaatatagaataaaaattgttttaatgctcaggttttcctgagtgtctcagaagtcttatttcaatagtaaatggtgtactggtaatatttcagttccattcttgttgcagatactattctttattaaaatagtacttcatggccagggacagtggctcacacctgtaatcccagcacttttggaggcccaggcaggtggatcacttgaggtcaggagttcaagaccagcctgaccaacatggtgaaacctcatctctactaaaaatacaaaaattaggccgggcacggtggctcacgcctgtaatcccagcatcttgggagaccgaggcgggtggatcacctgagatcaggagtttgagaccagcctgaccaacatggtgaaactccatctctactaaaaatacaaaaaaaattagctaggtgtggtggtgggtgcctataatcccagctactcaggatgctgatgcaggagaatcgcttggaacctgggaggcagagactgcagtgagctgagatcatgctattgcactgcagc

SEQ ID NO: 126833 - DNA, 1561 bp, Homo sapiens
aagggaaagtgggcaccaactataaagaggcttaaaggaactttttacagtgatggaaatggctatgtcatgattattgttgtgcttacacaagtgtatacatttgtcaaaacttgtcaaactatacagttaaaattggtgagttgcactggatgtaaatgatatgtcaatgaagttgatcccaaaaaaaaggaaagttggaaagggcatttcagcagtggtgaacagtatgaccaaaagcacagagagaatagaagaagtatactaatttcacagaataatgtattttggaagatgaattttatcttatagttttacccattattatggattacttctactgtcagtttgaataatgaaattagtgaatctttgtaatgtgcctaaaaagaagttaattttaaataaagacaaattaacagttcattgctcactttatcccctcttttcttatccccttatccttttcttttttgctttaacagaagtccatataatgcttgatggcctgttacctcctgacacctattttagattcaatcctgtaatgtgtgaaaacatacctctagatgaaagtcgaaatgaaaagctggatcagctgcagttggaagggttgaaatacatagaaagaaatgaacaaaaaatgaaaaaagttgcaaaaatattaagtcaagaaaaaacaactctgcagaaaattaatgattggataaaattaaaaactgatatgtatgaaggacttccattcttttcaaaattgtgatgagtatatgcttatgttctcataaatgaaggtctgtttagaagatcaaccacattcaataaggaattgtggggttcgacatgagttaactttgaaatacgtatgaattctggagaatcctgaaaaagacggtgcttcaaccagcttgcatagcacagagaatattcttggttacagaattcatatgggaactaggcttttaagatgttaataattagctaagctttagtaacccttactgtgctagtagattttagtagatattggtgttatattgtttgatgtttgaaaatatattaatatatgtgccgaacaagaaaccgaaagctatattgtactgtgtatttttactttagtcctcataatcatgttgaatttatgtgatcattgattttatttcatatggaaaagctaatttcttcttaaatttacattacctaatattctcactagctatgttctccaatccacactgccttttattgtaatatcatctaaatagatgcagaaaaatggaattttctctattaaagtattttacatttgacataaaaaagaaccagatacagttttctattcagatatgtttattttaacattgtttggttaaaaaaggtgaagttccagtcaaccactttttacccctgaaatttcaagataatgctatattaacttttccagatctaacactagcttattcttccctgttataaaatggtttgaacttactgaggagatattcctatcattaacaaaaataaactatttaaataatctgttgttaaaaggctaatgtcattt

SEQ ID NO: 126834 - DNA, 1054 bp, Homo sapiens
gtaattatatattacatatttgattgtttacttattatccttctgtccaacaagaatgcaaggcaagaatttatccagtttactttgacttacccagtttgctgttgactccagtgcctggcatatagtaggcattcagtgagtgtatgttgaatttcaggttttggccttgaggtgtttgtgtgtgtgtgtgtttcttagaaacaggatctcactttgttgcccaggctggaacgcagtgacaatgatagctcactgcagcctcaaactcctgggctcaaccagtcctcccaccttagtctcctgagtagctgggactacaggtgcataccattgcacccagctaatttttcagacctttttttgtagagatggggtctccctgtgttgcccaggctggtcttgaactactgactttaagtgatcctcctgccttggcctcctgaagtgctaggattactagcatgggccactgggccttgccttgaggtttagatttcctcattttactattttgtttttaattattgggtgaaacgttttactaaattaaaaaaaattattaccacttaacagctgcttgtatttgaatctcattcttttcatatcagcatattattggccaagtcattaacataagtgagaatcttaaactccccactgaggacttttattcattgaatgaaaaccaaaaaaaagctcatgtgctagatttttcactatctgaaattttgttgccagatcagtaaaatactctttttctcccagctttattgaggtcagactgacataaaaattgtatatatttaagttgtacaacatgttgttttattgtaagtataccttgtgtaatgattcccacaatccagctaataagcatatctgtcacctgacgtagttactattttgtgtgtgcctggtaagaacacttaagatttactcccgtagcaaatttaaagtaaacaaaacttaatacattgttattaactatagttaccatgctgtacgtcagatctctagtaggtagtcataactgaaaatttgtaccctttga

SEQ ID NO: 126835 - DNA, 1904 bp, Homo sapiens
ttgttggtttttggcattcttaagaagtgtatttgagtggatttcttcttctttttactttttttttttttttctgtagaaatgggatctcgctatattgttcagctggtcttgaactcctggcctcaagtgatcctcttacctcaacctcccaaagcgctgggattacaagaatgagccactgcctggccagatttattcttaaagagatactgttctgcagaaggatgggttcagtgaaaaaacaagagagagatactaatataaattttaaaatgtgctgccttagtgtaggtttttttatcatttagatattagattttcaaaagtaatactaaaaatttggacaggcaatttttactgattttgatttatattattaattttcatgttagcatataaactctaaaagcaattattagattgttttattcaacagcttaaattattttttctttaaacaggaattgtcattttgtctttaatcttttctgtaggggcgtggttgctctccagaccctacgaaaattagttgaacttactcagaagccagttcatcagctctttgattacatttgtggtgtaagcacaggtaattattattatatggaagtggtgcattctggcagtacattaaggaaaagaacattaagcacttatgtttaagatcatagtcctttgccttcttcagccctctctccataccccaaaattttgtacttccttttttgtcttttgttcatggttatgccagttaggcacactaggtggcagtgtgtcctacctattatagctagatatggaatcagctgtttaaaaggacatccaagagtacctaatatgtttaattacattggttcctaggactaacttgaaggagaattgcttagtgatttggtgagttgtcaaatataccatattctgtgactaaaactaagtaattcattgatgttagaaagaacgtgaattatctaccatagtatcttatatataatttaatgtaaaacaacacatttgtaaatatttttaaattattattattatcattattgggggtagcatttatttaatcctttttgagacctggtaaatccctttacatttgttaacccagtaagacacatgaattttggttgttcttattactcccattttacccctgaaacaaatggggctctgagaaggaaagtcatttgtcccaggtgacatagctagaaagtatcaacgctaaaatttaagccaaaactatgattcaggaaatcttacatcataagggctataacttaacactgataaaagctaaggattcttttttccaggtgccatattagctttcatgttggggttgtttcatatgcccttggatgaatgtgaggaactttatcgaaaattaggatcagatgtattttcacaaaatgtcattgttggaacagtaaaaatgagttggagccatgcattttatgacagtcaaacatgggaaaacattcttaagtaagttacaattactctttttaaatcttctgattatataggtagtatgtgcatattataatttgaaaaatgtcaatattaaattatattcttgcatattataatttgaaaaatatcaagaatattaaattatttgactaattagagataaccactgttagtattttggtgaatcatagtttagtaattgttttggggggtttgtgtgtgtgagatttgcatgtaaaagttgcaattgccttttttaaaaatatgagatacttgcatcctgttgtttttacttaacatattaaatgtgtctcaagtcattctaaaatattcaattatttttatttttatttgtttttcgacacacgctctcactcccgttgcccagggtagagtacagtggtgctatcttggctcactgcagc

SEQ ID NO: 126836 - DNA, 1034 bp, Homo sapiens
cctttgttaacatttgtttgtattcttttatgaggcaaccttgaatcccatatgcaatgtatacaagatggttcattatttctttttaataacagtttaacttctagtagttactgtgaatcagttttagcctcttaatctcaggatttggactaaatattatacaaaatttataatgttaaccttttgttataataatttgtaaatttctataaattatattttctctagttaagtattacatcttttaatgaaaacttttgaatattggttaatttttgtcctcaatattagaacaaatgtaatctagaaaattgacattaatatatcaaaaactaatctgtcttataagattactgagaaagtaatgaacactgtcaccttggttgtcatgtggtgaactgcatgtattggttaataataatcatacattttcagtcttgatttgacaaaagcaacaaagtatcttttctctcaatataggaaagaattattccatatttattacgactgagacaaattaaggatgaaactcttcaggctgcagttagagaaattttggccctaattggctatgtggatccagtgaaagggagaggaatccgaattctctcaattgatggtggaggaacaaggtaaggctaggaacatgattctttttttttttttttttttttttttttgagatggagtttccctctgttgcccaggctggagtgcagtggcacaatctcagctcactgcaacctctgcctcccaggttcaagcgattctcctgcctcaccctctcaagtagctggatttacaggctcccgccaccatacccggctaatttttgtagttttagtggagacagggtttcaccatattggccaggttggtctcaaactcctgacgccaggtgatctgcctgccttggcctcccaaagtgctaggattacaggcgcgagccactgcgcccagctggaacatgattcttaaaaactacagattcaattcagctttaggaattaaaaaaaaaaagatttgatata

SEQ ID NO: 126837 - DNA, 1813 bp, Homo sapiens
ttcttctccctaaacattctattcctcattttctttttttatttacctctatactgaaagtgaattattttctattagcttaaaaatgaattttctatcagctataataggaatattttgtctgctttttttgagacagcttgctgagtttagtccaaatagtcttgtgttttctgttatacccaatttcaatttttaacttgaattctaattttttttcttgccatttcaggtaagaccatgaattatggcatttcttaaatgaagcgttcaagaagtgagagaatgtcatagaaaataaatgatttttaagttatgtctattaatctgactgtagatatatatatttacctccttagtaatgcaagaagtgtttgtgggaagcagagaagcaagcaactgtatttcttgttctcacctaagcattactggaggataagccacatcagtctacaaagaggttttcatacaaacataataagatgtaaatggaccaaaagtgaagcacattcttgcagtaagcactgttactctccaagcaaccatggtttacatattgggattttgaaacttagcacttctgctcccaagggacttacaaaagtgaacatttgtatgtcccgtattaaaagtactttgaactctgtttcaaaggctgtttttggcaatcaaaatgaaatgatttcacgtttagctcaatttaagccaagttcccaaattttaagaaaagtatcggatagtggctggttaaaacagaaaaacatcaaacaagccatcaaatctctgaaaaaatatagtgacaaatcagcagaaaagagtccttttccagaagagaaaagtcacattatagacaaagaagaagatataggtaaacgcagtctttttcattacacaagttctataaccacaaaatttggagactcattctactttttatcaaatcatattaattcatatttcaaacgtaaggaaaaaatgtctcaacaaaaggaaaatgaacatttccgggacaaatcagaacttgaagataaaaaggtagaagaggggaaattaagatctccagatcctggcatcctggcttataagccaggctcagaatctgtacatacggtggacaagcctacaagtccttctgcgatacctgatgttcttcaagtttcaactaaacaaagtattgctaactttctttctcgtcccacggaaggtgtacaagctttagtaggtggttatattggtggacttgtccccaaattaaagtatgattcaaagagtcagtcagaagaacaggaagagcctgctaaaactgatcaggctgtcagcaaagacagaaatgcagaggagaaaaagcgtttatctcttcagcgagaaaaggcaagttgttcagtgtgcttttcggttctattactttttgtcaaatttataagttttatttcctaatgagaactaagaaactttcattgttctttagagcagttttgtattctaatcatatctatttaatatgtctttgtagattatcgcaagggtgagtattgataacaggacccgggcattagttcaggcattaagaagaacaactgacccaaagctctgcattactagggttgaagaactgacttttcatcttctagaatttcctgaaggaaaaggagtggctgtcaaggtaatttctaatttatttaatctagttttgtcttggaatagaagtactaaaaaaaatctaaaatggagaaggcaaagcctttcatttttccatttgaattttgtggtttttattatacatgtgatgtgtattcagtaattaccctattta

SEQ ID NO: 126838 - DNA, 2426 bp, Homo sapiens
ctagctctaaaacaaattgcacctgctgagcattcagtaattattgttggatggaggtaactgagtagggagttagaattaaacagtttactttagtaaggaggtgcaaaatcttaattcctattaattggttatagttgatggtttaattttttaatacaattaatgatttcacacgaataatatgaagattaaagaactctgattgttgcccacatgtttatttgtagtaatggtaacatttaataactttattgagtattgcagatggcattgtgccaactgctgataactcagcagttaataagacagtttctgctttattttataattttgattaacttgatgcttatatttgtagtgttttgcttttatttctgatgcgaaattcttccctaaaataatagtattcagttcacttgcttgaagagatttgaatatatgtaattttgaatattttaccttcagttactaaaaatatttttgtcactttcagcatatgaaacactctcagatgctaatagacgaaaagagtatgatacacttggacacagtgcttttactagtggtaaaggacaaagaggtagtggaagttcttttgagcagtcatttaacttcaattttgatgacttatttaaagactttggcttttttggtcaaaaccaaaacactggatccaagaagcgttttgaaaatcatttccagacacgccaggatggtggttccagtagacaaaggcatcatttccaagaattttcttttggaggtggattatttgatgacatgtttgaagatatggagaaaatgttttcttttagtggttttgactctaccaatcagcatacagtacagactgaaaatagatttcatggatctagcaagcactgcaggactgtcactcaacgaagaggaaatatggttactacatacactgactgttcaggacagtagttcttattctattctcactaaatccaactggttgactcttcctcattatctttgatgctaaacaattttctgtgaactattttgacaagtgcatgatttcactttaaacaatttgatatagctattaaatatatttaagggttttttttttttgacaaattcaacattcaacgagtagacaaaatgctaattatttccctgattaggaaagtttctttaaaaaacacgtaattttgcctagtgctttttctctacctgcccttgggctcactaatatcaccagtattattaccaagaaaatattgagtttacctgattaaactttaaaagttaattgtagatttaaattgtgtgaacctaatgatttttgcagtgaaacctttactaattcaaagttgcatgttctatgacatctgtgacttgcgttgcagagtgtacatgaaactgtataattgagtcattcagtaaaggagaacagtatcttggttaattgctactgaaaggttgagaaaggaatggtttgatatttaccacagcgctgtgcctttctacagtagaactggggtaaaggaaatggttttattgcccatagtcatttaggctggaaaaaagttgaaaacttaacgaaatattgccaagagattgttatgtgtttggttccagcctaaaaatgattttgtagtgttgaaatcatagctacttacatagctttttcatatttctttcttagttgttggcactcttaggtcttagtatggatttatgtgtttgtgtgtgtgtagtttatcctctctctcatctttatctagagattgactgatacctcattctgtttgtaaaaccagccagtaatttctgtgcaaccttactatgtgcaatatttttaaatcctgagaaatgtgtgcttttgttttcggatagacttatttctttagttctgcacttttccacattatactccatatgagtattaatcctatggatacatattaaaacaagtgtctcatacaacattgtatgtgagagaaatataaatatttacaacctgatattcgttgttgttttattgttaaaagtttattatgcaactctggaggtatagagggcatataagctatgggacatatgctgatcacaggctatattcatgaagttacttttgaccaacctgaaaactgataggattttgtttgtcatttggtaatttctactgcattcttaccatccttctctcacaaattttgatagcttgaagatctttttaattataattttgttgtatttgtttcctaggagcaagtgttcctgctgccagttctttcctctttaggcgtggttgagaaaaagcagaaactttacataaagctgtatttcttaatcatctttaatttgaaacttaagaaaatgaatttattctgttatatttatgtaacttatttcctggaagttatatctactagttttgtttgataata

SEQ ID NO: 126839 - DNA, 1659 bp, Homo sapiens
tgtttttcttagaatgtaactgccttccttctgtgtttaaagcaagttttgattcaactggaaaatgtagccttcgagaccacattacctagtcataagtgcaacacacttgtactcactctgagtctcaatgaattcccgtgcttccttgatccactagacttccgcgctcatggagcaatgctatgtgcaaatggaatgacaagaatgggagagcacacagatggtgcctactcaatctcctctgcttgcatacatagtctttgttaaatcagacatataaaacacagaatcagttgcagctttccttgcatcactgctgggatgaagctggtcctactgtagggccatgagcaggtcattaggcaggtgaagtataactgtgaaggagacctcctcttcaccgtggccaaggaacctatcattaatgcatgatactctgtgaatggtgagaggctgggcatctacatgggccataccagagctgtgtggtatgtggacgctgactgggacaccaagcatgtcctcacccattcagctgacaaccatctttgggcctgtgaaacagggaaacagctggccctactcaagaccaattcaactgtgtggatctgcagttttgactttgggggcaatatcatcacgttctccatggagaagcagaaaagctatcagtgctttgtgagcttctttgacctgcaggatctgagccagattgacagcaatgagtgctacctgaagatcccttgcagtgactctaaaatcactagtgccatttggggctcctgtggggagtgcatcattgcaggccatgagagtggaaagctcaaccagtatagtgccaagcctggagaggtgttggtgaatattaaggagcactcctagcagattaatgacatccagttatccagggacatgatcgtgtttgtcactgcatccaaagacagcacagccaagctttttgactctatgactcttcaacatcagaagactttctgaacagaaagccccatcagctcagctaccctctcccccaactgtgaccatattgtgctgggtggtggtcaggaagccatggatgtaaccacaaccttcactaggattggcaagtttgagtccaggttcctccatttggcctttgaagaagagttcagaagagtcaaggggcactttggacctatcaacagtgttgccttccatcctgatggcaagagctacagcagtggcagtgaggatggttacaaccataatctactacttcaacctacagtactttgaatttttttttcaacctctaccttttatgaattcttatttttttctttttcttttttattatatttaagttctgggatacatgggcagaacgtgcaggtttgttacataggtatacatgtgccatggtggtttgctgcacccatcaaccaatcatctacattaggtatttcttctaacgctacccctccccttgcctcccagcccctgacaggccccgctgtgtgatttttccctccctgtgcccatatgttctcattgttcaactcccacttatgagtgagaacatgtagtgtttggttttctgtgaatgatttcatgtcccttgcagggacatgaataaaatacttcaaatttgagttttaggcataagaagctggatct

SEQ ID NO: 126840 - DNA, 1030 bp, Homo sapiens
ccaatcatgtaggctgcagtttagaagatgataaaaatattcatgcttgcctgcaagctgatgtaatattaattctattaaaataccacatttatttataccaacctaagtaaatgcacataatgtaaaacattcaatcagttgagaattctgtagtatctatgctatctgcctggtagcacttcatgtttttggcagttgcgatatcatctttatggtaatatatataatataattttttgcaataagtgcaattttcttgctatctctctggagttattgaaagatgataaaaaagattgatttgtaataaggttcattgccaattcattggtgtttcctttcctcaagtcataataaatatacttagagtcatttacacatggggccaaatttttcccagatttcagttctcgcacaaagtttgactaaagggtttttctctcgttgcctaaccttatttagtgtctgaggccttctatgctttgtgattgaatgtcaagacatagatttcccactgggtaagataacaaatcaaacaaaagtagagttgagacagcaagctgggcaaacaaacctgtctttacctgcagcaccttccagaagattaactacctgccttatctttttagtctgtctactttgtgctggatcttggccagtttgagtcttttaatattctctttgtcacagtgcctagggactagtgacaaaggagtctgttctctaaagatccttgcaattaattgcacacatacacacaataaattttaagtgagacttgatataagaatacatttaaggcagaaatcttggtgatcttggagttgctccaagggaatcatggaaataaaatgggatctttctccttgtgacagtcaacattttcagcatggccatcatacttccagttaccatctcttcctcacatcacctcctgattgtctcattttttagaacttgttacttcttcttcaatcaatctctcaattctgaaaagaaagaccataaatttaataaataatatgac

SEQ ID NO: 126841 - DNA, 1146 bp, Homo sapiens
cctatagacagggcccccaaaatgtacacctatagaaggccatgttcacatagttgtgcctcagggttttccatttacatagaccataatgtgaatatcagaacttggagttgtactcacctcgtggctctgaccatacgcattcgagttcttgatttctaatctcgtccaagcctcttgtgtttcatgtctggaaactgaagtccatagacatgatgggacttacctaagattatagagcaatatagtgtcagagttagataaatactacttcttaattcataagaacaggtacctgggtcaatgcaaacaccacactcagcagtcccagctccagaggaaataaggacagtgttgagattaaagagtccacccagggaagataaatatcatgccacaaaagtcctgccactgaagtctccacttcccagagtcctacagtcaatctgaggggatcaagagcaatgaattcagctccactgcagtaaatgttcccattccaagagatttgggtacttgacagggaaggcaagggaggcagccatgtcactcagtcagaaagaagagatgataataacttgttccataggttaaaaacagagattatttttcctaggacttccacttggatgttttggtcttcatcatcatagaagaaaaatactcatattatgaagtcagaagtatcttagcagattctgagggacaataaaaggattaactgaccaatggaagagtagccctcttgatgtctttggacaagctggatagggtgactgattatgaggtacactgtgtttctactgaagtatgagatgttgagggacatttctccataggtgtctggtgttatgagaagaggcacttagtcccaaactatcttttcgaggatatttgtagaaagaacacacttggaagatggtgatagtatctccctccagagcaagcagaaagtttatttactgccctgtataataaagataatgtcttctggccaggtgcggtggctcatgcctgtaatctcagcactttgggaggccaaggcgggcagatcacaaggtcaggagatcgaggctatcctggctaaaacggtgaaaccctgtctctactaaaaatacaaaaacattagccgggcataggtggtgc

SEQ ID NO: 126842 - DNA, 1019 bp, Homo sapiens
aactctaattatggctctgaggttacagttgaagcaggcaatagggagatcccaaaatcgagacaccagggcatgatactcagttgagacaactgaatatgatctggtgtgatacctgcattttgtttgtatactgagggggataccctgttgggattgtccagctggccactgagaagataatcaggtctggagatcaggagaaaggataggactggaaatacgaatttgagggttattggcagtgtggtaggtgttgaaactatggtgtggatgagtttaccaagagaaagaatataaagagagcaaaaaaacagaggagacaaacctcaagaaataggtacattcaggaaacagggggattattataaatcagcaaaattgtataatgtgctcagagtgctaggaagataaatagggtagctacttatcttttgcagagaagactttttagcaggtactgatcagcagggttaaagattgcagagggagatggagactaaagacaagccatggaaggtgttggtgacttttaagaatgcagttctgtcacatagtgaaaacagaagccagcaaggtttaaggaatgagtcagtgatcagaaactggcaacatttataatgcagtgttattttgctaggaaaattcatacttccaatggaccttttaactgctattgaagagctgagagaaaaccaagaaaatattgctcatttaactaaaagccatttctttgtgatctgtcacacatgtaatttaaagcaacaatggaagtcttccattcttcttttgttcattactgcaaatgcctctaccagaggcaaaggtctcatagggatgttaccttaatccaaaggattttatttttattgagctcatcttagtatatagaaaagctccttcaaagcccagctttgtgtcagaaaaaaaaatgaaacataacagcaaccacattttattgctattagagatagattttctaagaagaaaattggttgggacaaaattttgcaatcatt

SEQ ID NO: 126843 - DNA, 1095 bp, Homo sapiens
ggccgagatcgtaccattacattccagcctgggcaacagagcaagactctgtctcaaaaaaaaaaaaaaaaaaagagaaaaaggaatgtctcagtgcagatacttattccctcttacctggaatactgagtctatttctaagtgctctccctgctggtagtccatttttcttcttacacatacctgccagaataattttcccaaagcaaatctcatgtcactcactacttagaaacctccatgcttctctattagctgataaatacagtccagatttgttagcctggcattcaggtaccagtctggacagagtcctccttgccagccttactgcttatggaaccccttcatgcatgtgacatgccctgtgtcttcatgtgcttttccctcttttcattcaccctactctgcaatcactcagtaagagatggtgcaaatgtttatggagcttttactgtttccacttttgaaaagtggtttctctttcttctgaatgatcctgacatgtacatttacctctatcatggcaaaaggccgtcctctgaaagtcacagctgtattagagtgttagcttttggagacaaagacttcagtttattaacctgtgcagttcccacagcatatgtcctctgtggaatctgtcattcatcttttgtctctgtgctctgcctccttaattggagactatcattcttaatggtctgtcggactaggctgtctgagtcttcctttcagaattctgttgctttggtgtctctctacactattagtctcaggaagcaccctacattatgctgctgccctgaggtttgggctgttctagaagcatatccttttctatcagggactgccgctccctcctctactctccccttccctgccctcccgcttctatctttttaaaaattcaattaatttttttaacctttgagactatctttattattctcattattgaggggaaattcaaataacataaaattatccactttaagtgaacatttctggctgggcacagtggattacatgcctgtaatcccagcactttgggaggctgaggtgggaggattgcttgagcccaggagtccgagacta

SEQ ID NO: 126844 - DNA, 1024 bp, Homo sapiens
atctcactatgttgtgcaggctggtctcaaactcctggctcaagtaatcctcccacctcagcctcccaaagtgctgggataacaggcgtgtgccaccatgacaagccaagaattctttctgtggtcactgttagttaaaattccaaaccatgaataacactgtaaaccaacaaaataatttgttgtgattctattggagattccttcaactactcagtgaggtaaattagccattctttttaagggtataaacatttgagtataaagttaatattttttaggttctcctgtatttgtgttcaggtcagcaatgctgtggtaatcaatgtgtttcagctatgattagtcaattaactctgaatccatctatatctgtttttgtacccagcatgcttccattttagtcataaggatatcatgagatactgtcacatgtttagctgaaatcaagatatgccatgtcaaaacgcttccctgattgtgagtctaggtacctcatcacaaaggaattgaggttaatttggcataactagttggcagcaaactcaggtttgcttctggttgatttctcttcatttccccaagtgctcacagaccatctgcataacaaacttgaatcgaatttcgaccctcatacctttaaggatgtctcctgcacttcttatctctcctcaggctttattgctgtttattgagccctccacctggatcttcctgcccatttgaaacacaatatatgtcaaatggaactcatctgtgctactttttttaactaatgacataattacccatccgtccccccaatcaaattcttattctctttgtcttctacttccagtgagctttccgatacccattttatctgtccctttactctcataccacagaaatgtctcaatgcaagcctgggtgcagtggctcacgcctataatcctagcattctgggaggctgaggtttgcggattacctgaggtcaggagtttgagaccagcctggccaacatggtgaaacccgtctctactaa

SEQ ID NO: 126845 - DNA, 1061 bp, Homo sapiens
catttctggtttagaactcatctcctccatgtcccagggaccataccttatcagtcatgcccttttttgcttcttgaatttcttccttcctttggcttccttccctacatataaacctgcttacatctctcctaacttacaaaaagtgttctcaataatacttcctcctctagttttatctattaataattcctgctctttgacagtatttttgaaggtgaaagcggttttcaacatctccactgcttcattatccatttgctcctctatccatctcaatctgggttctaccaacaaaactccacagcagctattcatcatgaggtttttaatgactttctaattgcctaatccaaggacatcttaatgccactataagtgattccttcttcttgaaactccctttgcatttggttttcataacatcactatcttggtttgtttgttcatttatttaacaaatggccatgtactgtgttccaagtagagtaataggtgctatggatatatacaatggcaagcaatacaagtaccttccctttgggtgcttacactttgagttgtttttgtttttgttttgttttgttttgttttgagacgtagtcttgctctgttgtccaggctggagcgcagtggcgcaatctcagctcactgcaagctccgcctcctgggttcatgcctttctcctgcctcagcctcccaagtagctgggactacagacacccgctaattttttttgtatttttagtagagatggggtttcaccgtattagccaggatggtctccatctcctgacctcatgatccgcccgcctcggcctcccaaagtgctgggattacagccatgtgccaccacgcccggcttgagttgtgttttaaactgagcctttatagtctacttggatgctcttgattgttaaaataaacccttagttgatgccagacagtaatgctctatccgctaccttcttcttcattccaagttgtctcctaggtagacttacccaaatcctctaattatcttattcctcatattcttataacattcagatatttcttca

SEQ ID NO: 126846 - DNA, 1029 bp, Homo sapiens
agcattaaattaaatgcctttgcatattatttaatcttcccatcaacattatgaagtatatattgttggtacccctgttcttcagaagaagaaattgaggcaagctcaggtaaactggctccaaagccagactcaagcttcctgtgctgccttttacaatgttaacagaagtgagcagaattacatgtgtgtgggtatgcaatgcagagcttgttaggtatgtagctgttatgttgacttagcacaacttgttagatgtaattatttgtaaaaatttacctcatatctgtttaaatccactcggtgaagcaattcttttcttacgccttgatataagttcaggtaagtcccatgactttcccagactctcttagataataatactctctacagtagcttcggaggtaagaatacggattcaatttaataatttaaatatctagctcatgttatatttaatattctaatattttttaaagttaaagcttctctccttgaggcaggaaacctgcagtggggaaaggatacttggtctcctctctctttccctaccttgtcttctcctctaccttcaatttgctaacatcagtttctgactcttactggtttggagcactgggagggagaggaggaaacagtgataggaaagttcttccttgataagttccataatgttagtctagcattggtgctgtctgaacttggaggatttttaatatttatttatttatttatttatttatttagagacagagtctcactctgtcatccaggctggagtgctgtggcagagtctcggctcactgcaacttccacctcctgggttcaagtgcttctcctgccccagcctcctgagtagctgggatttcaggcatgcaccaccctgcccaactacatttttttgtatttttagtagagacgtggtttcaccatgttggtcaggcaggtctcaaactcctgacctcaggtgatccacccacctcagcctctcaaagttctggaattataggcgtgagccattgcacccag

SEQ ID NO: 126847 - DNA, 1045 bp, Homo sapiens
taatagtttagaattcagcatttcattgaaatgtgagcttctttatacacaaatcctatataacactatatgggattttggtcatacaagttaaatgtcagaaggcattatgcccatttgcaggaatccgtaatgaaagtaaacctggtctccacttcttggctatgaattagcaaatgaaaagaagtattctgatcaaaggaagccaccgtgggtcatccatacttacctctattcccttttctaatatctaagatcatgttgagtagagtcttctatttaagtaggtagtttgaaagcacattggactaactagattatttgaggtagaaggattccaggtgattttaaaactaattgttgatttacaaaaaagcaatggagtttggaaatatttgcagtgatttctttcattctccttaccttctgctcccccagcatcaaccaagcatttcctataaagcataactgctacaaaggaaaagcttatactccatactccattataagttaaagcaacttcatggaaaccatgataaacaagtgttagtgtggtgacctatgagattctttcctttaaaggacttagcaatctacttaacctcttcttgtatttacttcttcattggtaaaatgaaaggccttatttatttgttccctcaaatctgttccagctgtaatattcaataatctgtgatgtttgtcttactacaaattcaggtttccttctatttcccgctgaccatcaagatacattgtcaacccaacctcttcttttaggcaagctgttttctcttctcttccccacatcccttcagagtttgggggtttcttctttgattggctgaaagtgggcctgcctgcctctaccagtttgtccctgaagcagtaggagatgtgtatcagaggatcttcatgatgtcagaacaaccctgctgccgtagtaatggagggccagagaatccaaagaccctggaatactagacttgaaaacaatagagtgagtgtcccagtgactttgtattgtttaatataatcataacca

SEQ ID NO: 126848 - DNA, 1016 bp, Homo sapiens
tgctctctcctgagtcatcaatattatcctgtctataagatcttttccaatagcatactaacgtgctgtttgttatcctatatattttttaaaatctctgtctctctgcttctgcctccagtgacttcctatttctctccttttcttcactgtgaaactccttcaaaaagttgtctttactcacaactggtgttttttctcctcccattctcttaagtccactccagtcagattttcacccacatcactgtacagaaaccagtcttctcagtgttaataatgactccaagaggctaacttcacttatccattcttcatcctcatcttatttgaccttcagctacattaacatactagctccatccttccttcctccttgaaacattttcttccctaactcctagggcaacatattcttctagtttttcttcctatctcatatttacttggtggttagtagaaatttcaagctttaaatgaatgaaactgaactcatttactacatcactcctacttctacccaagaattcccaatcccacttccttctaccaccttcccctcggctatttccagtgcctgaaattctcttcctccaaacagctgcatggcttcccctccccactttcaggagtctactccagtgctgccttcctaatgaggttttttccgtcagagtgctgacaaaacacagatgacaaactcaaagtagaaaaatttaagaaagatttaacaaaggtatgggcagggagcagagggagtctaggaaggatatgcatatcccaggcctgataaagcagagctgttaccactgctggacaagggctgggagcacttatagaacccggtatatgagatatgggtagacaggcctcccttgagaaaagcagtgacctttgaacttcaactggggatcctcattatgtgtaccaaatcggaagccagagggcaaaggagcccactactacaatccacataacctcctgggacaaagagttcaagagaaatgtggagagcg

SEQ ID NO: 126849 - DNA, 1065 bp, Homo sapiens
gattactaacccattaaccaaattaatagtgcaagcaagattggaagaacaaattatattaaacacccttaagcactttagaagcacccatatacctacagacaatctaagctccatatataaaatattcgcagttttctttaaggaggatttctgtccaacaacaatgatgatagtttaaaatggcccttatttgaaatacttccctaatttactattgccctgctttaaatcaagttactccaatttgtgaggtttggctgaacttggcaggcaaattatgaagtttttataaagatttaagtggtttgtcagtgttatatggtaactattagaaaagtgtataaaagaccttcccatttagtagtgttcaggtgggattttgatgtctggcttctagtatagccagatatttgagatggaaacatttaatttgttgtgtatataacactctttcacaaagatttatcctattaaaaactaatgaacctggaccctagtacactgcccaccgtagggctttgcttgctcagagtaggcactcaatgaatgctgaataagtgaatgaatgaatcaaattcagtatatgccggaaagtgtgtcgtcagggttgaaagttattttcttctccattgaataggaagtgtatttttcatttcttcaggaagctaaaacaaaggaaattccataactagcatattgaaatgttaagcttgttctatcacttgactccattttccttcccccactctcagtaacctctcaagatttctgatttctttttctcaggatgttatcccaaagaaggaaagaaacccaatgtggatttcttcattttcctcctcctcctcctttgctgaactgtgatcacacactaaaagctccatcctgtgctgatgtttgagaatctgttaccatggagctattccccagctcaaaggatggttttattacatatagtgttacaggaaaagagaatggttaaaattaaactttaaacaaatcctgattaataataataggaaatgggagaaatgctttcaaaaacaaatgcagggtggagta

SEQ ID NO: 126850 - DNA, 1142 bp, Homo sapiens
caaagaaagccccgatcccaggatgcgatatcaaaagatcatgactaagagttctctttaataccatagaggaagtctggcatagtggttaagagcacatcttctgtaaccaagtgctgggtacatatcctagacttcaaggttgtataacctttatctgtctcaagttactcatctgtaaagtggaggttataagattacttacctcatagggtttttatgaggattacactttgtaatatgtgtaaagccattagaattatagctggcatatattctgtgttataggagtcttcgttgggttttgtgttgatgtttttcgataagtcctttgagtaactctaccctcgtatgtttagttaacatttaatatgtatcaggtactattctatgtgtgaacatattctagctcatgtaagcttcatggccagcatgatagataggtaattgtatttttcttgttttccgataaggaacttgagacccagctaggttaagtaacttgcccaaggtcacacagctgaaagtggcaaagctgggagtcaggcagtctggtggtccctgctctcaaccaccctgctccagtagctccactgccaaggtccttttcatttgttcagccctgctttctcctgttaagatgagccttgtttttttctcattatgtctcaaagctttattgattagaggcatcaacctgtagcaagaaggccctgggcagctccctcatcccccttactaacagcatcaacactaacgtgtgacttgatcctcctcagtgagattctcgtccaaaccagcagtctcatagtggttttcctgacctagtctcaccctcaacttctaataattctgctgcaaagtcactaaaacagcaaccccttctttgaagagactctggatatttcccgtcagaaccttccaaaggttaattttcccttgacattgccatcattgtcttcccccttttcctgtcaacatttcagtcccctgcccaggccttgggcaggtgaattctgagtatccctgatagaccctgtgagtacagcacaggccccacagagcaagtgctatgtaaatcccaccaggaacaacacagctctgtgggagcaatgttcatgttaattacatggtgattttgc

SEQ ID NO: 126851 - DNA, 1695 bp, Homo sapiens
tcctcaagagattcttacctaagcgagccacataaataactcatgtgtcaaagatgattttaaagacagtacaaaaggtagaaaaataaaatattttatttaattaacattagaagatatgttcgtgacagtacccgtgctaaaaaggttgtagcaatggttatttcatttatttcttttatagccaacgtgtgttttcctctttctttaaatcaaattcagagtccagatcctttactaacttcctagttaggcagttccctaggaactttactcctgtattttccttactattacaatagtaacaattgttatcagcatggcacatggatggctgagtaagatcctgccaggaaaataaatattaactcttttaacctgggtaattttagttaatccctggtagaatatgctgcggtgtcctagggccctgcaaggtgataacacccctcttaaatagtttttccttgcttaccgtaaaagttgggaagtactagataagccatctgtctgttcctagaaataccacaaatctgtgcattgtagactgttttgctacacatgctgtttggagtttaagaactagctacacacagtagcacatcaccaaaaattcccctgagtcagaaatgcctttctccccctgccagacctcagttcaagtcatgtttttctcgataactaaacctccattgttcaaatttagtaagaacagtgcctgctgacccaaatttgctttgcctccattggtattttttgataacttactatatttttcaggtatagaagatgtttgaatgaaaagacaattatttacactcattgcatataaaaataactttgatttcattttatttgcttataacaaaagctataagaataactagtagaatctcttcctttatttgttacttatatatcagactgttgtaaagtggacaaaataaaatgactcttatggccagtttgtgctgggactggtttgtattgacttctgggagatggttattaagttttcagttttttgattgattgttaaaatgtagccatgattaaaagtcaaattttataaaatcgttacttataattaaaggtaataaatcctcaagacttcgctttctattcatgttactgcattttactactctacatggtggacaaaatggtataacactgagcaccacttcccagctggatgttcaatcattttaacccgatgacttgattttggccatggtgagagaatttgcaccacaaaataggcagacactacaaatcagcttcaccacactgaaaccaaagtgttaaacattttccaacacaccacttatagctgaatagtatttggaaaaaaaaatagatgctgttacagttctagggccacatatctaaaatgatggttcttaaagcacctgtgtttctatcctctgcttaccttattttaaaatgtaatttctttggttccatccttattcttctcagtaaggttctcttgtccaagtaattattgtatacactaaaatttaagagcagctgtcctagagctttctgaaatatggaggaataaaaataagtttgctctattttagtttatttttacattgaaaaagaagctaaattctggtggtaatagtaatgctacagcaatgagaataaaatcattcactaacttacaacagaagtaaacgatgatga

SEQ ID NO: 126852 - DNA, 1047 bp, Homo sapiens
atactaaagtaagtactaaaactgtcagaaacacatagcaggttagattcttatgctgtttgtttattttttcccctactgttatttttaatttaaaatagtcatgtgtattgtctcactttgatagtctttctgaggattggaattgtaccatctaccttaggcttaaaatatgtttgtcataagatataagcctagtggatatctcagaatctctcttttatgtgtacatctggatttaaatgctggggagacattgaagtaaggctgagaggaggccagatcttcctgccgactagaatagcccattccaggtgtttattgggctgactcggctagcggctaaattaatcttcaggtctcagctcttacaaccactactgggttataaagaaactaggataaacttcatattcaaagggaaaggctttaaattaattgaagaaagtgatcattctctttcttggaaaagagaatttgatttctattgcctgttaatttttcaaagaagtttaagagctgtatagcatatcaccttagacatataattataatgaaactttatatgtactttttgttattaaaataagtataattaggtaggctgacttcccttataattatctccttaaagttttattttaggcacagtctgttgttaatagtttatatgggtctgttttattttggatgaagagttttgacaattcataacatattgtcaggtaaaatccatttatatcttgcctaaattatatctgaacgtaggaaaatgaatattttagtccattttggaagcatattctatgcatggttttcttggaaaaatacaaaatatctatatctcagaaaaaatatactgactcaatattgagtagatatttgatgaaaaaaataagaataccatatggcaaattagaatttggtagtttattttttgccatttagaaattagagaatatattttaatattcttaactcaaaaaagcattgcattttattcaccttaaaaattaatttaaaaatctgaattgtggagtttacatt

SEQ ID NO: 126853 - DNA, 1050 bp, Homo sapiens
tcccatatttcaacatgtgaacatttgataatggcatttactgacatgatttagtcctgttgtaatagaaacaacatctgatttgagctagaaagaacagattacttaaattgtgacttaagaaccagctctgtgacctcagacaagtaaattatttttgctgacctttagtttcctcattgtaattgaggatgttggtacctacttgataaagctattataaaattcacagagataatattaatattaatactgggcttcaatctctagcaataagatatagggctccacaatgacaaaactcagcttattagcatgctatcattttccctattctgtatggtccctgatagctgagtttaagctaattagacccaagatagaaaacaaagaatcttgttaacattatacacctcgagatcctgttcctgctccaacctcggtgtactcaagaacgcacatttccagctcatatcctttcaggaaaaatcataataatcccttacttattcctcttccattgcctcagcctacacactaaaatttatttacttcattattttattgggcttcaggattgtggcattttcttcagtttcattttcaggatcttttctgatctttctacatccctgtcctttgaatctctattcttagtccaaggacacagtaatttctatgctcctatgcccatactttacccaaggcatgtgatagttttgtacatagctgaagatttaattgacctctaagcaaagagtttctgaaggatctggtggtgtaagacaaattgatacagatttatgtagctgagtgcctagcacatagtaagtacctattaagtgttagcttaagctttgggtttataagcgttccttatgtatttttttaagggacctaatatatgcaaataaacatgccctgaagagactactgtgtcaaactgcttgacagaccatcaaaaacagttacaaaaaaagtcttaaaaaggactaatgtggttcatagaggtgcctttccatctgtcccccacctctaccaataaggctg

SEQ ID NO: 126854 - DNA, 1062 bp, Homo sapiens
tctccagggtggggtccaggcattaggattttcaaaagagctttccaagtgatttcaatgtgcagctaagatgaagaccactgcatgaattggagacctcattgagaggttttgtttttatcctagaaccatgatacatctttaaagctttaagcatggatgaggggtgatcacatttacattttttaaaaatcactctggtgaaagcacagagatcagattagagggaaatatgatagatgtaaatgttggcagatccttttagtggcttgggcagtagcccagttcatggatgatggcttcatggtagatgaagatggaatcaagagttatttggaagatgaaaggtcttgattacaaattgaatgtggaaggggaggggaggaggtgctgttcagtgtgatggaggatactgcaagtagatgcagtcgttacatgattttttaaagatcaaatatatgcaaaaacttgtcatgagttttgagaccatgcagacagatgcattaaaagtaaaataaggtctttccattgctgaagaagtccataggttttgctatcgagtatttaaattactaactgtaacactgacggaggttaggaattataccaatgatgaggaatattacttattgtattcttgttatctagaaagtaagtcatccaaaggaagggcaaattggagagtaattcttttattgtgggttcttgcatgacccactaaggtccttctgaagaaaatatttatttgtgccataaaagacataaaattaatagtacttgatttttaattttaatagttataatgaacttaatgataggctagtccaatgtctttttatggagggaccaaagctccatggggtttaggaatgtgttcaggtcacatggttttcatttctccacactacaatgaacttgttggattatgtgctaacctgttctctgtaaacctttgactccttagagagcttgcttctccacatttacatacatttctgcattttcttaaacttctatgtatttttcctcttcttgtattgaaaatacaatgtaacctgagac

SEQ ID NO: 126855 - DNA, 1127 bp, Homo sapiens
gctactttatggaaagtgtttagagaatacctaacaaagtgactcatgagtagaagcctggaggaaatgaaagagtggccacataaatatttggggtaagtacattccagggagaaggaatagaaaatgcaaaggccctgaggtatgagtgtgccaggtgtttttagggaagagcaagggcaccagtatgcctaggatgtaacatgtcaggcagggaggacggtaggaaataaggtcagtgaggtggtggaggctcagaggatgaagggccttctaggccattaaggacttaagcttttaatctatatcataaaggaagccattggacagttttgagcattgaagtgacataactgatttatacttttagagaagtactctttctattgtgttgagagtagacaataagggagggaaggtgaaaacatgaaggctaagaggctactgcaatagtccagacaaaagatatgatggtatgaagtcgtaggatcctggatgtatttcaaagaaagagctggacttcatagggtttgctaacagatttaaggtgggtatgagaaacagggagaagctaaagatgagtacaagttgttctgagcaactggtaaatctgttccatttaccatcatcataacaaacttagtgtcataaaacagccatgttattttactcacatgtttgataggttagaaattcaaatgggacacagcaggggcatcttgtctgttccctctattcgacaatatctaaagccttggttgggaagacccaaagcctggggttcactcagtggtgagagactggaattatctggaagtgtcttcattcacatgtctggcaattgatgtttgcttttagttaggacttcagctagtttgtcagctggaacacctacacacagcttccccaggtcgtctttccaggcaagtgagtttggacttccacacagcacagcagctaagttccaagactgactgacccaagagagccaattggaattgcattttcatgatctagtcttagacatcacataactttacttccactattctctatggaatgagacagtcacaaaggttcacacggaatcaaggataggaaacagatgtactaccatttgatgggag

SEQ ID NO: 126856 - DNA, 1090 bp, Homo sapiens
accatgttgggcaggctggtttgtacctcccggcctcaagtgatccacccacttcggcctcccaaagtgctgggattacaggtgtgagccatcacgctcagctggataagttcttcaggggtgatttctggatacattttgaccagtttctccccatttccccaactgcccaccccagtaaccaccattcttctctctgtttctatgtattcaacttttttagattccatgtgtaagtgagatcatgcagtctccttctttctgtgtctggcttatttcgtatagcacaatgccccccagttttatccatgttgctgcaagtggcaggacattcttttttaaggctgaataagatttcattgtatggttgccaggggctgggggagggggagatgactaggtggagcacagaggatctttaaggcaccaaaactcctctgtatgatactataatggtggatacatgtcattcattgtatgtgtgtcaatagaatgtacccctagaatgtacaacattaagagtgacctttttttgtaaactgtggactttgggagataatgatgtgtcagaaaaggttcatggaagaataatcaatgtaccactgcagtgcaagcagcgtgaaagacattgttagtgggagaaactgtactgtgggggagatcgaagtatatgagaattctctgtgttttctgtccaattctactgagaacccaaagctgcttaaaaaataaagtctacttaaaaaatttttttaaaggccagaaaagccggatgtttagtctcagtgactatcaagagatcaaccaagtggcagggtctggaaaaaacttacagggtttgatttcatacagattttaatttctaaactagtactgaataagacttagagaagggaaaaaaatggtatcaactcagtacctgtatgccagtcctttcacatttatttccatttaattctaactctaggaggtaagtatgtataatcccttttcatgtaagaaaattagattctgagaagttagattattagctaaattcaacaagctaagggtagagggtgcacgtgtcaaacctgtctgcctctctctg

SEQ ID NO: 126857 - DNA, 2104 bp, Homo sapiens
cactgtaaagtctgatcatttattgtagtgctgtgtaatggttagaactgagccctctgagccaaactgcctagattctaatatcagccgttgactatctctttgattttgggcaagttatttaaccttttttataagacagaaataatcagagtatctacctcacaggttgttgggaagagttaaatgagttagtgtatataagagttaaatgagttacctcttgggaagagttaaatgagttacctcttgggaagagttaaatgagttagtgtatataaagcatacaggtcagtggctgatgcataatttaggtctcagtgtatattagatatttttacaatcatcatcagagacagtaacatcataagcatttgtcattaaccaatggaaacattttagtggagggagattggagataatcatattggttttatagatgaggaaaagagagctcaggaaagttgaaaaggtgtgttcaaggacgcataaatatctagagaaagatggcactgaggccccaacacttcttagttcggtgtacttcctaccaccccttattagggtagagtctgtgccatcatgagtaggttaaccaaaaatataatttgagttgaaaaattatgtatgccttatagacaataacattgcagatattctcctttattgataaatttgctaaaggtcagaagtttcctctttacagatgttagatcaaatttagcatgaactgttatgggtgagtgggtgggtgggtgtgtgtgtgtgtgtcagataatactcataatatgaaacatatatgttcagataatacttactagttactgtgttgcagttgcagaccacccagtattcaatgggaaacaaaacaccgatattccataagctactttattgatatagcttattttataattttctttgtgatttattaggtgaattaaacacataagaagagattttcttgttttgtaagtttatgatgcatattagatctcagggtaaagttattgaacattagcacatatgcacacaaaacactgtgataacatcacagaatatttaatgatacttgagtttcacatattttcacctgcaaagcccagagcatttcataaatatgaatgctgttaatcaaaaatttgaataagtagatggattttgtattgtaccctgaagataagtagatttagattcttattgaatttatgtcatctattttaggagttaggtggaggtgataaaactgagcctagatttttatcatctgccataataagtggttccaaataaaacattttagaatgttaccagaaataaagagttgctagattgtcatactctagatatgaaaaacaaggtaaatatggaaaattaaataaaacaaaatgaacagcatgtaaatattgtttaaaagatatagagaaattaagaaaaaaggtatagtcagtttataaaacacgtttgtattgtcttgtttacacacaccatggaaatcaatagttgtagttttacttgaaagatataatttataatgattatttaactaggaatttcaacttcttccttttaattcgtattattatccattttccccattctgagctcctctagctctaaaattcacatgatgttctacagtgggacattttgcttagtaaaatcattggggcctaatttgctaaaagaattcatactgtgtggtttaagaaattcatagtgagtacctaacaattacatgttgctgaggtcatggtttttggaactttgtgatagtgatggtttgggtttgcacagaaaagtaagtggaagcagctctccaccagcacacttatgggatcactttcattatccataccctattttaattagacatcctgggagttcttcacagttttcaaaatggggacatttctgcacttcagccaaaatatatgcatcacagttcatgtagggtaaagttcatatcatatagaaactgcttgggcttgaaggcctttctcagttccatcacagcctcattctctcccagcctccgaacctccccaaacactaagctgcttctcttccgctgtaacctatctttaccttaccatgacttcca

SEQ ID NO: 126858 - DNA, 1033 bp, Homo sapiens
tcggaagcagttttaaaaaaaaccctgctgggacctttagcttcaattagggactttcaccgaagcctctaacaagtctgagagcactgtttgttttaaagcactaaacactttagacttcacctggaaagaatacctgggtacctctgaataaatcagtgaccccaaatgtctagagaacaaatgaagattctgcagattctttccctctagtattttcgtcaggccagagcattcttcttttagtgcatggttatttttatacttgctattgcaaccctttattgaaatatttgtaacctctcataacagcctcttttgataagtttccatttcggttttcattttgcaaatgagatcttatttaccaagttggctgcttgtgtcttttggctaaatatgcagcatattttaggggctataacaagatacgtttgaaaggccaataatttgttattaccatatggtagaaagaataaagaagttttctcaagattcccattcccaaattgtgtaatcaaacactcacccagatacttatgtgaagggactttggagacagaattaagtttaataattctgaccttaaattagataaggaacctgaatgtttctaggggagggggcaatatttaatgtaatcacacaaacccttaaaagcaaagcaggaaaacagaaaagttagagagaagctgttgaagatggaggcagaagaaagatgaggtagaagggaaggtagagagatttgaaacatgaggattcaacccactgttgccaactttaagggtcgaggaatgcaagtggcctctagaaactgagaacgaccccagtccacaggcagcaaggaagccagacctcactccttcagctacgtggagctaaatttgtccagcaatccaaatgagcttggaagtgaactctcccccagggccaggccagcagacactttaatttcggccttgggaaacccagagcagccagttctgacttctgacctactgaactgtgaggtaatagacttgagttgttctaa

SEQ ID NO: 126859 - DNA, 1656 bp, Homo sapiens
ggcatctgaagcaaaaaagaaaataacttagttgatctagttctcattgtttacctgaagagaactttcatattcatctcagaggccttcatgaatcaggctggtaagtaaatgagagaattgactgggcataaaccaaagagaatggtacagcttgtgtttgccccattcaaaggagtttgagctaaagctaagcagaaaccaaaatctttttcactgactaaataaaaccaaagggctgagatgcacttagacagctgagttaccattgaaatacaggggaaatttatcctgaatttgtcatattaggccttctgtaacatgaaatgtaatgtttaatatgcaagttattttatttaaaaaagtcattgctttaaatcgtcttctaatattgaacttctgaaaaagctgaaagattaaatttattgttttgcctcagtgaatgtactatgaagtctctaaaaatcagccatccccccagatggtctaagaatgcccctaggtggcaagacataattaaaaatactctaattttgtgattaaagctctctctctctttttttttttttttttgagacgaagtttcactcttgtcacccaggctggagtgaaatggcacaatcttggctcactgcgacctctgcctcccaggttcaagcgattctcctgcctcagcttcttgagtagctgggattacaggcacccaccaccacaccctgctactttttgtatttttagtggagataggatttcaccatgttggccaggctagtgtcaaactcctgacctcagataatctgcctgcctcagcctcccaaagtgctgggattacaggcatgagccaccgtgcccgacctcatgattaaaactcttctaagagctccactttttcttgttctagaatgaatatctccagcaatgcaataaatgttctcccttgcattaaataggaagcaaggccataatatgacaattaattacatcttatgtatgaggtagaatgtggcagaggggagtgaggcattactgatcaccagtagagttcccagaggaaaacatgtcaggagctgtactggagggagcagggaaacctgccctaatcctttctcctactggcctggttacctaaatgcattctcagaattagaaaaactcatcacgacttctgtgtctatttctatatgtttatgttattcatatgatcagagaaacctgaattctccctctgcattctcatactccagtaatttttatctctgtgatagcagaattcctatgaagaattctaagtttcttggtggtacttgtgaacaaaagaaactttttattattatcactatgtgcaaaatgcctgtccagggttaagtggtgatccatgtgacttaaattcagttctgggtaggtacatagctcgagacttgggcttcacaacgttctgagttcaccaatggtcaccaggccaagtaaagctacagaaaagctaggaagcacgccaccagcaggccccttttagattgtgaaaaatagggaaggcaggcttgtcagctgaagagagtggtctatgactactggctagaagagaaggaatgtgtcacatactgggacgtcctgaactttagcatggcttactttgctaagatgttatttagcaaaacc

SEQ ID NO: 126860 - DNA, 1116 bp, Homo sapiens
agatagacacatacatacatttttgcatattccccacccttacctctttcttgctctttctccctttctgtctctttctctgtctctctgccttttgtttccttcccctcttttctctctctttcctcctcacctcctttcctcccttctttactctttctccctccctttcttctctcctaaactggaataccatacacatattctgtaacttgcttctttttatacagtgtattatagacattgccttgatgtcaatacctgtagatgtaatccattccttttaatagttgtataatattccataatatgaatgtatcatgttttatttaatcatttctctattgatgagcaggttgtttttagttttgtgccattactaacagcaataaacaaccttgtacataaatacttaggtattctgcctttaatttttatgaaaaatccctgaacttgagattactgattcaaaaggtatcttcacctttaaatagtaatggaccttgccatattacttttcagaaaggttgtggtaattcacatggccatcagcagtgaagcagaatttctctgcaccctggggatccttattagttctggatttatcagtctttaaaattgttttccaattcaattggcaaaaatataagagaatttcattaatgctttatgtttcattataccacatcagccacctaaagcacaagggcaaacaaccaaaagcctagggccacagaggtttctaaggggattttttaataacttatgatgcatgagagaattttgccatgtgtgtttatgaggtgtattagtctgttttcacactgctgataaagacatacccaagactggcaatttacaaaagaaagaggtttattgggctttcagttccatgtggctggggaggcctcacaatcatgatggaaggtgaaaggcacgtctcacatggcagcaggcaagagaagagagcttgtacagagaaactccccttttaaaaccatcagattcgtgagacttatttactgtcacaagaacagcacaggaaagacctacctctatcattcaattacctcctactgggtatcttcctcaacacatggaaattccagatgagat

SEQ ID NO: 126861 - DNA, 1285 bp, Homo sapiens
gtactgtctgaaaccatttccactgctatcctaattgctatcctaattacttcacatcacgacatacgcgctcagtgcctactctctatagaaagttgatggaagaataaaagctcatgaacacacaatctagagattaaggtgtatacacattattttacaaaagctaaggtttttttttctgataaaactaatacatgtctttgtttacagaacaataccaatgaatacatatgtgtataaagtacaaatttcaagtcccaccagaacaaaccattttggcctaacatcatgattttttgtgcatttgtgtatgtttgtgtttgtcttatttctatgcctgtataaatgtgtttgtgtgtgtgtgtgtactcagatatatgcgtgtgtgtgtgtatgcaaatgtaatcaagttatacattttgtttaggaactgcttatgtgatttattatggacatgttcccatgttgttctagtaatcttttgctgcataaccaactcaagatgtagttgtttaaaacagcagtatcttcagtctttggcagggatcaccagggacagagcagctctgctccacttttgtatcatctgggatggctcaaagtctgggagctggaaccatgaaaagacgttttcactcatgtttctgacaaattatgctggctgtgggcttagatcttagtttagtctatcagttggaatgcctccacttgggctctctatgtggccggggtttctattggaagacaattctccatgaatatttcatggttctacatgatccaggccctctgaacaaaggcatttacaataacgtttttataaggagacattccaggatagtgaagcttagagacatctcccttcctggagacagtccagggtagtaaagataaaaacctgtcctcctccccagatttgcttgcattccagaatgaagataatgtttctctttctcctgaagggaggattggcacatcatcaacagccctatagaagatcaaaaattttctaatttggggatttctgttttataatgcaccccgttgcatgtgcaggtaccattctggccatcatgttgccctgcaaggacttgggcttagaaaactcatgcaaggtgttgttcttgctgtgagtaatgaactgtatttgtctatgactcagaggcctcatgtttcttgtgtgtatgtatatgtatgtgtgtgaatcaagcaatattcataattttaatatggatgtttatggctatatatgtgtatacatccatccatccatccatccatc

SEQ ID NO: 126862 - DNA, 1168 bp, Homo sapiens
aaaagattaatacaaatgtaattgaaaggaagaaagaaatcaaagagaagggcagaaacaaatttgcttactgtgagacgagttcagctgtagttaggcatctgtttggttatgagcttcctggcagcctagtagaaagtggagttattatgaataaaagagttttaatatcagaaaagcgaatgtatatcatctcttacaaggcgatggagttaatgctgagtggtgtactagcagtgtctttttaatattttttaacacaagcagaaatcacatacttgttttctgatagttatcaaaataaattaggactttaaacattgaaacccatcttaatcaagcagatgcttcaaataatgaagttgtatgaatatccacagaggttaaatgctacccaaatatagaggagcctcaagtgcctcaggactgactggattttgaatcccttaaagtggtatttgagtactcataagactaataaagttcttgttaaaaatacagattgttgagctctattcctggaatttctgatttagtcagtttgagatgagatccaggaatctatatttttaacaggtacctaatatgattctaatgcaactagtctcagtagcattttgaaaatcagtggcttgggctctcttttttcatatgtcttttatgttagtcaaatttttcttaggaatcagatagaatagtttaataatatacaatctgaagacagcctgcagggcaggtgttttataatgctgattaaggggagaactatacaggatcacacaattggtaggacttttattctatttatgcaaattatagagccagactggtatgctaggctagacaaaaggccagccccccataggtttcacctgatcaagaccagatattccccaagaaagaattttgagtttgctccagtacttggattactgatgaattcaaacatcaagttagaacaaatcagacatagttttgtgtttgaaaatccttagagaaagtattatctatggcacacaaatagctatcccaaaagccttaatgatgaccctttgcaggtctccagatatgcctgccaggataagtgagctgctagatgttccccagacaattgaacacattgacctgttacatggtgctatttaatatcgatcagatgaatgtcaga

SEQ ID NO: 126863 - DNA, 1997 bp, Homo sapiens
cctgggcaacatatggaaatctcatctctacaaaaaacataaaaattagctgggcatggttgtgcatgcctgtagtccctcctactcgggaggattacctaagcctggggagtttgaggatgcagtgagccaatattgcaacactgcactctagcctgagtgcagccgacgcaagaccctgtctccaaaaaaaaaagtttgtcgtcaccaaaaagcattatattaatggaaaaatgtttcattttctccttctaatggaaattaaattagcaaaaattaatttagcttatttttcttctctctgtcttacagtagatctgtctctctgtctctgtctctctgtctctgtctctctctctctctctctctctctctctctcacacacacacacacacacacacacacacaaactgctggtggtagtcattcttttacctcttggctttgagataaaacaaatacctttgaggaatttttaatttttttaatcagtaaataatgacattagtatttttgaatagttggattcattacatacatttttatccattattatttgactagatccatctaattgtgactactttgctttcaaaattgaaaggattgccctgactttatttttaaaagaaggaaatttagttaacctttgttttagttttcttaggtttccttttttccaaaatggctttaacacaaaaaatgtaggtggattcacctgcaagccttgtgatttgggagctgttgatgacagatgtaaagggagctataaatttaaactctataatttgtgaactgtcagtatagttgcagcatcagtgcggtatacattattgttctccaattttgtagagtatgagatgagcagtaatctagttatatgaatctcaaggccaagattctgataatacctttattgtactaactataaattatagacaaacatgcttgcagagaataagacattttttcttcagcttcctgaaagtatagaatttaagatatacttaagttctataattgtatctgtcaacattcaattggtcaataaaaggtattaccatcaacatgacattgccttttaagtaatcttaagggctccaagaatgtactacatacagagatatctctcaataggaggtaatattttctatgaaatttattactctagtcatagcatattcacgtgactgaaatattttttaaatcttaggataaatgaaaaatttgctatttataagttaaaattaaatttttaattatcttgtattttcctcttttttccaattcagtttcttggctttatatattccacaaaatggaatataatgctgccccacagttgatttgtttattctgaccatctaaccattgatgttgatctctacttaatcagttcagaatgaggtgaagctttgattataacaacagcaaaactaaacaatgacacatgtgacaggttggttcatgaattcctcatattaatgttttaggttaaaaatataacatcagtttaagtccagagtagatgagaacaagttttaaaagtacaattcataattttttatgagtatgattgtgaaggatggtctgtaataacatgaacaattttcctattctaggtttagaactaaaaaaactacactttactcctgacaaaagacacagattttaaatttttatttgcacaactgtatactcctaaacaacgtatttttttttttttttgagacagggtctcactctgtcacccaggtacccaggccagtttcagtggcacaatctcagctcactacaacctctgccacccaggctcaagtgatcctcccacctcagcctcctgagtgtctgagactgcaggtacacaacaccatgcctggctatttttgtatttttttgtagagacgggatttctccatgttgcccaggctagtctcgaactcctgagctcaagcagtctgcctgcctcggcctcccaaaaatctgggattacagt

SEQ ID NO: 126864 - DNA, 1351 bp, Homo sapiens
tgcttgcaaactaatgtgtaagccagccattggatcatggattctaacagaggatttaagactcaggtcagagaaaaagggcagtttattactcatagcaacagcagtagccagagtatcagaatttgtgctggttctccgatcccccagtttccacagggtaatgtgtggagggccaggcgttataggaggtgggtcttgaacttcaggaatctgaattttttatatgaggaggtaagtgggccagctctctgctttttagggagagacgtttattttctaaggctgtactcaaacttgctctttgttctagagaaagatatctttatcttccaaggctgttcgctgtacaaatgtccttgaaagtctaaaataaagtaatatgttcacaaaagacctgaaggtcttttcagagatctttataggcactgaaatagtggggaagatttagttattttgagaatgcaaaagtaaatttattttttttctattaaattttactttcagcacagtggctcacacctataatcccaatactttggaggctgaggcaggaggatcacttgaggccaggagtttgaggccagcctgcgcaacacactgaaaccctgtctctacaaaaaattaaaaaaaaaaaaattagccgggcctgggagcacatatctatagacacagctgctcggggtctgatgtgggaggatcgcttgagcccaggagtttgaggctgcagtgagctatgattgtgccactacactccagcctgggtgacagagcatgaccctgtttctaaaaaaaaataaaaaatgtataaaacaatatgactttaaaaatctcctctaaagacattctggatccccactggaggattttataaaagtataaaacacagccccatttctaaaaaaaaataaataaaatatattaaaaaaaattgactttaaaagtcttctctaaagacattctgaatccccactgggggattttataaaagtataaaaatccacatgtatttatatatgagtgtaatatgtgttgcttatccatacatgcacacagtttatttaagaaaatacaggcatgctagagatgtcaaaaacttctaatatacaaattaatgttgtacatattagtcacttaaaatatatattttataaataaaccatgcaggtcatgtggacataatttatacttgtaatataatagtgttgattggaattaatatgttttcccatattttctgaatctgctttaggcatttggatattataatagacacatatttggtaaacagattgacaagtttcatatcttctgaattatccttaaaatatttttgtaatttggttaaagt

SEQ ID NO: 126865 - DNA, 1049 bp, Homo sapiens
atacctgaatgtactttgacatgcctagagaatttctgaagaagttctgctttgtatcaatttttagcctatacttaagtatactgatgtccatgttctcctcaaaaaaaaaaaattagtttggagaataaaggtagggttcttacataattttcctcattaaaaatggagctgaaatcaggttaaatactaaaaatgaaaagctgtcttaaatgctgcttgattaatgaatagggaaaaatacagaaggggtatctctacagtgacttcttttctcggggttcatcggtgctgcctacctgattgttttttgaaggagggtgtcttttgtgattaagtcacttgtcagatttgtattgatatgcaaagttttgttttatttaatctatctctagaagctccaccatctgttactaagattcttccagcaggaagttcaagagaatagcatttgtaaggtaaaaatatatcagccatagctagagcttcaaacaatgttttataattaagatatagaactcagagtaaatgttgatgaaatgtagttggtaagagcgaaatgaaggctaacactggagagtaggcaagatgggaaaagctgaaaggcaggaaacatatttacatttctttttgaaaatattcagaaaagtccgtcttaattttatttacttttagaggatgtttaaaatttagtgtttgtcagaatccatcttttcacccattcaattaatacttattaaacccaacaatgaatgaataagcatagttacagtgtgtgtgtgtgtgcaaatgtatgcgcttcctgacacgtataatcttttacaaataatacagaaaataggtaaagtttatctttaaatatacaaattttaaatactgaattaaaaacatgttaaaagtgggtaagaatagttaaatatttgaacatcctaaataatattagacaggtagctagcatgacagtggggaaatatttagatatttagataaatatctatggaatggagcatagccacttaaaaaaggaaggatgtagtcaatggatcaca

SEQ ID NO: 126866 - DNA, 1117 bp, Homo sapiens
cagaacctaaccatgcaggcactctgatcttggacttccagcattcagaactgtgagaaaatgaatttctgttgtttaagtcacccagtctgtggtattttattatggtaccccaagcagactaatacaagtgcatagtgataattatatggataagttattgagtgaagatggtgtgaataaaaaagatttcatctgtgtaaaattccctttaaccaatagtgtatattgaggtatatatatattttttgtacgtgaaaatctgccactgtgtttgcaattggtaattatagcttaaggttcttttaatgtatttcgtgttctttgaacattttgtaaaatacagccatggcagtactgaagcagaactgaagctatgtgtgtatgcttagatttaggaaacattggaatcttccacaaacagatcactaaataacaaacacccaagatttgggatttactcctttgggttcaaggctttgtgtctctcggaaacctttggtaaaatgtaaatatccttaaaagagtaattaacttgaactttactgttatttttccaagcgtggaatactttttaagattaacaaattgtcattttagggaggagagttatgactctgaggaagagcagattaaactagggaggtttcacagtggggaggatgggccctgatgtgctaccaagagtgaagcaatagagggaagagcaaccctgagagagctcaggtggcacagggaagccagttggtactgagttcctggaataccctgtcctctctgatctctgtggcttaaaaatcttccttctgcttgcctcttccctcttatctgaatgttctcaaaccatcgcctttgtgctgttttaaaactcactcccatctccacaaccaactaccagattttatgcgattattcctatctccatttctctttctgtcaccgaggcttcgtgctgaaattggtagttcttttaatcttttcttctcttcaccccaattagaaatttcctaaagtagagtaacagcaaagaacctgaaacctgagccaaaacaacaaatgtaatagatactcaaggataagatttatgatcaggctttgctatgggaaaaaaaatgtc

SEQ ID NO: 126867 - DNA, 1658 bp, Homo sapiens
tctgatttagtagaacttgtgtgggtttcaggaagctgtacttcagcaagtattccccaaatgaaactaatacagttcaaatgcaaggccaggccatgcctcaagaaacactggcttataggggcctatagttttgtctgtgttcacatactgtttaaacacagtttaataatgttgtgaatgcctgaggaagtgggttgtatgtgtatgtaagtgcacgtatgtgtgtaattgttgattaggtggatatagtggaactaactaaaaagacatttcattctaaagattagacgttctcgtttctattgactttatttacaactattgcacttatgtataatctgcccttttattggttgagttttaaaaatgtaattagtttcagatgattttcaaataatctgaatttacagaatcagatttttaattagaaattggatggtagaaatgaaagagtgtgttaattaaatatgtgttttattttattagaaagtttcaatagccccacctgaaattgattctacctggttgattttcctgaactctgggaacaaataattacagtttctgttgcgtatgaccaagtaaaagctgaagaaactatttatatagtaaaaatgagcaccctggtaaaagtgatagcattctctagagaaaaatattcttgtgttagaaaaacttaaagcttccttttccaagagaatattaaaataattggagtctccctcttttttttttgttttaatttttttcaagaaattttgttcctttttcagaggtttctttttgcattcagttcaggaactgttaaaacctggctgttttccagaacaagaaattgattagattgtagaaagaataatggagacaggctagtggattcaaggaaaattgtatgtgtaaaaagcaccagatacaatgcttagtggagtattcttcccattgcaattattcatttaaagacagttgctggctgacttcttatgtaaacagagcaatgcctgcccaatgccagttcatattttcactgttagagattttctaaagatagaaaatgttttagtaatctttgtgtatgtctcctttgcctagcccagggcctgacactcaaaagtttaatgaatgtctagattagactagagcaggttggaataaaatatgtgataaatttgctatgatttgaaccccccagcctctgggcctggatttgatgatcacaattataaaaatataacctactgtgccactttacacttggggtgattgattttggtgcttatcgctaaactagctcaaagggttgtcttcatccaacataattactattcctgtaattactgaatctataaatttcatgcctcttttgtttcaaacagaaaaatgggcttgggaaataagaaaaacgaagaaatccttagtcaaaataatatacaccaggtgttctttgtctcggcttgatttagttagtcttgctcatctaatacgtcatgcttgtctctccgtatcactgaattttcagcttggttacacacacacacacacacacacacacaaacctcacaagaacctggtattcagaataaaaagagctacagataaaaactttttgaagcttgagtttgcgtctctctgaaggtgagctgccttcagttaattgc

SEQ ID NO: 126868 - DNA, 1047 bp, Homo sapiens
actactcccagacctactctaacatgaagttttgcttctgactaagccagttaccccacacagcatttgcagtataattgcacagtgattctgtgtgtgaaaagactgtgaactttgccaaggcaactatgggagctaactcatccttgtatccctgtagcccagaactgggaacagagtttaacagctgtttcatgacacagctaatggccaatttctgcacagcaaaggttcatctagaacagggttcagtgaaatatggcccttgaaccaaatctggcccattcctatttctgtataaaagaagttatgttggaacacagccacactctggctttcatattgactatggctgctttccctctgtaacggctgagttaagtacttgcaagagagacttatatcccacaaatcctaaaatatttattatctgctctttatttaaaaagcttgccaacctctgaccctagtgaattagtaatagataactttagaaagattagtttaggactgattatgtctggctgttaataggaaagtcagaaatttgaacattatctagaagggactaaaaagccgtttacattttggaacaggagagtaataagttatgagaggtatcctggcaagactggtttgggaaaattatgaatgaaagattagattggaaatgggatataggtagaaaatgcaattatttgataatactattggttcaaatgggagatgattaggcattaggcaaaggtggtagtaataaaaatatgaagtagattgactcataagagtccttaggaaccaataattggtttgatgtctgttagattctgctccctcgtattaactcaccacatctgtcagagaaattcaccagctggaatactgaactaacttcatgcttatctctggtgggtcaaaccttaaaattaagcacgagcagcagtcttggctacctgatgagaattgtgctgcctggtaatgattagatttttgtccctgacattgggagtggcaatccagtcttgttcatgactccttaagcttata

SEQ ID NO: 126869 - DNA, 1430 bp, Homo sapiens
tgcattgaaaatattctgcctgtacaatacagaataatcttgtgatacacgagaatgaattttcattgcattttttattgtcgaattgtagcattttccttgtgtaacttctctagagcagctagaatagcttttatttaaaatcagccatttcaaattttaaaaaaggtcattagacagtgttgacaggatccaaatgaagtattctcttcacactttctttgaaaaaatggtgcttagactttaattggttatattttcttgttgcttgtagtacatgcttattctttagaaaattttgataggaactaaaataatctgtattttatagaaaaatattggtaacaatagttttatggtttttgttaataagtcataaagccttaccttgtggtttttcatcaaatgtttctcatggttcccataaacagtgctggaacctggcaacctcacatgctttacctagatataattttcatttgactggtatagacaaaggcatacatctcataaaaagatcaaagccacttaaaggagataccattataatgaaaatatttgtgtaaccaaagataactaagtctcaaaagagagcccattctcagaagctgtgttcaacaccaagaaatgtccatgcagtaaaatgaaacagaaagtccctcaagattagcttcattgtttgttggatttgttgctgtaattaagacatgaaaaaaatatatatgattttaaaaagagagcttggaaacataatatggtggtgaaataaataatgtcacccatctccccaagagaagaggcagtcttagcttccattcctaccaaatcaaattttgtcttatgtcttaattattctgctagtgtagaaatcattttccacatgatttcatttttagatagaagaatgtcagcagaattgtcattagacttcattgctatcacagatactgttcctttgggccgtttaattacagaattaaacacattcattttattagaaatatatatttactgataataggtcaggagccaagatttagtgaaacatatgcaggggttattaatttagcaatttcataagtgcttagaattttttttaaagtgaggttgaagcctttattttacttgtaagatgtaattggtgcctacataactgagtgtacatagaaaaataaaatggaaaatatgaggcgcccataagacaaaaaaagtctactattgaatatattgagattcaaagtttgagattaaattgcctcatttacatggatatatacttataaaatatttgatgggtaattatttactctccacttcttttaataaatagcaagctatgtaaataactttgcaaacaccaaactacgtaaataacgttcttttgactgagctggaagacagctttttttggaaatttttaattttctgaa

SEQ ID NO: 126870 - DNA, 1090 bp, Homo sapiens
ctgcttctcattatctagtgtgtttaaaagcttggatcttcactcattacattttcctaaaggcagacatatctatactttttaacgtatatataagttgagcatcccaatccaaaagtctgaaatctgaaatgctccaaaattcttagattgctgagcaccaatatgatgctcaaaggaaatgttcattggagtattttggatttcaaattttgggattagatatgctcatccagtaagtatagtgcaaatactccgaaataaaaaaaaaatccaaaatttgaaatacttctggtttcaagtattttggataagggatattcaacttgtataagttaatattgaatacctttagatatgtttgtgaaaaaattttatccatatagtttttttctaaaatttaatgtcggtggtctctaataaaataatttctttcacatagtatgagggcacactcctgctgtcactaatggagcagccactttgactcatctttggctgacagtacagtaatagagctagagttggataagcatatataattgtgtggaagatgactttaggaaactactcctacttcttttttttctagttgcaatgatgataataaatactactaaggccttctcttgcttttgaatagtaattattacaaaaatataatctaatttttgtaaggtatactaaaggtgaaataaacagattggaaatgttttaggtcacttacagtatagaagtgtctcttgtgacaaagtttgtagcaactcgcaagtgaaaaagattacctaaaagccattttatgtctctctcatcacagatatgattgggtatgaaatgtttccattgcgtgtgatgtctctgtgaaatatctttatgctaaccctcttgagtatatgatcattgcacaatgatggaaaatgtcctatcgtcccatgatatggatttgccaatttacgactttagtttgcatttctagtgtgataaatatctttcataagtttattttaaaattgtgataattgtctggtagtgttgttcagtgcatattactactggattttactggattatatcataaagacatggtgat

SEQ ID NO: 126871 - DNA, 1051 bp, Homo sapiens
tccaattcaaatttaaccacattctagtgggttcttgtaatgcatttgtatatagaaatgttattagtagataattaaaacataaaaagaagggttaaaaagccaaatgcaaaggtcattcaaaagatactgtatcgttctgtactttgaagatcaaatagtttcataatcattgcaggcaataaataatgagttgagttaacagagaaattattaaaaaataaaattacaagctctataaagatcaaaagaaaagaaagcacatcagtcagttcatatgtcttgattaaagagttgtctttgtggccccgaaggcctaaaaagttaaaaatattattaactctgaaataggagcacaaaggcaggtttcctgagcttcccacctagaagaggataacaaactttattgtaatgactgtgtagattggttgctaagttctttatttaaaaaaaaaaaaaaacaaactcaggaaaaagagctgattttctagctggagagtaccttctgattctttatgaattatatgacaggaagagccagtgtagactcagcccatcagtatgtgccccaactcttaaatctttcacttgtaattttactcacagatggggagcaatctccagggaagtagataatgtgttttatttgttctggcttttgtgtttgtgtttttgtttttgtgttttcttttgcctccccaatctatgcaataaatagcaaactttttagacttctaagtatgaagacattttagtatattacttaaacaaaagtgattattttaacaggcatcctgttagaaccagcatttgagaaatccttagcttagcgtagtgagcagccagttgagggcccttagcaacggcaaaatgaaggatatttccatgaacttgattcatcctctgttcttgccctctaacatttatttactgatgcattcagtctcagagggaaaaaacaaatgggaggattcctggacatattgcccttaattaatactcctagcttttataagttagtgtttgttttcttcttttttaatttctgcta

SEQ ID NO: 126872 - DNA, 1084 bp, Homo sapiens
tgcctggtttgcttactctgaaatggcctatcatgtctagcctccctccctaagcctaaccttaggcttaactgaagtttctgtacttaaaagttccattagtcaactttagtccatagtagtattctatctccttccttggcacatttactgttttaatggtctctctctctctctctctctctctgtctatctctctctctctttctctctctctctctctcctctgtttaacactgatgcttttctaactcacagaagtaagaatcccttcccttctcttggagagtacagatatactttaatgaatggtgggaaaggtaggtagagtttatgagcccactgtaggtagaggatagagatggatgaaacggctagatgaatggagggagacggttgttgttggatagggaggtgctcaactcaagagggcctgaaagtggagagagtttttgttaaccccagagagtagcctctgagagagggaagtaagttcacaaaaaaagactgcagacatgaatgtttccttcttcaaaatttgaccttaatatagcctagcctgatgtttcctgggcaggagaaatagaataatctcacagcaccgttctcgtgctttcactgcattagaagttttctcaagtacctttaggtgaaagtcatgtaacttcattacaccctgccatgctacattgtctggcttataaggtatttattttagggccatcagtcactgaatttctgtgtaaaatgaactcatgtctcttgtcgcagaataagcaattgtttgaactatcttgactaaactatttatttaggcacctaaccaattgattaaataataccactggactaagatcctttgttcttccagcaaagtacagcacagtttggtcccagctcaccactcctgcctcatttcatactgtgttcctactgcctttgcctttctgccactctggcctttcagtttctcagatgcactaggtttcttctgaacacgggatcttggcatacgctctcaatctgcctgaaactttgctttccttgcctgtgtagctctctccactatctcagactaggtcat

SEQ ID NO: 126873 - DNA, 1021 bp, Homo sapiens
tgccactgcactccagcctgggcgacagagtgagactccatctcaaaaaaagaaaaaaaaaactgcattctcaataaatacacactaggaaagtagattctgaagcagcgatttcagaaagggcttaaacatctaagacttctgttgggattcattcgatctagaaatagttattcagctcttattatgtaactggtgttgttctaggcaacgtggacatcgataagaatccccactctcgtgagtctgtatgcaacagtagtgtagggatgtggaggccagaaataggacataaaggcagaccacacacataaataaataaatggtaatggcaagtactctgaagaaaatagaagggggtgtggggctagccattgactggtttcagtggggtaggtgtgcatgagggttcaggtagtcagggaagtcgacccaggctagaagaaaggagtagaagaaagatgtagtcctgtgagaacatagggtctgtatttaaggtagcgagaaaagcaggaccttaaggtgctaatgagattggtctgtctgagtaagggaaaaaggggtcctctggtggatatgaagtggagtgtagtgggagatgaggctagagaatgcactaggatcagactatgtaaattctagaccatggcagagcttatattttactttaagtaagataggaagccacgagagggtttaaaacaggcaggtgacatgatttgattaatatgtttaagtgatcattggcaccagtgtgggggttctgtagtaacccagggaagcaatgatggtgactcgggccagggagatagaatggaaatggaaagaaactacagtagatggagtctggatatgctctgaagaacacgtcaagattagctgaggattagacatacgggctgaagtaaacagaggaatcagaggtggctctttggatttcaatctgaacaactgaaaaatacatggtgaaaaaatgtttgtggagatgaggaatataaggtagagaggagaacaagttagg

SEQ ID NO: 126874 - DNA, 1002 bp, Homo sapiens
gtctgaaactcctgacctcatgatcctcccacctcggcctcccaaagtgctgggattacaggaatgagccacattattttaactttttaaatggttatcccactgtgatatctctggaattagatctcccttatttccagataaggagactctctcagtcaatggtgtagtaatgtagtactactgttttgcccacatgagtatataatgtcagaatgtgttttaccttttagcaaaatatagcattgggttcccttcttttgctgtgtcagaacttcaacagtcttttctgtgtaagccctcttttgctgcacttgggagcttttctaacagcctgctatgttctattgttgatgcaatgaatacagcgagatacccacattttgtttaaagatagtcactgagctgtaccctactgccagcctagatgactgcttaattataggcatgcttttctaaaggacatatatttgttatcttccataaacagggagacagtaaaagtcatttggcttaccttcctagggatgaaggttcaggaaggggagcttcattcagtgcttcatgctgttgtcaacactaactttacaggtgacccaggaaattgtgaagtagttggggccgtagaacagacttcgtgccacagcacaaaaaatcttattacttttttttttattccctgtgtactcgctttacaattttagaaacaactgatttttttttttttttttgcaattttgcattagatcaatggttttaaaaatctggccaaacatggaagctcttgggacactgaaaaacacagatttctggaagtcacttcagaacaacttaattggaaacacccaggaatgcagcccagggatcggtaatttgtaaaagcttccctgggacacaaaaagtcttggtcccatttcagaccagttaaatcagaatcccaggggtgatgccctaggatcaggcattctaaaaactctccaggtaactctcatatataaccat

SEQ ID NO: 126875 - DNA, 1012 bp, Homo sapiens
tgagttattcttcaatttaagttcagcatttggttgtcaaagattcccagtcagttggaaaattataaaatcttcccacattatgttaatatttattgcaagaaacttaactcttgaatgaaatgtaattaattgacaaaaataagtggtgagcttatactttagaagtagaatttattaggttagccaccaaataacctagagcaaccaattaacaaattgttttattaccaacagattctgtacactaaaacaaaactgacaaaacagatttaatattcagttgtgttttttcagcttatttttcagtcctttaactagggtatgatttctttttaaatgtactaaaggatagctgtttcgttttgacaaaaattgagctccccagtacatccataattctgtggaggaagaacaaaaaagcccaatgaattagaatttgttaccacactgtcacaagctaagaaacttgcagatgcattcagttattgaattgagttcatgattttcgtttgtgttcttctgtgcatggactctgaaggaacattacttaatattagatttcactttctcaatagggaagacatacaggaaaaacttgaaaagcataaaggtatttcaattaagtctgctgagaatgaatgcagtaaataaaaccagattgtgatttatttatattactcacaagtttaaaccccttgtctctcattcgacaataaatatcctgcattattctctaaatagaactatgaagcataaagcaaacattgactatatgcttaaatgcattaatataattataagaatttcaaaccgttacttaataactgaagagatgtcttttgtttgtgtaaagcaaaaggatcacagatactgttcattcagaagacctccaaagaataggaagatatttgagaccatctatagttttcccagacagtcacaatagctgcagataaatgaagatttagaaagaaattatgctgagcaacagaagttatatggcatgtta

SEQ ID NO: 126876 - DNA, 1089 bp, Homo sapiens
gaatttgagtgaaaatgattaaatgtttttccttatttagggggctgacagttgttgatattttctttcagaagagtaaattgtgtagtgaaacctgtatatttggggtatggagagcagcaagtcattaactttgggctctgcaactggacatctgggaatcaaagagattttctactttgtttattacacaaataaattatattccctgaccactgtgtgatacctgattttaatatgaagccaggagcagacagtgaaaattgctgcatcccacgctgcttcagctctaggtgtactgatacttccaaagaatacttctgaagcctagatttcaattttacatacatcaaaaagtaaacgactatttaatcttttactgtaacatgaagaggagtgagtaatacatactggaatggagtttagtaggatggaaagccaaaatggaaagattttctatttgagatgaaagtataataagcagtaagctttacaaaaccctggaatatgcttttgaggagaccaatgaacagattagaatttggtttatgtatgggaaagtaaggtgacctttaatggatttctggggccgtcttttgaggattatgtaaatgaagcctgaattctaaatctaatacagctatcattaaaatcaagagaatgtttactgcatgatggtaattgaaatgactcctagctttataatgttcctgagccctagtattctcacatgactttcaaaaaataatgcctattttttattaaaacctgcaacatccttaacaataaagtggaaggaaatcaaggaggttatgataatgaaagttccccagcgatgtacgaaaatttcactgtagagtaagccactaatgagtattcaaatcattttaatctttgctaatatgaaaggtgaaaaaaattcttattgttgttttagtttgtattattttcattgctaaaagaatgaatattttatgcatttattatccttttatttccttttgtaaaagctattccagaattgtccattttaaaaaatggtattaggccaggcgcggtggctcacgcctgtaatcccagcactttggg

SEQ ID NO: 126877 - DNA, 1078 bp, Homo sapiens
atttatttgtgcctagttatttatttggtgtgatgtagaagccatgagcacaaactatgaactcaaactgccttggttcagatcccagctttgccactttggcaaattacttaactctgtaaattaaatcttcctcatcaataaaatggaaattgtaatagtgtatactccacggtgctttcttgagaattatatgaaataatggatataatttggttaacacagtgcctggctcttaaatgtgttcagtaagtatcagatagtgatagtttttgttgtgatttaatcatgatttattgagtgccttgaatatttcctgtgtgttaaacactgttcctgtctctgggattataaatattaaaagccaaagattaattcttgcccttttaaagtttatagtctggtggaaagacaacaaaggcaacaaaagaaaaggaatataacaagagaattgccactatgaagatgcactaaaacccctggagcttagcaggaacatctggtgggcctgagtggcccagctgtgttggagacaaattttgtgtaggagtttcagatgagaaggagatctgtagcctccttcttaattgcaaaaataatgtgtgcttagtagggaaaattcaaacaacactaaagcataaaacataaaaagaaaaggtctcatttctctctcgctaatcacacctccagacatatgtctggtatatattcttctagtctatgtcacactgaaaagattaggcaaacaacaccatcaaaaagtgggcgaaggatatgaacagacacttctcaaaagaagacatttatgcagccaacaaacatgtgaaaaaagctcatcatcactggtcatcagagaaatgcaagtaaaaaccacaatgagataccatctcacgtcacttagaatggcgatcattaaaaagtcaggaaacaacagatgctggagaggatgtggagaaatagaaatgcttttacactgttggtgggagtgtaaattagttcaaccattgtggtagacagtgtggcgattcctgaaggatctagaaccagaaatactatttgacccgcaatcccattcctg

SEQ ID NO: 126878 - DNA, 1038 bp, Homo sapiens
tttcatcttcctaaaacaacatagacataactgattgtataatgttatcttcttgttctaggtctcctaaaaacccagaacagaagatcattaagagagtgattgctcttgaaggagatattgtcaggtaagtatttactgttgtttctgagttcaagttttaaatatctagagttctgttacctacattacttgggaaatacatctgaagtccatgagggccaaagttttggagacattccaaatgagctggtacatctttagtgagcatcattaacctttcaggttgtaaggaatatagataaacttactgatcatattgttattctttaattgtgaagtataggataaatattaatttaaattaaccatatagtctaaaatgatcattaaatcattattgatcagatattaaaagtagcatgactattttaagattaagattatgatgttaaggttcatttaaaaaaattcaagaacatttaactattttagaagcaaatgcagaaactaagaggactcttttgtactcatagagatgggagaaaactgaaaaggatatgaaacagaaacttccgaatcagtgacaagaatgaaagctttagatgataagattgtaacaatcaggtgtttaagcagcctttagtaatgtcgtatttattgtacttgctgataaatcaagaacaattgttgacattcagcaagtaaatactgtgtggcatgatgtgtctcattgtgatcgctttctttaaacaagttgtagccaggcctatacaatgtggtagccaaaatgctttgactactacattgaggaagttttctgaccctgttttctaaaaaaacttgatcctaaagtatttgtattaatgatagtacacatattaactaatctcactgaaatgaacctcagtcagttttagagcagattctaggctagcagttctcacagcatggccagaggatcccaggggatccccactgggggcctatgagattaaaactactttcctaataatactaaagtgttacttgccgttt

SEQ ID NO: 126879 - DNA, 1019 bp, Homo sapiens
ttaaagatcttgttttacaaataagccagctgaggccaagagaagctatgagatttgaccaacaatcaaaactaaatttcccaactctggagtttgtattctctcctccattttatgctgtttctcatttatcttttaaaaattctgttagctggaagaagcttcacaccagggataataggtgacaagctctaaggcaagattcgtaagagacctgggaagcctcaaaactgagattattttccccacaacctgtcctgtttgatacagtagagatagactccttcatatctttaagatttttccatttttaatggcctctttaaaaaaggtaaatatgcctggaggaatctctcctaaactcatgctgagttaaaattttatctcagattagctgatcaaattggtttctaaccacgagagctgagaacaacaccctaggtgaggagggggcatcatgggccaggggtaggaagttggtgtaacagggtcctagaactttgcctaaccaagtgtaaccaggaaaagctcaaactttgttttttttttaagctcagcatattttaaatgaaattaattctgagcagatagatggaatcattgatactgtatgacagaagttagagccaggtggcaacaacttggatttgccaacgcacatctatgttgaaagcttaaatttccctcaaagagttaataaactaataagctaattttatctgatattgcctttcacttagtatgatagctggttatacttggaataattttcttttattttgtattcctagtgagcttcctatgtttgctcaagtttgtaagctgtattcttattaaattatcattacgttggtaaatgtgattagttgctttttgttttcacttttaaaacttgcattctaatgtaattcttctcctttggggatagtattgttttcatttttattaatgacattcaatttctgtcaatggatatcaaataaaatacaactttgtcggctttgagaaaaagtactttc

SEQ ID NO: 126880 - DNA, 1029 bp, Homo sapiens
tatagcttttaccaaataataggaacattttggcttaactgaagaaatggtttgcaacagtgaagttagatgtgggcaaaatcttttctagaacaatctgataaggccagaaaaccaagtttttaaatcgcttttagagagaagataataccagcatatcgttatggcagcacatagtagaaaaacaataaatacatactgattgtattaatagaacagcccccaaaattgtaaaatgatatgaagcaaatactgactgtgacctgtggaccatataggacacaaaatttaaatttgaaaacaatcaatgtaagttagtcaggggatgtcttcatgaataactgacactgagatgactcaaagtggcacagaatccattcatattcctgcttttgtttagaatttcctattcaatttctggaaatacctaattcattctttataactcaagactagcccatattgtatctttccattgtaactttgctgaaccttctcacacaattacttccccctcactactcatacaacaaatagttttgagtgtcgactatgtgccacatagtattctaggcactgaggatacagcagtgaatccatttgactaaggttcctgtcagcatgaaaattacagatttttttttttaatagggggcaggtaagagaggagccagaagaataaacaatagcagcaacattgtgtgtgtgtgtgtgcacgtgtgtggccatatatataagtatcatggagaaagataaggttaagagggataggaggtggctaggagcctaggaacagtttcttttatataattgtcagggaagatttttctaatacaacatttgaccagagacttgaaggtaatgagggagggaaccatgaagatatctgggggaagagcaatcttaggcagagcaatcttagtacagagtccctgagccagtagcattcttggtatgctcaaagaatagcaaggcagtcagtgtgatcaagagtagagcagttgaggttgatggtaggactttacctca

SEQ ID NO: 126881 - DNA, 1129 bp, Homo sapiens
aagatgaaagctatatgaggtggtaaaccagacttgttttttaaaaaagaaaaaaaaaataagcagtctacttaatgtttaatcaagatataccacagataaactaaacgaataaaagatatacataattaagattttactctataatattgcctaagttacagggaatcattctacttcactgtaaaatgaatgattttttccacttgtaggcaaggggcatatatgggagtttgtatgtgggaggagttagtttggagtgatgcctgtgaacataacctgcttgcactcaaatcctcctcttctcctccttctgtgttcctttttatgttgaatggcttcctgttcacccacttactaaaacagaaacttgcacaccctccttccgttttcatctccctcacacctcccatccaggcagtcacccaattctttcagtcttacctcgaaaagtaagcctgtttctttctgtccttattgctactttccttgtgcaagacttcatgttctgccttaaagtgttgtagaagccttttcattggccagcctgcctgccttgacttgcctccttcagtcagaaacatatttataaaatatgatttgctcatgtctacctcttacataaaactcttaagtggttctcaattgctcttagtactaatactgaagttattatcgtggcttataaggtcttttgcagtctcacacatgtttaccacaacagcctcatctgtccttaggtacttttcccttatataatctttatctaggggtcttctaaggccctctctccttgtttgtttctctcagtggattgtggggttcatgaatttaggaatcataccaatctagctcactgctatagttcttgtacctagtgcaatgtataatacgtcaggtatgcagtacaattgtgctgaatgaatgaaagctgcagtgcacataagctatatggaagcccttcctcttcctaattgcaaattttcttacaataatttaggatgttcgttattttctaactcccaacaagcttgaacaagttctgaaaaaataagatacagtgaaccctctcagctttcatttcctcatcggcaagttaggggctaaagcctttactaataaatctgta

SEQ ID NO: 126882 - DNA, 1052 bp, Homo sapiens
gaagtggctgaaattatagctggtatggaaaatgatgagcaatacattgaaatacccaaataccttgttttctaactataacagtcatttcattttcttctaacttggtaggcttactatttttagattcatgacaaaaaagccagaagacatttgaccatcactaatggactgtagacattgatagggtaatttaggtagtctggatgacttcagtgaaaacctttggatcttaggttaaaacaaatctttgaaagttgattcctctctggtcagagccacctgatgcaaagaaatagctacctgtatctcttcagtggcttactaatagtttgatctaaatatgtcacttgacctttttatgtttccattttttcacctccaatatggagagagtacttccctagagggcccaaccacccacaagagcactttgaaaagtgtgaagatattgccggctctcatctctgttgctcccagtgagctgaaaccagatccttccctgatgtaattctctgtttgaccatccttgaactatgtcccatgaaagctgttaaactctgtgttgtacctaggttatgcagtggtttatggaaattggatcaatgtccatgacttttaaatctattgagaactcaagcaataagtgactattttatcatgacagctgatttataactacttagaagaatcatatttgttcccattagtcatgtctggatagtttctgcaatatttttaaagcagtattcttttagaaggctaatagatattttatgtaagtataattttaattgatgcactatatattctaatccattagatgtatttctgattttcttaaaagggaggttcagagtccagtgacatttgaagaaaatcttattttgcagcttagttttcacagtcttgctcataagatttcttccttatgtcaaatccaatcattttatatgcagatgtatgtcatttattcttttaaaatacataaccttttctttagcaacatagtgtgatattaagagaaaagaaagaatgcaaggaaaaccatg

SEQ ID NO: 126883 - DNA, 1108 bp, Homo sapiens
gttattcttctcccatcacacctaccacctggcaactactgatgtgctttatgtcactatagtttattctcagtgatctattttattttatagctgagcaatgttccataatatggatattaccactatttatttatctgttaatctgttgatgggcctttgggttatttatagtttggggctattgtaaataacactgctatgaatattaactacaagtttttgtattgatatgttttcatgtctcatgcataaatatcagaatgtcatatagttggaattacatagtatgtagcttcctcagattgccatatttcactaagcaatatacattaatggttcttccatgatttttcatgacttaatagcttacttctttttattgctgagtaatattctgttgtatggatgtatcacagtttgtttactattgaaggatatcttagttgtttacaagttttggcaattatgaataaagctgctataaacagtcctgtgagggctgttgtatggacataaatttttaacttatttgaataaataacaaggagcacaattgatggatcatatgatgagagtctatttagttttgttagaaactgccaaaccctctttcaaagtggctgtgccactttgcattcccaccagcaatgagtgagagttcctattgttccacatctttgtcagcatttgctgtagtcagtgttttgggttttagtcacggttgaatgtgtaatagtatctaattgttttaattagcaattatcaaatgacatatgatattgaacatttcatatacttgtcatatgtattcattttagatagggcatccatatcttttgcccattcttatttttatttatctatttacttattttaatttatttattatttgagatggagtttcgctctgtcacccaggctggagtgcagtggcacgatctcagctcactgcagcctctgcctcccaggttcaagtgattctcatgactcagcctcctgagtagcagggattataggcacatgccaccatgcccagctaatttttgtatttgtggtagagatggcgtttcaccatgttggctaggctagtctcgaactccggacc

SEQ ID NO: 126884 - DNA, 1052 bp, Homo sapiens
tctcctcttaagttaggatatgctgctgtacctactattgattatgagaaaatattttaacttcaaattaaggttcttcattgtaacatttgctagttatggtgcggtcaatatttcactataatagtatctatcaatcacacactggcctatgggacagagtttttctgtgatggatagattatttagacacagataggatgagaactttaagatatccccgcaacttttttacctcttaacaaaatacagtacatttaaaactgtcatctacaaacagatatgtgaactttaccatctcttcatcttacttttgctattttctgcacatagtttctcccttttcattatgccttttattagaagcaattgtacataattaattactgtaaattgttctagtaaagtttgctttatgttcagtgttaacaaggccaatatctattatgcaaatctcagtatgtaagataagctagaaagtaaatgcttgaataataactaccttctttgaagcaaagacaactgaatttatttatattgtgaatgtcatttcacagttaccttgctgggcaataaaagaccctgaaattaaaatgaccccttttcacaaaatatagctggatgattcatttactacaaagaagcttggcttgagagtactccttctgaaatataaaatgatatcctactaatgcatctgaagtgtgctttaaacctatccaaggagactcatgaaattaatgactgcattacatgttgtgattctcttatattatgtttacttttccactgtttctcctctgattttatatcttatcggttgcattcccagtctttggaaacctccacttgagaaattgtatatgtttacagctgccttgaaaacctttagacctctacaaatttgaaaatataaatcttaagattaatgttccatactatgtatatgttagtttggtttaagaatcttagcattttaagtattgaagcacctgccaccttgttgaagaaaatcagttatagcacaacagtgtaatgatgacaaaatgtta

SEQ ID NO: 126885 - DNA, 1039 bp, Homo sapiens
agttaaactgcctggttaggggatgagaaaagacattcccagcagaggtaacgatgtgtttccagcatagagacaggaaacagcaaaagtgtaagcaaatgattccctgccacttagtagctgaggagctatatgaaagtagcaaaggagatatatgatcttgctttagcaagatctgctttagctttagcttccatgggccctggtttttatttttatttttaatataatgcctatctgataagtgcttggaggattagcttgtgttagatgtacgctcttggcccaatgcccgagtactcagtcattgctccgtgaatgaaagtagtgaatgtagagtccccaacaccaggcttggcaagtggtaaacacctcgaaatgtaaattattgttatcatttcatcccttgttccctttctttggtatatatggacataatttcattattaagataaaatagaccttgaatgatattcatcttttatgtagctcattcttgactaatagtttagctggtatagagttctaattccctcatattttgaacatagtatttaatagtcttctgtaatctgttgctaatgagaaaagcttttctttttatcttcatttattatagactccctatcatgtttctacaggtggatttattttttgttttccttcttgactttcagtgtatacttttctatatatctttattcagttctggaaacttctttttcattatttctcctaattttgtttccctttctctcttttgtgtgacacctactggatatatgttggagcttctcaatatctccctcatgtcctttaactgctcctttatttttttaattgcattatctttctgggatgcattgtgtgcctcttaatgctctttgaaaatttctacttctttcttttactgtggtaagtctacagtttatttaatctattggttctttttaaaattttaatgactatacatattttattcttgtgtttctaattgtttcttcttcatttgtacttggtattttttaatttgtttgaa

SEQ ID NO: 126886 - DNA, 1143 bp, Homo sapiens
ggttaggcctattcctcataatatgaaaggatatatttattagatttgagagtactagtgtcactgataggtgtgatttcactggcagttttaacataggttcccatttattcagttgcatttaatatgtaagctgctttctatgaatggtaaatattgttaaaccttctgtacaataaatgcccatggcatattaaccaagggataatttttatttgtcatgttattttaaaaaattcttacatatctgttctgtaagatttacaaaagagttttttttttttggtgttagactataattaataagaattacaatagaaaaagactattgttttaaaaaccaacttagtatcgtcttcttttctctgagatgattaactcaaagcagtctgagtccctttcatattctggaggaatggaggaggcagatggctggtgcctaccttatggaaggcatcagcctgcactatgggtgaatgcaccatgccaatgaatcaaatgtgggaagcaggctctaaaaaatgcagagaaggagagagtatgattcgtgagagcatcttaaaattagttattatcggtggcaaccaaagtgtcgtgtcctttatgaactcaaaaaagaattttattaacaatttgaaaaaatcatatctgtgagtaaaaatgaaagtttccaaggtaattacatctagaagtgaaatccaacttaatatgttaaactcttaagtaaatttggggtacttgtatacagttgacccttgagcaacacagggctgaactgcatttatatgtggattttcctctgtctctgccacccctgagacagcaagaccaagccctcctcttcctcctcctcagcctactcaaggtgaagatgattgaggatgaagacctttatgattaattgcttccacttaatggatagtaaatatattttcttttccttatgattttcttaacattttcttttctccagcttacattattctaagaatacagtatataatacatgcacaaaatatgtgttaattgactgcctatttatcagtaaggcttcaggtcaacagtaggctgttggtagttaaattttagagggagtcaaaagttatacatggatttctgatagtgcagagtcagcaactctaa

SEQ ID NO: 126887 - DNA, 1048 bp, Homo sapiens
taaatgagtgactatttcacatagtctttctgaattgtcagtaataggcttgggtaaaaaggtcatacccatcttgatagcaaatgaatatttattttttaaaaatttgcttttttggcttctttgggtttattacactgctgcttacaaaaataaatcagtgaagacttggcacattgcacactctgttttctagacactgaaagaaatgctggcaacatttccattagcttactaactaatgagacagcattggctactttcatgggacttggattctggcaagaagagttctttttttttcttttttttttttcacaattaggcatataatttttaagttattaccatatgctgtaaagtcaaagatatatttatatattcataccctgaatgaaaaggcagtaccttcttatggcatgtagagtgccatatttttagacacttgaagtcaccatcatgagaaggcaaggatattaagtttacccttggggagaatttactttgtggtctcctgttaaaattttgagcagtagcttattgcctatcccatttggtcagcagaatatgtaaatgacaaatactcatgctaaaatatataaaattaagtgagcatttgagtgccttatatgttttagccactattttagtccctgggagaagagaggtgataataacatagacccctcccctcatgaagtgttagtctagcaggggagataggtctgtaataattaaatattttagagaactacaggcttttgtcacttgctatagaggggaaaatgcttacttttccctagaacaatcagaaaaggtttatgttttccactatcctatatgtggatagagaagttaaaatcttttaaacaatacacttaatttcattttagtttatggtcctattttacatggcaaaggtactgcctacttatctaccattgacaagatgcgagaaggctgggcgtggtggctcatgcctgtaatccctgtgctttgagaggccgaggcaggcggatcacaaggtcaggagtttgagaccagcctg

SEQ ID NO: 126888 - DNA, 1563 bp, Homo sapiens
agatgcctaccacctcgcccggctgattttttgtatttttagtagagatgggatttcactgtgttaatcagggtggtctcaatctcctgacctcgtgatccgcctgcctcggcctcccaaagtgctgggattatggtgtgagccactgcacccagcctagactggttttatctgaaagttttcagcttttatttgtcttttgtcatgctgacttttttttttttgagttttgtggaatgtcttttatttttgggtttttctgatatttcctcatgcatggattgaggttacacattttgagagtaatgcagtttacactgcattaagttcatcatatcaaaaggcacaagataccagtttgccccagattcggtgacatcaactgtgatctctttagcaaacatagtatctgccaggtttctccactgtagggtgaactttttctggtattaagtattttgtatacatattatattcctcatcaacttttatgaaatagttttgcagtcaccaatgattcttgcctgaatcaagtactattatgatgttgtaaaatgattgtttctaactctgtcattccttttgtatttactagttggaattccattccgttgtaaggaagagctttctcttctcccttcttgtttagtgccagtaaggactaatggattttttttcccaacaatgagttgtaagctattagtatcattatttattgtgattcttaaattgccctatatttggctggtgggtaatatttccttttaacattttcactcatttgtcatgacccctcatttttttagtggatggtatcatcagcagtcttgggaactttatgaaaatttgtattaacttaaaaaaaattgaagtgaaattcacataacataaaagtaatcatttataaatgtacaatgtataaatttgctggcatttaatgcattgacagtgttgtacaaccaccacctatatcaagttacaaagtgttttcaccacaccaaaaaaaaactgtacccattaagcagttatttcctgttctccctttccccttgctcttggcaactacccatctgctttttgtctctgtgaatttacctattctagaaatttcatatagttggaattatatgtgacccattatgtctggattctttcacttagtataatgtttttgagatacatccacattgtagcatgaatcagtacttcttcttatggctgaataatattgtattatgtatatataacattttgtttctccatttatccatcgacagatatttgtttctttttttcatgttctgactattataaatagtgcggctatgaacattcatgtgcatgtatttgcttgagtacgtatttttagtttcagggtatacgtacctaggaatggaattactggcttatatggtaatcctatgtttacctttttgaagcatcatcaaactgttttccaaattggctgcaccagtttacattcccaccagctatgtatgagggttacatttcttctccactttcttaccagtagtctttattttttgtttttgtatgtgtggg

SEQ ID NO: 126889 - DNA, 1021 bp, Homo sapiens
ttgatcgtagccaaaagtactgcaaaactatccttattgctaaaaccaaatacgtgattgcaatcttggccaaaaccagaaatgaaaggaaaaacaggtattggaatgtggaagttaaaaaggcatttgaagaaaaattgagactctgtcacccttttctattgtgatcaagccccattaggaagaacattagaattttggtttccagctgtgtctgtgtagatgaaaactctgtgagccaacttcccttttccaaagtgatctaaatattgttcagagaattctagttagttggcagagaaacaagtatttaggcagaaatatgtccaaaaatgagaagactaaagatatgcatcatgtgcccatgtattttacataggaccaagattaactgggttttgctccgaaccttaagaaagaaggctttttcagcattgctagaaataaatcttgctttaaaagtttattgcaagtgtggtgtttatgaaaagcaaattagtattctataaattctctcaaacacaaagtgataatcagctaaatgacagtcgatgagtcatcattgtaggtggaaagatgacagtcaggtcaggaagtgaataaactaggtttcttatttttgctctgacttcaatttaacgtattagtttgggtaggtcatttaacctgtctggaccttatttatttgtaaaatgagggtataaacctggttgtctctggtgtcccttccagctttgatgttttgtgagcatgtagttcaatagtcaaaattactgggtaacaaagcagagtccagcaagtgttatctatgcagaagtgatttccatttgaatggtcagatattagagcttggacattgtcctgggttctgtggacagaccaagggatagagaggaacagaagactgaccaataacacatgcatacttatatgcaacaatttatcccaaatacaacatttctcaaatttccctacaacaaagacaaaggttaataattaaagaacattagtgtacagacca

SEQ ID NO: 126890 - DNA, 1441 bp, Homo sapiens
atgggcagccattagacaattttaagtagggtggagatattagtacacttaaaatttgtactcactgtttcaaaactcactaggctgctacatggagaattggttagaggcaggtaggagttaaggggagcaacagatgctgaatactggacttccctgatagctgaagagatgttgagagatgacagtattccagagatattttaaacccagacctataaagactgttaatggattgtgtataagggatatgacaaaagaggatttaagtcagacttctacatcatagtagacagtggtgctgctatgtggataatggtgctataaagtgagaggcgggattccgagagaagagcaagttgccctcatccccaaacagaattctgtctttctcatgtaatgtaagggtaatgttttaaaatgcttaaaatgcttttatctgttgcttaaccatgtaaaacaaaaaaaccaaccaaacaaaaaactttgccctcatcagccctagtcatttatttccctgaagggagattcagatttgtaacaagaaattccaagaagtagtcagtataagatgcagctttgttttgcaaaaatataactatgcaaccagcagaagaaacaactaatacaaaggccttaggttgtgaatttctgcaccaaatacagcaagccagcctttcatcttgagataagattttcctgattccacctgagcctgagactcagctcatgcaatttttccctagttggaggagagacctcattcactattgaggtctagctagagtcagaaagaagaaaaataaaatatagtagaaggaaagtaaaagccttttattttgccctgaggatttttagggagaaaagagaggagagagatgagagtaaggtagttagagaggtgtattctgacgtacccttgtggctttagcttggagatgggtaggtgcattaagtaaacaataacatcattgcccccatctctggtaaaatatcacctctttgttctcccatcacttttatactgtgccacagcaaattgaccacactattatgtggacagagggattccctatgatttagcttttctgaaccacagatgctgggttgagagacagaaggctaatggacaaagggtcccaacagcagaggctgggctgattcctgagctacagactgaatggaagacaaatgagtcattcaggaggttgctgccagtggaggctgaggtgaggctgattcagctacaaagaactatcaggctctcagcaaaccaatggggccaaaaaacaaaaaatccccacattaaggcaatcaaccatccaaacctccacaaaaatgttaccaaccatagatcacagctttcaatgtcagcagtgcaagtagtactcaggggcacattgaatagatatcagatcttcagtgcttctcagacttatga

SEQ ID NO: 126891 - DNA, 1376 bp, Homo sapiens
aggaacaagaataggacaggcttaggtttttaaggtaaggaaatgtaaaatacaatcaaacaaaagagcaacacgtgtcatttttttttttttttttttggcaaaatcgcttatctttctttccattccatagacatgatgcagaaaatgagcaaattaaccctcgccattaagagcacttcttacatctttaaccttttataaagggtacatttgattagaaatgcaatgaatattcagtgctttggtcagtttagactttgggggtgctccccagctgtataatgctcactgagagcctatgtgtgaaccacaagcctgggagaagcctggctgtctgaaggggctgtgctgaaggctttcacatagttcccattactaaggaaaccactcgttttgtctgaacactctctgaatagatgtctcatttgaagtctagtgctcaaaccatgaggattgcattatggagctgagaaagaaatgaggagaacaaaaaatgcttgaaaatgccaacaagcattcacaaagcgttgtactgtaataacattccatgagacagaaggtgcgtttatttttgccgcattccaagttattttggtgttataaaagcaaattcctttgcttgcccacgtaatcaaaataagaaaagcagatgttcttctgacctattcttaattcctgctcttgttagggtctcactgagaagtgtgacatatagaaaaagcaggacaaaatatggattctcatattaatgtagatttgctccgttgtactttataactaaatggtgtagtgctatccctgtgccaataaacaaacacatgttcagagtcagacctcaggatttgtagcctccaaatggttactgttaaattcagaatggctactgcaaactggtgcttggtgctcattaatgagcatccaactcagatttggagtgagaaaacactgcttctaggagactcctgctccactctccagcttctgccaacctacagcaaagaaagcagctcctacttaaaatatcaggcaatcattctttcttcctcactctggaaagtagggtttgcgggactttcattacagtatattctttatcatccctctccctgtttttgatatggtcaatgacgttattttaaaagtatacaatttgctatgcagacacctagtcagaggttgccacctctacacccatatagaaagtcacaggaggaagtcattcttacctctgtgttgagctactttaatcctttcagcaaacgagagatgtatcaacacagttaatccacaaatgcagaaattaataaatatgtatagattacttgttgttttactttttgctgactgtcatagcagttagtgtcttgcctgca

SEQ ID NO: 126892 - DNA, 1673 bp, Homo sapiens
aagtgggagatcagagtgctcttcctgcaattgtccttttaatgtaggtacatgataaatttaaaatattttatactcatttttataaatttaatatcatggagcactagaaatgagattttaatgtgaaagagaaaatgactctggctttggatgaaaaggatggcgattctgttctttgactggaatttctatcttgttccaagagcatcagcagctttatggaatcagtgtgtgttttgggtgttttttcacttatcagggcgttcagtccttaactgtaaatatgaaatgtggctctctccaaagatacatgaaaaaattattttggtatcacatctatataatgaagtaccatatgaagacgttacattgtaatacagtaaggattttagggtttttgaattaatacaattgtgagtgatcatcaaatgagaaccatggaatcttagcacacagttggcacattaaagccaggatagagcccctcaggtattccaggttttttccaccatattaccctatcatctactggatgattgacaggtctctgctaattcttcttttccttcttctccttcttttcttccttcttcttactctccctccttctctcccttcatttttttttaagtttcttcctttagaaggcactaaagcttcagagaaatttcacattgtaaaccacagtattacatggttgtacatgttacctacattgtaggaaatgtctacagggtttcctagatgaatactgagttttaatggaaatgtattgaaatggttttaaaatgtaaatgaataattacaacccttaaattatactgaaagagttttgccttcatcatcaaataagaaaatattgggtacagtagatattcactgacttagtggttgggatttttaacttgtttattgctatttcatcaaatcctgggctttattcgcctgtgtgcttttcttagaaaagtagcctggacagtcggtagaatgtgggttttagagccacaatgtctgggtttgaatccttaccttgccacttcctagagactctgagcatcatgttaagtatcatctctgttaagtatcatcgtgcatcttggtttaaaagtattatctctgcatgtcatttttctcctagaattgttatgaacattaaaacagttaatatgtataccgggtttagaaaagtgctgaaatatagtagtcttgaacaaatgtttgacattattactggcattattatggtagtggtcattgttatcatggtcattgttttcctcctttaacaagatataatctctcatttgacccacaatagcactctttatcgctcttattacttaccatttttttggtattataattgtttctgtaattttacctgtttccccttttagcatataagattctcctagagggagtatatgtcttgttaagtttttaagctccacaatgcatataaaatggataaaataacatctgtcgagcactaacatatatttgtatattttatatatattaacttcaaaaatattctattcaaattgggattgatatataaattatacctattccagttgaattatagctattctagtgtttcgttgtttttttttttttttctttttttaagatggagtcttgctctgttgcccaagctggagtgcagt

SEQ ID NO: 126893 - DNA, 1913 bp, Homo sapiens
taaaatataaaggaaggcaggaggctgcagccgggattccttctttttcctggaactctttttctcagtcggcaggctgaggctctcaatccagtgaagagagatcctgtgagctggctttatttttccttgtttccatggtggttagtggtgcatcgttcacccgatcagttgtcacactgacatggtgctgcctgctcagcggtcattaataactgaacaccctccactccccagagaggagccaatcgcttcagacagccaagatgtagcactcgcagctgctccagtctggttggctgaaacaaactgtctgttctatgacactgctgcttaggatacaaataaatgaaacaggcttgcatgttttcctaggtatcattttccttcttttttttcctttctgagggaatgttgggaatttttgacaagttttctcaattttaggttatcagtcattcagagaaatatgttttcagtctgcaaatagagaggacacactactgataaggatttcctaaatattaaaaacacctggtagagactcaaacctccaactccgtctctgaagttcagcaatgactgcattatttaagaagagaagcttgcaactgttttgagtggcatttggttctctatagatcctacttaatttagcatatgtgcttggtgttcaataacacttttttttttttttttttagcaatgacatttcttgtctggattgaccagatttttaaaataaagcatatatttgcctctctgtaattcacaacattggcatttgagggggtactttttaaaaatatgtatttctaattatactcactgacttctctttatatgatgtaataaatctaggagctacatatgaatgggtacatgtgtaggtgtgtttgtgtatctgtgagtgtgtgtgtgtatttaggatgtattttttaccactctggggaaatatttcgattgtaataagttaaattatttaaaagactatctttattcttaggcctattaactctgaaaggatatttcccaggaaaatatactatataagccatacatgtaaaacatttttattaattaccagaaatttggaaaacacagaaacacatagcagtgcatatttctgaaagaacatacatgaaaaatcaaaaagcagttttaaaaatgcatgttttacaaccttaattagtatactagagaaacatcttgttgaggagaatggaacatgaggattaatatatcaacaggtcaaaagcaggctagtcatgactccaaccccagttttgagagactaccctctagtggagtaaagagaaatggcacttattagatttacttaggaaaaaaaaaacaaaaccttcacatctaattgctccttaagtgcttattgacatgacatagaacaatagtttgcagttattataataataataataccaggaaaaattttaaacagtaggcttgtctttaaatactgaatattttcactctgtagttttctagaaacagttcccaaatgtttttttctataagaatttattcaaatgaatcaaaataagttcaagataaaagtagcatctcatttaacctaatacttatttcagaatattattgtaaggttttattatttactggatactctagtatttactcagaaagcactgagtcagttctgtatgttagggatcatggttgagtgttgggatgttgtgttagagtatatttacatataatttaatgtacttttaataatagtaataatcatccttcttaccccttaattttaatctagcaaatcttagtttctttaatattccaaattatttcagtatctgcaggatttatttccacatatggaagaataatcttaaaattgtgataattatttgtaaaaagagaatttttattta

SEQ ID NO: 126894 - DNA, 1029 bp, Homo sapiens
ggcgaaagcaaaagatgttacaaaaaaggaaagaacaaagaaacagtgaaatatagttagtgcatcataagttgatcaccttttttgtaggtcactaaattgctggcctggaaggctggtagcaccgtttattaagccattaacaacaacaaccaccacctccaaataaaaaattccacctactcatcagcattctaactcagcatgttgcctgtgacaagcgacaccctgaaaaaaatggtcctttgaattgtcttgccaggaaggtgctatttctggtatagttacatgatttggggagactatgggtaaatcttccagtcatacacaaatgtccatcatctggcattcgtaggtgctgatcaaatcaccaaactcactggcacacactgagtggcaacaccgggggcctggagtgttggtatttctcagactgaagtgggcacattactgatctctgtaatccacaaaatatgtatgtgagctttactaaggttaaagagtgaatccactgttcttaggtgtcatctattgcaattttaaaataaggcgggttagatttaagaatgtgtgtctggcatgcaaactttccctggaaaaggtctaagaaaaactgaattaaatactgcaatgctacattatataggagtttgaaatcagagggttgagtatctacttcaagtcttttcctcttggttaggaacttaggaggtacctcaaaatatcagatctggtctgtttcaaaagcagcacttttaataaatagcagaaaagcaaataaaacactttttcctttttgtaataaatcattttggttttttttatagattgcatgtggcatttgaggcagagcgagcaaagctgccaatattgcaagctgatgcttcagcacctttcatttttctctgagcaggaaccctcttcttaaacttgttcatcttacagagagaaaatcgaagccactggcatattgtcagagctgctttattgtcatcatttacaaaggtcactggaattaattgacttctt

SEQ ID NO: 126895 - DNA, 1081 bp, Homo sapiens
ttgttgaaaaattgctctgtaaatggtagagctttaaacaaatattcacaattattgtgtttatattttgtatccttcttacaagttgagtcaattaattactattatgttaagcaaaatttggagagcacatttaaaaacagagaaatttgcccaaaagaaaagaataggattgtgatattaaggagatatcattgcctactggagctctcagtctgactctagaaatcaaaaagtaagttgggatggggtaggggagggagagagggagagggattgctgtcctgataatatatttattgttttccagtgagatgtataagcaaagcatggatcctgagagtggacactgtatataaaaaaagggcacatgttaagtgccttaaattatttacagtgaaaccaagtaaaaacagatgtggaaagcctcttcagaattcttggaaaaccttaaaacttatagtggatgatcaatagctgagtctctgtaggtgaaggatagcagtattattattaacatgttttaaaaacagggcaaaactctaatttttatgactttacagaatatggtaaactatattcaaatgatgaattatgggtttgaaatatttgggtgttatatacttaataaatcgttgcttctattattgaatattggcttttccttttagaatatttgattatctgaataaatatttctcttttttgtacatatctgtgaatttggggggattttttgcacataggaggtttttgagaaaacattatttttgaaagaccaaggaggcagaattttaatggaattctggaggaagtattgtaaggggttctaacctaggcctctccaataaatagctgggtgaatacaaagtataatgtattacattataacgatttcaaaccctttcagcctcagtgtttttcacctatcaaatgaacatattagactagctactaatgtctctttcagttcaaaaattttattctatgaaagcatgtctcccctctttattccccgtctcctgaagctgtgtcatgtgtttttattaatggcaccatagaaaattcttcccttattatg

SEQ ID NO: 126896 - DNA, 1050 bp, Homo sapiens
tagttatggcaagttacttttcttctctaagccttatttttcacgttggtaaaatgggttaaacatagcgcttacttagtacggtcgttatgaagattaaatgagaaaatgtatgttaagtgcttagcataatgtttggcacagaaaatgcttgtatgttgtaaatgagatctgccagtattattaccattcctttagccagtaaaggattgtctaagagagatgatgtggtttgaacgtataagggctctgcttacattaatttatgtcagaacatttgttttaattcatcattactttgattattttgcccaacagcagcatattatggtataatttatagcctaaatataaaaatgagactttgatatttacataaattttgcttcctcattaaaaagtaattgattgaggaaatggtttggaaaatgcctcactgattttaaaaagttagctgaacatcaccttatgaaactctttcaacaactgtggtgtttgtgtaaaaaatacgtgagtaataaatgacaataagaggaacaaatataaactatgtgtttggtaagtgagtcagttcagctagtcacacaacaaattgacttggatgatgtttatatcttataatggcattttatatatttttcattcaagaatgactgtgaatagagctttcaaagtttatatgttcttagagtatgtttatctttcatatatggcagtcaccttgttttgctctttccattctgttctgttgcactttcttttcaatgctacagcattgtgacctagacacaattctcttttcgcttgctctatcttttttgttctcaatgccttgggcacctgcagtttaaggtcattaaccccttggcctttgtagaaatcaaaatataatctgtgtagatatatattgaaattatttcctgcaactattgaaatttcagtaaaggtcattgtggttccatgtattctacagatgttgaatactttttgtagaacatgttcagtgtttggtatttctgagtgactgagttttgataaaaatagaattaa

SEQ ID NO: 126897 - DNA, 1062 bp, Homo sapiens
gaataaggttaaaacattgttctacttgttcaatttgcaagatatttatggtcaataaaactttccttatttcattactgatttccattccctaagaaatgataaagatcttagatgttcataaatcctcctggaattcaaccatgatatttttacatacattacacttctaaaattacaaaaacaaaaaaaccttaatccagttcagccagagcctaaatttttatcttttggctctatgcattttcaacagattaataagaatgtttaagtagaaaatccacaagtaatacttttagattagttgaattatattaagtgttcattatcattatattatttattaaataatattatactaatcaggttgtaccatgtggtaaaactgtaaagtttgatgcacttattgtatttattttaaatctgtatatgttataaatattttaatatatattttcattacatatattttattatatataaagtttaagcatattattatatatatatactcctgatcttggctgagaagtttaaaactgtagaaagagcctgttgttagatgcttctgcataaaaagtcaaatgcttctctaaggataaatatattatgcttattctaagaaatatgtgataaggcattgggtacagtgtacactgcttgggtgatgggtgcaccaaaatctcagaaatcacctctaaataatttattcatgtaaccagacaccatctgtttcccaaaaagctattgaaatttaaaaaaaagaaatacatgctaaggaagacaccataacatgggcttcagagtcagacattcagggttcaaatcaggacctttccaatgagtgaagttgggcaaatgcttctccatttcaagcctcagttccctcatggaatcaaagtgaaatgaggtgagttgtacaaagagcttacccagggtccgggctgtggagcatgttaaataaatgttgcccaacatcttcctcttctttctctttctcctcctcttcctcgtctttgttgtatgtaagaagtagcaggaaaaaaaccccaaaagtttaat

SEQ ID NO: 126898 - DNA, 1537 bp, Homo sapiens
attctttggatgcataatttcggagtttctgagttttatacatgatgttaactgaaataactagatgtcagattcatagaaggttgttgcaaaatgaaggttatttgacatctgttttgtaatttttcagcctattgacataagaattctttatttcatgaagaagaatcaaattaatttttaaagggcacttcaaaggttttgtggttattttatttgaaaacacatatttacagtctacagagttaagaatatatttttgtctcaatgagacctttagtaaggaaataggaaatagctctggactgggagcttctggaattctatggtcatgcctctctgctctttgcattctggcaagtagattcacattttagactcaaatcacttgtaacagccattatatttggaactccccatctcttctttttgtttttcttcctcttttgtgtgagagactgtccccttctctctgctttctttttctgtcttccccactgttctagaagccatgaccctctcgttctaaatagattttgccctgcttccaatgagatgcgaggctgggtatttctatgcatatttttaatttgataggaagtgtagcttacagcttattgtgaatacattaacatctcatcgcttgtgacaagtccttcacacttttcatccctgctattaattttccttttctccacatttaaaaatttttctttagcatttgctccccgaatcaaaaagactagatagggggattaatgatgagacttttctgttatttagcatgatttacaactattgctggcaaccatactaagtagtttcacatataatgtcccctcagccttttaaaaaattgatatcagcttcaatagaagtgatggtattagttactaaagtgacatcatatcaaaatatataaacatggagcattatcaacagaagtgagaacaatttctagaacaaaatgtagagtttggtaaatctaaagcagataacaaaagaaattgtttcattctctacaataaatttgaactgtggattacagaagtaaacatttacaggaaattgggacacagagggagtgggagaaggaaaatcatatgacttttgtctctcccctacctggagtttcatcatttccaactctgcaaaattggctcaagatgcgaatagtaaaggcaggtatgtgcatgcatgaatgaaggaaggtatcctccagcaaatttgcctttcaaaaaagttgcctgaatataggcccaaactcagagatatgaagagttgttatgctggggaagtgaaaatgaaaatgtaacttttcatttcacacacatattacaggagtaccacttttcagtgttcccattttgttccacatttaaccctaaaatttcttgaattgccaatacaaatgccttattttgctctctggtactctcaaaatggtgttcaatagaagcagcctagtcattaagggatcaggcatggactctcgttctttctgtgctgctgccatgtcattgtttcctcatctact

SEQ ID NO: 126899 - DNA, 1013 bp, Homo sapiens
taagccaatgtctactctcattatatctcgaataaatctgttgtgaggaaactaatggagatatgtatgttttgttcgtatatcttttttacttgagatatagttttcaattgatttttatatattatatctctagtaatagcacagtgtagtgggggtataatatatacagattagtttcttaaaatttgtgacatttgtatttggagaacatagaaaaccatgtaatttaggttaaaatgtattcttaatgattgaaagtgccacagactttcagaattaatgtaaaaagctgtatcaacaacaaaaagagcaataataaacattaatataattgagtgttaagtactgagaaaagtcctctagaaaattggtttgatgtggctgcaggccagaccatgcttgttgccagctgatagtgatcaaatggaatacatcaacaatctgtgaggtttttgtctccaaacccagactggggttaagaatctgcactagaaagtgacacttacagaagacactgtactttaggagaaaacaacaacaacaacaataaaaacaaaaacagtattgtaaagaaagccatatatactcggttaagaaaaagttgatgcaaatcaagacaatatctgctgtaagttgagactgggaaatatttttggtgcaaaatttcagcagaactctaaatctatgcagcacacatgaaactagtaaaatttacttaaaagtttaagctttgcatgctagagtctataatattatctgcagaattggaaatactacagcttgaccaagagctttgaaatgttgcaacagccaaatgttgcaaataaatctttgggagttcattattagccaacaaaattattactcactagatctgaaataacaaatctgtggccttgacatttaatcagagcatgaaacgcatctattgtatttcatatttgagattattactttactagtgccccaattaaagcatgtagattctaaaattctattcagataaagta

SEQ ID NO: 126900 - DNA, 1021 bp, Homo sapiens
tctgtgaacatcaaagattttttccaaaggtgtctaacaattgaatgtgtgtaaactcacttatctgattttaacctttgtgttttttaattgattacaagtttatattcaatactctagtcccatgccattaacaaatttaggatcagtgaattttagtcattatggggcttttaaagactatcaaattagttacctgccattatttctattttatctttttatctacacagtagtaaacaaactagagagttactttaatcattaaattaaggcagactaaccagtaggaagtaaattgcctcgattagagcacttcatctaaattcagatgtgaattcaaattccttcattttgcctctaaagctcagtcttaaccactaagttctactttctctcaaatgtttatttttaaaacagcaccacacaccttggtatcttctcagaaaggtgtttcctccaactgtataggtgcactgccttttttgttattattgttgggtgtttctcttcctttgataataaagtttcactcagatgaaattataaggcagttgagtattgtggaaggaataaaataaaaactgttttctaggcctagttttgctatgtgagagtaatcacatcgctctctgaatcttagtttctcacaaaatatgcactaaatttttactcttgttttcaagttgattgttaatgtcctgtgaaattgtagagattttgtgtgggattgccattataaagaaatttgtttattagagaaaaattatttttgttattgttcaaaatttatatagtaaaatgtatgtcatgtatacccatatatttaatggatgctgtcttttagagtggttttagagtggattctgatattttcagattctcaaatctgatattttgagattttcaaactggcaaaaatcctcttattatcattatagaaataactatagatttttttaaaaggaggggcaattttattttatgtccttgtcatgtttaagaacttttatttttaccc

SEQ ID NO: 126901 - DNA, 1052 bp, Homo sapiens
tgtcttcttttgagaattgtctgttcatatccatgtctaaaacaccaaaagcaatggcaacaaaagccaaaattgacaaatgggatctaattaaactaaagagcttctgcacagcaaaagaaactaccatcagagcgaacaggcaacctacagaatgggagaaaatttttgcaatctactcatctgacagacagctaatatccagaatctacaatgaactcaaacaaatttacaagaaaaaaacaaacaaccccatcaaaaagtgggcgaaggatatgtccttgataattcttggcctaggcattgggcaggctgagaaatttaatcgttaaaaggttaaacatttattattttaatgaatgtgtttccagaagttttctgttatttcaaatctttgcttgtttataccttgtaattttatttgttatattttcattagctttgaaatttagttatagggaaaaaaggaaaacaacttttaaatctttcaactgttcatggctttttttttttgcctgttagagaggcaacataaaaggccaataaatgaataatactgttcacttacaaccaaatgagttagattgcgattcaacaggttcccaggagacaggatttagagacaaaaattataaaatgttaagtaagctagatgtagtggtattagctgtttcccattttcattcatacttctctccatagtctcctttgcataaagtgacttgagttttgcagtattcagagaagattaagtttaacttgctgtagatgtacctgtgtgttatcattcgtaactaaagttcacaagattaacatttggctgttttatttttccctgagaataacttaccttccattactaacaatgaaaaaacaattttattacatcactgatatggtttggctgtgtccccgcccaaatctcatcttgaattgtagctccgataattcccatgtgttgtgggagggacctggtgggagataattaaatcatgggggcagtttcccccatgctcatggtagtgaaataagtctcaggagatctgatgttt

SEQ ID NO: 126902 - DNA, 2410 bp, Homo sapiens
gttgccacagtaccccttgaagccagttacttaaaatgctgaagttgtacatatttccattggtcaggagcagcattggtgaagcttaaacttctctctcgaaagtaatctttttttacttttttgtttgtttgtttgttttgttttgtttttagcacaactgcagtctttcgctttttttttttttgttcatttttggagtaggtttccttggtggtttttaggacatatttgttggtaaacctataacagttgcttttactttcagtgatgtacttttttcttttcctgcttcccagagatttatcagaggaggataaagctcacctaatgcaaaggttggtttctgtaagtaattcctcacatagctgtgtccaccatcacagttcatttctggagagaggcagctgataagacatatcacaccaataatccccagaaggcctccaagacaggccataagtgttgtggtattattcttttcatactctttttgatcagggtgcaaacctttggtggtgacatttacacatttttttctgtttttctgatagatggtgggaatatcaatacaaattttatactcagttgatggattcagatgagtaagattatataccttgacatcagatggtattcgagcactttgcgcagcatgagaattttcagtcttgacaaaggctgtccatttaacactagatttgagaattttagaacttgctttccaggacaccaaaactgaattggcctgaatatctcttattttaatattcaaagagccattgttatcttgtggaaaagatccatccactttgatcataacagacttcaagtcagcgccaactaggttagttgctatacaagtatataaacccccttctttgggagttacgccatttatatctagtgttccctcagaatggacatagaacttgtctgtcagggtattaggcaagagtttttgaccagaaggtgttatccagtagatttcaggctgtggttctgcagtagctctacagtgaaaggaaacatagctcccagcttctacatttagattagaaggaaagctctcaggagctataagagggagacaaatttccatcatgtccctgaaatgcacttgccgaacattctgaccttggaattcaggtgggtccacgcaaaacagtgaatctggctccatgaatcgaatgttggttttgttcatgttcatccaacggatgacacagtcacacctgatggggttactgtgtatgctgatttccttgaggtttggcagagactcaatggtaccatggtacagggcactgagagcattgctgttcagcatgagtgattccagcttggggagtctgaaaaatgcattggggtgaatgtaagacaatctagggttgttagtagcttctatttttcttaaatctggcaggttatccacagcaagactatcgatggaaatcagctcaggcatattatttatccccaactcttttaagtgtagcatattgctaaaatcaccccttcgtattctattaataggatttttatttagatccaaaaatttgagatttacaactttttgaagagcaacatggggtactttaataagcctgttatcgtaaaaagagatgctttctaagttttccagtccaaccaaggcgttatctggtatttctgtgaggtttataccagctataaccaggctgcgaagattgataagaggcttaaagttcatgtctttgattctgataattggattttccccaatcatcagaatctctagatttggaagagcatcaaaccacttactgttgatcatctgcaatctatttgaattgagatgaagtcgaagaagattatgtaggccaataaaggctccaggtgaaattgtagaaagcaagttgtgattaatatagagttcttgtaagttgctcagttcggacagacatttttcaggcagttcagtaagtttgttttcctctaggtacacagaaaggagctgaggcatcttttttacattaatattggtgactgaagataaattgttttgagataaatccaggccagtaaggtttactggaaagtctgtggagtattcaatttttgcaatattgttagtctgtaggagaagaatctgtgtgttagctggcaatctggctgggaaagttaaaagacctaaatcattacaatccactgtagatgcttccatataaatggatctgggtgtaaaccaaggcctgatttcacacgtacataaccgtggacaatccacttttttatctacagcttgtactagtgtagtgatagctaggccaagtagcacatgaattcggagtggcatgtccttcatcttagctttcttcttcagaaatgtaatgggcccttaaggattccacagtcagtgctagtaagt

SEQ ID NO: 126903 - DNA, 1028 bp, Homo sapiens
ttctctttgagtttgaaataggggtcacataacaggtatccatgttttatgcatagaaataatttatggtaactaaatatgcctcttttttttgagacggagtctcactctgttgccagcgtggcatgcagtggtgtgatcttggctcactgcaacctccgcctcccagattcaagcgattctcctgcctcaggcccccgagtagctgggactacaggcattcaccaccacacccagctaatttttgtatttttagtagagacggagtttcaccatgttggccaggatggtcttgatctcttgaccttgtgatccactcacctaagcctcccatagtgttgggattaccggcttgagccatcacactcagcctaaatatgcctcttaatttagccagtctaaagaatactattaggctagtttctgcagatatagtgaataaaatcaatattacatttgaagcaagcttttacatcaaaattgtgatgagtaaaacattttagaccaagaaaaaaaccttgtattttttctgagcattatcattttgtgaaagtatgaatgattaaggctgggactttaccaaattacacagttaacatgtatttgtgaaaacactgataaagaaaataaaccagaatataatctagtagaatataagttttagatggtcgaaaatttgtcctatttatttctctttttcctgtgactaatagccatacaataaatgtttattgaatataaacaaaagataattaaatgaataaactaaggaattgttttaaacttatgtttgtgtgtagttttacttaaaaactttttgtctaattagaataaaaactttaacactaaaataagtattaaatgactagtatatgtaccataaatctgtttcatttctttcttggtgaaatggttagcatatgtctgccaacctgttgctgcttagctttactgacaattatatacattataaaatacatattttgttttgcactgtttttatatatttttgtattcaattgggtatg

SEQ ID NO: 126904 - DNA, 1050 bp, Homo sapiens
acaatgacatctgactctctaagctgttggtgttgatgtggtgttctgagtttcccatgcctatagtgtcagtactcacaaggatgaaaatgttgaagagaagtttctgtcttctcaaacttcactttttatgcaggatgtaccttctaagattgagttattgtgcatgataagtgtaatcggagagttggcaagcaggttaaacataattgaccattctgtattttcctgtaatggactgagaaagagaagagctttatagattgggaatgtgaagtagatgcatggaaataattgcagaaaaattcttttaaaagtccctagccttccatctacttggaacttcatgtatattcctattttaaaggttttatttataagaatatgcataggttttcctttcttgataaactagtgttctttgtgtttggcaaataagtagtaactgcaatttgacaaataaagactctttatccccattttctgatgcgaaactgagataggaatattataaaagaacatactgatggggagagttagaagataataggaacaattaatgaatctaatgtactattgatggattgttccctctccaaaaaatcacctattagttattgttgtgagttatggcatgcttataaagttcctgttattatttctcttggtgttgagtcatttggttttttatttttttgctctatgttattatttttgttacagttaatatgcattcatattaactatatgaatatatagttcgtatgttttcttggggaaaaatacttaaatacttctctgagactgatatataaattggaatgttaatgctgaactcaaagaaatttcatgaggatcacataaattgggttgtaattatgtaatgtattatacacatttatatgtaatatatattacattatacatgtacagaaagagatgtgcaggcctgtctatcagcatgcctgtcatattgtaagatggcaaatgttcattttcccacacctcttctttagatctgaagtggatttcctaagagcacagcaaatt

SEQ ID NO: 126905 - DNA, 1214 bp, Homo sapiens
aaaataataatgtggcatcatgatggtaatgttgggatttcaagtcaagaactttggaagaggtttaatattaaaattattttctgaagccagagtatttaaagatcacagggttagcttttcccaatacagtaaaaatctttattgataaggcccatcacttctaagaaagacacagctctgtcacagtgctcactttggaggaatggaaagactcagtgggattgcagatttgtctgaaaatatttttattcagtttctccttccttatgaccaataattcatcaaggtaggttagcatggataataaattaaatcccaggcataatatgtatgagtatgtcttatatcttaaaaagtactttatagatatgtaatcagtagagtgttataatatcctcatatttgattttagtttcaaaatcaggggccattggtctcatagatattatggtgttttatatcttctggtttcagtaaagctaaaactggattcatttttttccagaatgagatgacagtttgtgccgaattacttacatgttctacctgatattctgagtattcacactgaaacaattggcctgagtagtatagcctagtattggggtagaatttccttatcaataaaatgaaaattactctgttaaatatatttagtaaatattttgtttaagaggctacctggcccttttctattattgataccatagtgaaatggaacggacacatctgctgtggtgagatggagtcctctccactaaattaggagctagcatcaggatattaaagaggtctttttagagtatattcaggtatgagtattttaaatgtcacaggaaggtggatgtgatgtgcttttatcctatttattttttgtttagaattttctctttggtttcaggcgaaaatctccgaaagtttttttcaaacaaaacattattgaagaattgaaaaataactattttcataatgcatgtatcagagttccccaaaacacttctgataaaatttcatagcaaaaatatctccaaattttatgtttttcataacagaagagataagttaatactataaaaatgcatcctcaaaactgagctttcaaaaatgctgtgacataatgcactttttactcttaataatccaaattagactaccttatcttagataatattaataaaactttgcttcttaggagggcacaatgataagaa

SEQ ID NO: 126906 - DNA, 1014 bp, Homo sapiens
aatttgtttaacatggagaacaaatccctgtcactaccacctgtaaaaacttgctagtgatgttccttaaagttcgttacctgaaatttcttactgataatataaaatatggttgctgaaagaatctttctcatagaggttaaatgagtttatatgtctgttcatgcttagcatttcctaagtgctggtgatgatgatattgatgatgctgttagccacatcatttgggatcaagtagaattatctttgtccgtttacagctggctttgcttccatttgaaaatagtgcaggaatttggttaatactactccagagattagagattagcacacctggaggactgcatccaatttctggtactatattttaagagagactttaatgacttgaatcatatccagagaagagtgacctgaattgctttaaggacatgggtttcttcagtatggaacaaacaaaacttagagaaaggctagcataatcaataacttgcagggctgccctatgggatgtagattagattcatttttttttatttctaaaatagaattggttaagattagaaagaaacaaatatctcaggctaccatgagatggaaaaatctatttactcctaggacttttaaaaaatgtaatagggtggctgggcgcagtggctcacgcctgcaatcccaacactttgggaggccaaggcgggtggatcatgaggtcagaagttcaagactagcctggccaagatggtgaaaccctgtctctactaaaaatacaaaaattagccgggcatggtggcgggtgcctgtaatcccagctacttgggaggctgaggcagagaattgcatgaacccaggaggccgaggttgcagtgagctgagatcatgccactgcactccagcctgggcaacagagcaagactccgtctcaaaaaaaaaaaaaattgtagggtgacatataagcaactgacctactatttactatataatggtaatgtctgtcagtcacatcattgggaggtt

SEQ ID NO: 126907 - DNA, 1190 bp, Homo sapiens
gaccatggaaggctaggaggtaactgtagaattaaaaattagagtttcagtttttgaagagtgttgccaacagcacaggcaatcttgtcagagaaagaattatcctagtttttccttttgctgggaaattgtgagttgaaccagatttccagcaagcaaaatacattttaataggtattctcttttcctagctcaaaatagttttttttatttagaggaaaatgtattttgtttctacttgaggaatttgaggtttattgctatttttataaagtgaatagacactattttatgtgtcttctgttacaaaaagaacaactttctagatgggagagatgattaacttgcatatcagggttaggctaattactactatctgtaattttcccaaaatatatctggaagctgcttaattgctatagcatttttaaaaaatctctttcctttctcatagtttttcccaccatagataattctcaattatttcagggaagttgcctatctttgtatcccctgaagcttctaacattttagtttcttagtaaatacttgttgaacaaaaagaaataccaatctagtccagtctctggcagtaaatacttgttgaacaaaaagaaataccaacctagtccagtctctggcccttgttacctgttttttgtagtttgttacctgttcatagaatcatttaggatttttgcttctgggtaatagtgccactgtaattcccagagctttaaaatggtgtcttaatttagatcttttgttagctccgttccaaaatttcttcctcattgtacaatgtaaatagggcaaagataaaaaaatccaggcttattccttttttttggtgaaatactagatatcaaatggatatcacattcatttatttgttcattattctcacaatagccaaatcgaatcttaaataaagggatcaatagagatgatttaaaagatcatgtcaactgaaaaacatttagcagtatggcattttctcctatagttgtggtctttgaatacatcataattttcaatattttcccttcctagaaaataaatacaggcaatctctgttgccttaaagggttttacaagtaagttttattacttgagggtgcagaaatgccaagctattccaggcaagtgaccaaataatgtctgggactctttttctggcaaaacaacta

SEQ ID NO: 126908 - DNA, 1519 bp, Homo sapiens
agtaagtctccttcctgcttctgtcctccagccatggttcctctctacagaggcaactacacatattcccttttgacttatgtgcatatgttcacaaagctgcttcttgctagatgaagatccaaatccttagtatatttcatatacttgcatgagtatatgtcttcagttgtatttctcagcatattctctagtttcctctcctccagccacactgtacctagacatattcttttgttgtagatcctaccttgcttttcccaaactctacacaacatatgcacatttctaccctgaaggttcttcctccttctttgcacctatttagctcaactctcccaggttagacaatatcttctcagagaaatcctccctgaacctacagttcagatcaggcccctttaagacaatattcatgttttgctttcataacatttatcacagtttgtatttatatatttaatgatcatttgcttaatgtctttctcctttgcaagactgttagtaacattagggcctgtgtgttgctcgacattgtttactcagtactggcacataaatagttaagaaacatctattgaataaatgctcaagaatcctcatttgcttgtgggaggtatctctttcattgtaatccattcacttatttcttgtctactgttttttatatggccagtctcctagaatttctgtcccccgtggatttaatatgttttaactcagcaactcttaaataagcgtaagtattttggatagtaagaaaggggaaaaagaagtgaaaactgtaggaacacaaaggatgatcctgtcacttctgagatagacacactgtatttgagctactgtaccaatgagcattatgatcagcttctctatggaaggtataatttctcccttaaactctccaaatatatgtgactcccagcttatgtgactttcgaactctaagatccacaagggcagaaattatgatctatcttgctcactgctatgttcctagaatttacgactattcctgtgaggtagacattgactagatattgtctaactggaagtttaaattgaatgtggccatattgtgtatttacagaagtattgtaggaagaggaacttgcagttattcagggaaactctggcacattatgttactaatgtcaaatactggggagacatagagaagtattatttgtgctcatagttttggctcttcttttctctagtaaatgtagtaggttttgtcacaacatgatgggtttgccttgtaagaaaaatagagattttgttagtccagaaacaatcattttatttgacaatgttgcagtgtatctgtgacactgagatggaaataataattttttaaagttttccaaacagggtagggtaatgaatgaataagggaaatagaaaactaaccattttaaagctttggttagatgattgattagtgcatatgggctactttgaatatacagtatctgcactggtttatttctaatggacaaagagattactagtgtta

SEQ ID NO: 126909 - DNA, 1081 bp, Homo sapiens
gtaataacttattataaaacatgaagggattggttttagttctgttttattttatcttctctgtgttgtatatttgtgatgtcttcaacataactacttactgtattacttttaacgtactctttaaaattttttattacagcagcagcacagcaagtggataaaagcacagactctggagccagcctgtctagattcaaattttatttactctatctgtgatcttggcctcattaagttatctctgttttagtttttttcctatggttaatgatagtcccaacctcatagaatagctttgaacattcagtgagttattccacatgaagcacttagaggaactattagtattcaagtgtttcataacaaagtataatcatttgacaataaataaactaatatactcatttggtaacacacacagacccacacacacacacacacatacacgtatgtcatccactgtttgcaattgtgagattatactcccagaagtaattttagaatgaataaaggtagaagcaaataaatctgtgaagtgtcctctgtgaagcttaaaagacagaaattattgcaataatctcaccttaatatgtcttttttaaatagtatttttgccccaggtaaaaactgtcatctactgaaatgtttttacaacaactttattgagatataattcatatactgtaggtttcacacttttaatgtacgtaattccatgaatgttaatatatttacagagttgtacattattaccactatggaatttcagaacatttgtccttatccccaaaagaaacgcacacactctagcaatcattccctattccttcctctaccctagggctagcaagcactgtctacttctactttctgtttctatagatttgcctgttttcactatttcatgtaattggaatcatacaatatttaacttattgtgagtggattctttcagttagcataatgttttcaagattccacaatattttagcatgtatcagaacttcatttatttttattgccaaataaaattccattgtatagatgtaccacgttttattatccattcaacagatga

SEQ ID NO: 126910 - DNA, 1578 bp, Homo sapiens
tctgaccctaacacaggcagacagagcagttctctggtgggaaacagcttttcctatggaataaaagccaccagtgcttgtaatctctccaggcatcaggaatggactgtggctaatgaaatggcacagttggttatatggaagccatgcagaaaagcaggtaacctgaagtaatctgctaggagaccaaagagaaaattaatctcaaaaaagattagtagggcatgcttatttctctgagaaaagaatagccaataaggcttgcattttccgccataaagtgaatatatacatatgtatatctgtagacacacttacatatttatataagaattgtttttacttcgagagcgtaaaattctatagtaatgagtattttgagtgcttggaggaaaaacaaaggacaaaacacacttcaaccttgcttctccttagttagctttgtttcatgtttgaattgtgaagccagctcagtggcagagccaattatagcaaatgtctgtcagactctgtcccagggactcagttggaggtttggtgcaagtttgtactgtcaagatgagtggttttttcacgatctttaatgtaatagcaggtaatgtactctttaataccaggaagttcatttgcctgtagtggaaagggagcagctattgagggaagtttgtcagggaggcagaaccaggacccccttgactgacagcctaggaatgagagtaaaccctgtgtcttggagatgcttgaggaataaagatttgaacatacgatgacaagacttatttaaaaattaaaaatagagagcatgtatctttggtgggttatgtcaacccctatgtcaaattgcaatacattgtcaaacctacaaagagatcataatattctatttggttttcatgtcatggttgagattttacgttttcttgcaagtcactgcataataaaggcagacatgacaaagtcaaataaaacgaagtagtactggaaataaaataaaaagtaaaatggaattttgttaaggtttggctccctgacatatccaaatttgttggtgaactgtcagtgtattacttcacggggtataagaatagccagcagttgttttttggatgttttaaataaaaatttgatgagttgcttctttcttcaaagaaaggtaatcttgaacataaagtgattctcccactttttcatatacatcattgtagatgactcaaatagctatttaacattttattttattaattttgttatgtaggttatataaatcacatatacttatttaaataaacagttgatacttgaacagtgtggatttgaactgtggggtccgtctgtacgtggattttttcctatatatgttggaaaattttttggacatttgcaacaatttgaataaactcagatgaaccaattagtctagcaatatcaaaaaagttaagaaaagttaggtatgtcatgaatgtataaaatatatgtaagtactagtttatttatgtgttaattgactgtttctgttatctgtaagacttccagtcaacagtaggctattagtagttaatttttgagggagtcaaatgt

SEQ ID NO: 126911 - DNA, 1055 bp, Homo sapiens
tgcaatgaaccatggtcacaccactgtactccggcttgggtgactgacagagtgagaccttgtgtcaaaaaacaacaataacaacaaagaaaggaaaccgaactaatgtacaatgatttttagatcgcagccatctcttgtgttaaatgtaaactcgaactgttattaagagtttattgattatccctagttcacagcaagtaagatttggagcaatgaggctcttacattccaagtaaaattccttcttgtagttagtttaaccagtattggttttccgtcactattttctttttactgaaattaatttgaaagtctaatataacaattgtagtggtaaaaagggatgttcttttcatggtgaagtttgggttttcttggtgctatttttcttattgtatttaaaaaatcacattctatttgctgatgtgatgcttataattctcactgggaagatcctaaaaatatgtatgtatatggtagataataatgctaatgcctatctacccttattatgtttctagcaggactttagaaatctaagaaataagtagctagccagttagtaaagataaagcagttgggttttagaaatatctattaaaggtactttaaagtagttttaattttatttttaacattttaagctaactattaaatataatagtgtggtataatagagcatatacttctttaattttaataaactaagaaacaagattgagtaataaatgaaacattgtactgtgaaattagtggggatcctttcatttttcataaaaagaaaaaagcaatgatacaggagagccttgttagtaaaaaacttactgggagaataatttgatgaaatgtgaagactctcagcagtgcagtttctagtccaaggaatttgaataagtgttaggaaatatgaatttgtttctgcttcatctaactagatttggtacaatggggtgtgcagttagggagaaaaagtctctggtacttaataaggcaataattcatgctgaatggatatgagcagtcattgaatgaaaaattgatttttatagtgt

SEQ ID NO: 126912 - DNA, 1024 bp, Homo sapiens
atgaattgtgtcaatgtcgacttagcaaactgagtatagatttaatgtaatcccaattaaatattcaacaggattttgtgggagaaatgcaaacgcccaagagtaaccaggtcagtcttgaaaaagaagaataaagttggaggactaacattagcagataacaaaatgcctgaatattaaaatttaatatttagaaagtaaagtaacttaaaatactaagtattggaaagggaagatgtggagcaactagaacttttaaggtgctgatggcaatgtaagttggtataaccactctgaaaaactgttgacagcctagtctaaagctgaacttaagcatctcctatgacccacctattctaatcctaaatacagtccaaaccaaaaaatgtgtgtaattataccaaaaaatctatacaagagtgtctacaacagtattattttaaatcaactgtgaacaatggaaatgtctgtcaagaatagaaataataaaaatcttgtagatataaaattaaattctatagagcaatgaaaaggcacaaactatgacaacacaaagaacatggataaatctcacaggtataatctggagcaaataagtcaaacacaaaatagtatgtattatatattttcatctctatgagttccaagacaggcaaagttaaaatggcagagtttaaaatttttgttacttttaaagaggcaaaatcactgggatggggtgtaagggaagcttcctggaatggtggacataaatgagttcatttcatgaaaatacatcgaagctatgcctaaaatttttacactttacaatatctatgttatgcaacaatgaaaagtttttaaaagtatatattatttttgttcagtagaaaacatgactgtctgtgtgtgtgtatatatatatatataattgcatataaatttccatgacaatgcacacaagtttccattttcatggaaatttatgtgcaattatatatatacacagacagagagacagaggaatataaatgcaaggctttct

SEQ ID NO: 126913 - DNA, 1029 bp, Homo sapiens
catctctactaaaaatacaaaaattagctgggcgtggtggcagatgcctgtagtcccagctacttgggagcctgaggcaggagaatcacttgaatctgggaggcggaggttgcagtgagtcgacatcatgctactgcactccaacctgggtaacagagcgagactccgtctctaaataaataaataaaatcatcagcatcaacttgaaccgaaaataccctttcttagtagaatgctgccagaaacattttaaatttcaaaacacttataattttatgtgacctagtttagaacttctaaaggtacattatgacatttggtggaataagtatgtggatattaagcatatgcttataaaagaagagaagactctccatttaattttggttatgtttatttcatcgatactctaatcataaagcatctattggagaaaggttagactagtccttgatttccagttagattttatattaagcttgggctgaatagtttggaatggaaacttagatattactcacagaacaaattatttgttcttcagtttgataattcaagaaaactggaataaataaccccatttgttatctacattattcaacacaatatgtatttgtggatctttgaaaaaacgtatatgcaatataacttcttaacctgtttagaaacagtatcatagacagttgtatagcacccatgagtatgggaatgtcctaaaagaactgaaaaccgtgattcgaaaaactagagttttggatgaaagttaaatttgcatcttataacagtttttcgtttagaaattactcttagcaattgtaagagcacatcattacctcaaggcataattgtcactactttctgtatgtagtgaacagtgtttagttgcaagtgctataatggattatattatacaatttaaaaatctcacccttatgaattatgtttttactgtcattagtgttgagtttatttggtatgcaacagtctttgatgattctctctatatgtgtatctatatctatctaccta

SEQ ID NO: 126914 - DNA, 1062 bp, Homo sapiens
aattttgaggaatgtgctctgaagcatttgtgaaatttgaatataccatgataggatacctaaaacattcatcattactgaaggttattttgggtatctttttcgtttcctgatttgctatttttttaaccataactgagtaatcagttttatcagatacttttttctatatctattgagataattataattttttcttatagaatgttgatatagtaaatgacatttatagttcctttaattataatccccttgtagtcctaaaagttagcttagtcaaacagtagaaatgtttttatgtatcactggattttatttttatagcattttgttcgggatatttacatatacatacatgagtaagagggcatattattttttgttctattgtcattttctgttttgtcgtcaaagctatattgacttcatagagttgggaaataaatcactcctcccttccatgcccttctccctcattctctagaaaagtataagattgaaatgctttggatattgaaagtctgataaaacttgcatttaaaaatctcggagtctgttgtatttatggaaagattttaaggaaataattccatttatttaaaagttgtatatttatttgtatttttattctttgttgagatcgactatattttataaagatatttctatttaatgacattttttcaacttattggcagataattattcacagaattcttttatatcttttaattctgttaaatctctgattatgttaccttttcaatttctaatatttatttggctctcttattaatttttcaaactcgtcagaagtttatctgaattctttgttttttcaaagaattaactttttgttttgtgattcctgtttaatcttatcttatattttatatttcttcatttttatatttattttatattttttaattttacttttactttatatttctttaatttttattcatatctttgttattattttcaattacctttatttttactttatttctcattgtctaacttcctaaatgacatacttagctcatgaatttatagcct

SEQ ID NO: 126915 - DNA, 1049 bp, Homo sapiens
catactatgcctttaccagtgttctgtttttaatcctctaaatgttatgttctgcttactgcatagtactttcttcttacagctatttcagatcttttgtgctatagcttgttccagtatagtaggaaaagctccttcttggtctcctccccatctattctagtctttacatctgtagttaaggtaacaacagcctagtctcccctgagatatagcaaagctgagttactttagaacaaagacattctcaataagagatatcagactattggattatagaccgaattccctaaaaaaccttcccttggagagtccctgggttggggcatcatccactgcatctcaagtctagctggctgcgctgcacacaaaacctatagaaaatctatcaagccccttatcccttcctaccctcatctaaagctcatgaaactccaccagctaagtttccaactgataccaatccacacaagccacttagggtttaatttaatgttctatgacaaggcagagacatacagatgacagaattgagactaacttccagaatattgacagttaggggattatcaactttttttcagagtgtcaaggataaacaaagctagacactagttaaagcactgaggagagatttgattcggtaataaatagttgcagtagggaagtgagtccagcatgaattgaactcaacttcaccaaaacaaaaagctggagactttttagaggccagggactggcactgaggggtgttaaggggttggtctatgtgatgaagccacgtgggtttgttaattgacgcctctccagaggagaagcaatctatctttatgacaggaggcaatggtattagagcaaggtgcccactcgaagttgggccttaactcccacagggtctgggagtgagagtgacagttgtctcccagaatgtttgcatctcatagagcgctcaggtccttgaggaaacagtttggggtagcagattgtcccaaagggcaaaaaagcatttataattgcaagctttctaaagcaactgctctataagagca

SEQ ID NO: 126916 - DNA, 1037 bp, Homo sapiens
tcccttatattatatcccggtgaagataatttagtcattgggaagcatgttcgtcaatacactaaaggtaagggaaactgcaacaatccatttgttttgtggagtttggggtaatatgatttcagttggtaaccttctgatattatttggtttgaagctgaggggcacctgagttaggatgtgcatataatcttgagcttgaagtatgctgaaaaatcaggtaaaccagcaaggttttgtgcaaaatgggatgtatggtcatttttcgcagagcagactgcttctttatggtgaaaaagaaatgttttggatttgtggttgatgagtggagtcagcagggaacccataaaaacagtccagaacagagcatggtgataatcagttagttagggtccagtcaaaagtagctgaaattgtatattcctggacataatcagaggaaagatctaaagacaggctttgatgagagcaggtgtggttcatgacgtggtcagatcaagtcccctcacatgggaaaattgtaaagtggtaaataagagatcagactaaatggtagaacattgccaagtgatatgcatcataacagcttcacatgggcttgtgatagtgttgggtttttctgtggtgtagtgggttgaatggtgacctgccccccctccgaatgatgtgtccatttctcagaacctgtgaatttcatcctacttggaaaaggaatctttgcagatgcaatttaaaggacctcaagatgagattatcctggattatccaggtgggctctaaatcaaatgacaggtatctttatgaaggagacacagaagagacacacagagaagaggtgaaagcagtggataggcaaaataaaggcaaaggttgaagtgatgcagcctcaaaccatggaatgactggaaccaccagaaattagacaaaataaggaagaattcttccccagagactttggaggaaatgtagcccgatgacaccttgatttcagacctttggcctccataactgtgagagagtaaatttctcttggaagc

SEQ ID NO: 126917 - DNA, 1434 bp, Homo sapiens
aaaacatacagatgatgtataccttaggtaaactgggagctagggagatgataggaaccctcagacctcattattttgacattctaggagatgtgtcgatttgtaggattatcttttctagggctaaccttttggtcacattctctacctctctaagtccacttccagtgctatcaatttcttctggaaatgactgccacaggctttatttcttaagggtattggcctaaactattgtattgtgggctcctattctggctacagccatctttcaaacaactgtgtttttggattttatgttactgccagttgttctggacttttgccccttctgtggtgatctagggtcactgcagaagaaattaattctgctcttaaattggcctttatctttttgccaatctacctgttgtttcctgtacatctagattccctggtttgaaggttgccttgatttcccaacataattgttggatttccttaggggagaaaaaataatactaacaagactaacgagagagagaccttatattcttttataagaaaagatttttaatattgggtttttttcttccaaatggcaattcataatatgtgccaaaatatactgacatagtttcagcagtttcaactgttacttgaatgtatgcatatgtatagacaaaacagcttatgaatgtatttcatcagcaatatagatgtgctattacaaatcatttttatatctacatatcttttgtgaaaccggattaacgtgggtgcttttaaaatctaatataggaagttaaataaccaaataccaccatgaacaacaaacaaaaggagacaataaaagaagagaaccactggatctgatagaaatgtagaaatactggtgtgccagtgtagtctgtgacatttcttcatgaatgaattttgttatgtgttgaattgtgtctccccaaaacatgaagtcctaattgtcagtacctgtgaatgtgacattattggaaaggtctttgcagatgaccaaatgaagatgaggtcattaaggttggctctaatttagtatgactgtgttcttataaagcagggtactctggacacagagagagagtcacagggcaaatgctatgggaagattggagttacgatactgcaagccaaggaacaccaaagattgtcattgtcaggaaaccaccagcaagagagaggcgtgggacatgttctccctcagaacgctgaatgtaaccaaacctagtttcagaagaaaccaaccctgaatgtaacccaaactcaagtttggttgttcactgctcaaaaaccaaatgtgagagatgagatttggtgggaagagaagcaggtttttcagaatcagccaactgagaaaattttggattaacgtcctgaagtaccatcttaagtcagtacaaatttcaggctatttttaagtga

SEQ ID NO: 126918 - DNA, 1036 bp, Homo sapiens
tttattttagccgtaagaagtaagcagaaatgtggaaacaatggtaagaaacccttagtatactttattattgtgttagcttttatcatgccgttgaaaatagttacggtcaactttttgttattgtttgtggcataaaactagattaaatgatgctggtcatttgtttaggtttatataaaacctgcacatttatcttagtatctgcttccaaaattggaaagttcaagtttttgtattttagggcaagagaaccttcatttattcctcttattggtcatttgagtttatattcattgctgtgcttccaactagtagctatatatgtggggccagagcttctccatcaagctgggtgctcaaatacaggatttacccatttgttaaattatgattcatctgacattatttagaacatggtaataatgaacaagacagggaagatccctattcatggacattacttacattctattaaacaaacaaataagaaaatagcagaatagtgataagtaaaatgcagatataggattattcattagaagcgtgtttcatgttatgtgtttggggaaatattatccattcttattttagaaagtcacatgaagatattgctatatttattctccagccaaccacacagcagaggaaattaggctcagtgatgttaaatctttcatattaagtggctcctaaacatatgtgcaagttgcctagtggcaacaaaaacaatatagtaataagaacatcaggtaatgtagactcctaattatatttaaataggcctatgtattgtgataataatgtaataatggtaaaataacatagtaataatggtatagtaaaagtatagaaatatggtataatattcggtggttataaaaattaatatcattttccttgttccaatagaatcaagtaaacactgtaatgtatgttattttaatattgctagatttactttaaggaatcatatttttgtatccaggaaacagcatagaaacctaatatacagtctgtcaaattttttctcaat

SEQ ID NO: 126919 - DNA, 1344 bp, Homo sapiens
tcttaaagatatagtaagtcttctctttctactcctaagccctctatttcccatgcctggggtgggttggaggtagagaaagcaccttaagctaagtcagttcaagatcataaaagctatgaagaatgacaatcctctgaagcttttctgtattaaaaatatcctccttattctcttacccttatctttgccctagttctttgctgaagaatgccatagtttcttcagtatttgtagagtttaggagaatgtggaccaatatttatttattttttttttcaggacttaggttatctgtgataggaaagttagagtataatctatgagtagagtgtaaacacactaaagaaaaagctgtagagaaaataactgccctatttattaagtattagtgctgttcttctggtcattaatgtcaagctaatttcttttctggcaggcccttgtagtatttttttttttttttcattaaaaaaggtgggtgacatgaaagcactgatgtcttttaatagttatcattgatacacaggcctctcaggcttctgacaccacaaaggcaaagtttctgcttttgagacacatctttctgcctcttttgtctcctctaattgattttgttattttaattgaaaacactggttttaaagaatggaattctgtagggccctggttagagaatagccacaataaaaagtatacatgaattatcttatttcttctgagtggcactgtttggctgtggtgcctctagaccattctctaccacttactccagtttgcacttgagggcagatttttctcaacggtactagtaggtgcagtaatggagctggctgatgctattggaatggtgcttgaacaggaggaacttttttattagccatatctgtagttctgatcttccaggaagttagctagttataataattcccttggcttaaaaagatcatattaggtaggaaatcttcctattgaaaaagatgttattctgtaggactaatagctaaataataagctaatatgagtaatgacactactttggagagtgtcagtaataccaagtttttcaagtggccactctctgggtccccttccattgtgtgcaagtgccaattaacagtttacctgtactagctacccactcactagcaagtacaagaaattaactcctcccaggacaaaacaaattacttccttaaactgccagatccaactacgatgagcagagccgtctaataagctcttatggactgaatgtctactccccaaattcatatgttgaaatcttaactccaaatatgatggtattaggaggtggagcctttgggaggtaactaggtcaca

SEQ ID NO: 126920 - DNA, 1546 bp, Homo sapiens
cctcctactcctgctcctgcttgtcaacaagctctctcacctgcgtctactacatagttcctggctgtagaaatggaaccaagtagctttcttttgtagaataaatggacttatccttaaccagcaatggatgattaggatgggaaggtagggtggagggatgtgtatagaaagaatgtgaaacttgaagtgccctttaaaaaaatgttttcttgttcagctcagagtagatcaacttctgtttggcctgactttatttcctaaagacagtaactggtctcaagacatgtttaagagtaaaaaatgctagaatcttcttaccttagaagccagtttgtgctactactgacctgtcaggaggaatacttccatgtcaggaggaaggaatatatcagtatttgcctttagggaatttgcctggaagagtacattaaaagtcattcccagtcaaggcaatttgtttagatgtaaaagcatataagttttgtgtgtgtgtgtgtgtgtgtgtgtgtgtgtgtgtgtgtgtgtatttgagcagcagcattttaccttgttacagattttaactatctttctggaagtattctgttatagtgaatgtgactgtaatgtaacaaacagattttacatgctttaatggaatttaaattgctctgtgaggctaaatgaaatagttaatctagacttttgcctgggttttcttacctgcattttgggggaggaatgttcaaagaatatttttttaaaaaagaatatcattcaaaatacaaaataatatactgcaaatgatattaataaaggtcatataactacattagaatgaagacttgtaagccaggctggccttggaaatagttgtgagtcaggcagtatgcttttgttgcttctcacccttactatctctttgatgccttcttatctgccactgcagtggtcagttctttcctattccgtttgcccgctcaaagcaaaaggaagaagtattattgatgtttgctatgggtcaggctttttattgggtgtttgacatatactgtcatttagatgactgttaaatttgtggcaccagctctccttccccagctgcaaactttgtctattcaaattgcctagttaagatgttgtagaatttgtttatatcacatgatgttatacacaaatacctgcttaccaacctaccttcgtacatacatattgataatcctgttttatatagataagcaatatactcatgtaatgtcagtgaaaagtgtggctttttatgccagactgcttgaagaaactaaggctccagagactgtcacctgcccaaggtcacatattgttagtgacatattgtagtaaatggatttcgacctaagtgtggcagacaccaactttcactcttgcaagtatttttaaccacttttctctaccttacgttcctattgttctattggtgcataacggagtgaaatatttctcttaattttgtattttttgtgttttatatatacatatattttatgcaaaataaaaatagttttcccttcggacaaatctaaaa

SEQ ID NO: 126921 - DNA, 1619 bp, Homo sapiens
aataaatgagctcacatatataaagcatcctgaagacagactcagtccgtaattagactttcaatgaaaatatatgtacatatttgcttttaaaaataaaaaatcctttataataaagtttctacacaataaaaagataatgtggcaattgataaagagacatgattgaaattttgcactttactttgacttctagtagtgttacctcctatattcttccagtctatctcttttttattccttgcaagtttatattttcaacttagtctttagaagcagctgataatgtccgtccagtttgtattgagatcatagaaattggtatcagttgaaacagaatagataagttttgaaaaaaatttgtttctagcctctcatctaatcttccaaaaatattaatgggatttaggtttctactgtccttactactttaaatttaaattagtttaaattgaaattatgttaataatccaataaacttaaaatctttgtaattttatgtaaatataaatggaagccaaaaatctattacttcctgcctctttcatatactttacaatgtaagttttatgtagtgcatgttatttcattaagacctaacatattaaataaatatactaaatggtgacagttttaattgttatttttcaatagtttggtttttaaaaacaattcactgaaacacatttctgcttatggaaaatcatctatgaaaacgataagtaaaattgttttgtaatatttttgcataagtatatacattgcaaaaaaactggaaatttagtgtctacatgttagatatgattatagaagttgatactgggtagagctaagtagatatggtcttggtaagtaattttgtgatttctaatataaggttagatataatgcctacctcacagacttggtgaaaataatttataaaggaaattttataaagcaatactgttttaggtgttaatcttttatttagaaacaaatattgattattgtttttatcagctccatatatatttgactgtgaagacatatgtactattcattcacaacatctattgagtacttgttgtggactggggattgtggcaggtagtggcttttgtgataaataagatgaggttcttaacactgttgaagctcatagttattgaaggagaggaagcattgaagcaaataattatggtacaaaattacaaatgttataaacaggtgtaatggtacaaaggaggggtggattctgctgggatctcaggaatctttctcagaggctgctccttaggcaagataaatgagtgttgacatgactaaatggtagactgtcataggtagattgaatattaagtaaacatctactccactattaaaagagtactaaatgtaggatgaatactcagttcatcaaatgtttattgaaaagtcacaatagacaagttcctttactagctacagaagaactagaaccctgaaaagatctggttcttgctcttcaggggctcacagtcctacaggagacagatgtgtgttcccagagggctgtgccccaaggcagaagttgagtaaaggtgctgtagaaactttgtgccatatgaccaggccatggtatcactgccaaatcccga

SEQ ID NO: 126922 - DNA, 1189 bp, Homo sapiens
ttagggaatagttatggattccagtttgattgcagcatgtgatacatgctggaaagtatgaatcactgcttcacaaggagctgtggttaaccagagtgacctggtacacccatgttgtaggaactttgagttcattatgtaagttgatccacacagcagcccatagggtaataataactgcttgtacgggttaggaaaataagactcagaacttgcttaaagtcactctgctattgagtagttgagccaggaatatgaccgagagccgttctgacctgtgttgttactcacagtattatatgattctaagggcagatctggagccatatttagaggaattgtcacatcagatcaaaacttcagccagtttatgcagactagagagagcatttttttcttttttcaaaatgagtaaaagaaagtctgtctttattttcccattagtaattgcattcttgtgtcctggaggacaggaaaagaatacatggcttcaaaatgccatctttggaatccttggtgaaaaagtgtaattaaaacccagatgtccctagatttagattatctatgtactcttcattcttctgtgcaatattatctgtctactgatttctaaattatatttagtcaatgttttttcctccttctttgttattgttgcttactgtaaggtatatctttgctttaaatccctactaatgtgtgacaattctaaagtctgaaggaacttttaatttgaaagtaattgcctagcatcaagagtaattttcaaaggagcaaaattattttaaacattttaaactgcaattttagtctttagaattagatggatttgtcatttgatagaatgtaatagtattgagtgaacacactgaaagctatcgcattgtatagtagttctgctgagttttaaaatatagttgtttttcccatccttccagctgatacttccttaactgatgacagatggtactttggtttgttgaagcccaattctatgattattttatctttgattgcctttttaaagacgtatggagatatcttcatcaaataattagctatattaccttgagaattattttactataaatacttggttcatttttgttttgttctcttctgtttgttttgagatggagtctcgctctgttgcccaggctggagcaccgtggcgtgatctcagctcact

SEQ ID NO: 126923 - DNA, 1096 bp, Homo sapiens
atctaaaagaattttccaaaagaattttccacaaggaaaagctctttggtttttcactatagtactataattttgttcaaattgttattgaataaaataagcaacaatgacaatattagttcttgcaggagtactaaatactattggcagttatgttaatgggttcttcctattgtttgtaatgcctttttgtcttttatctgtttgtggaattccttttattcctcaagttctaggtgaaatctccatgaactgtttctctgccagggcagagttgattgcttttcctcagtggtcccattattgctctaaattatctattatggatatagatatttattatgtctattatttattacagccatataacagtgtattataatggtatatgtgtctgtttcttttttttccagcagatagtgagttcttcacgggcagaaataataccttcctcaatttttaaatgtaagcttccaaaatagaacccagtatataccaggttctttagttgggaaagtagacaaacaaaatacaaacaaaatgttctgttgttcatttgtaataatccctactgttgggcaaactttgatggtgtaaataaagccaatatgtttgaaaattttatatagttccactagatgtaataaagagattgattaaagatccaacaagttaaattaaacagtattacactttcgactgtgctaataagacatttttgaaagattagattatgctttattctaagaaaagacaatatcatgaatcctgctttattaatacctaaatatgttatatcacctttggttagttttgtgtggcagaaaggatacagaaaagtaagaatagaaagaaattttaatatgctgtacttttccctgtaattttgtaaactcacatttcatatgtacaataaaaataactctatacctttattaaaacttcaatatcttcatttatattgagagtggtagcaacataaaattgaaacctgagagttgtgaaggatataaagtcatgttttaatagagaaactaaattgctccttcaaagagcctataaaactgaaaagcattcattataaatgtaataaaaa

SEQ ID NO: 126924 - DNA, 1041 bp, Homo sapiens
tcatattgtaatttacttttaacagaagcagatcccaaattgcattttaaaggtagatgcctctcatgagacatttgcatcagtgagcgatgtgggcttgtgaaagtattttcaaaactaatcacagcaggatttgtctcagtcgttgaaacattgttggacagaacaagataatttcacatccactagaggaatgatattattttagaataatattttaaaatgtagatactataaaaggtaaaagaatattttttgaatgtcagatttatttcctttctgagtgtacattgggatggttagactttaaaagtataagtgatttgtgagtccattcagcagttctatagtgtgagatcttttgtattatcaaagtaaccattttaaactattcctaagaaaattcttacaagggtaaccaatgtaatggtcttgagacatggaaattgtttccaagagaagttttaggatttagtgattttttttcaaatatttgagagctatctttttggaattacattgctttgctctttattatactgcataaataccccgaggatcttttttgtttttttgatttgttgtatcaaacctatgtcccttcctccagaaaatggacaaggtgaaggcaaagaagaattattttacctaatgtttgatggtgatagaagcagaacaagtagcatcatgaatctaattccttgggtttctttggtccttcagttttaattgaaaaaaaaaaaaaaaaagaaccagtataataatgtaatattaccctaggctactctttcccaaacattatttcttttttattgttttaaaaacctatgccttatattttctgactgccttatttaaagtaacaccttccccaataatctgtatctatcttgccttcattttcttcaaaacgcttgttgccatctgacatactatatatttttcttgatttttttttctgtttgtttccttcattagaataaaaactccatgagaacagggactggtatctgttttgttttttgctgtatcccagtgcca

SEQ ID NO: 126925 - DNA, 1025 bp, Homo sapiens
tattatgtattggcacttaatgcaagcaggtcacaaatgaactcgccccagctagtctgactcctgatatgaatcaaataaggcccccctcatcaacagcctcagcttgttcccatgggctcctctgtggaactcagtataggattagactcagctctagagcagcaactgggagagagcagaatgggagcaagatggcatggcctatagttcataatttaatcttttttttaagtgtgtaaatctcctatattttttgttattattaatttttatttaatgtttttttttactgatatggatagtttacaaatttaattcttgaattcaaaaattcaaagaggtaaagttggaaggagggagaaaaatatatatttggttagcaagagacctttaatctgtataaggtcctgtgacgttcaatggaactgattttcctgaggagttaggaaattggctctgtgacaatctccatagagaagttctttggacaactgtagcagtgataatttccttgaaagaaatacacaacaaaccaagtaaaaacactgtgaagggcttcacttattgatgtatgtgatgggctgaatatgtcccccagaattcatatgttgaaacttaatcaccaatgtgatagtattaagaggtggagcctttaggaagtgattaagtcataaggctagagctctcatgaatgggattagtgaccttataaaagaggtggaaaggagggtcttaggcctgttttgttttgtttttggctttccacctctgccatgtgaagacacagtgttgtcccttgtgtactttttgcccctcctgcaatgtgaggatacagcaagaaggccctcaccagacactgaatgctggcaccttggtcttggacttctcagcctccagaactgtaagaagtaaatttctgttccttataaattacccagtctgatattttgttatagcaggaggaatggactaagatagtgtatgaagtttgatatattgatgaaaaagaattcattctgatt

SEQ ID NO: 126926 - DNA, 2334 bp, Homo sapiens
cttgatctgctgacctcgtgatcgtgatccacccgcctcagcctcccaaagtgctgggattacaggcgtgagccaccgtgctcggctgtgagttcttactttctgaacattactttcagatttctgaagaaataaacaaattgtgctctctaagttgtcatcacagattcttataatgctatcagttttaaactataaacatggaggcagcacccatgggagtaagatattgaacgtttacagcatgtgtacataagttacctcaaaggataattagatgattataatgacactttctttgagatagctaattttaaaaatctattgctcccaagtctaattatttgagtaatgataacatattagcaatcatgaaacttcagtcacagccaaccccattgaagaaaaaaaagtaaatcatagcattttctataaagacccaaaggattgcaccagaccaatccttgcattttctgctgtgtattctatgcccagcctcccatccgtgtgtactctaaactacctacacatgtatcattcatgtgatttcactctatttgttttcatttgttttataactcttcctttggtaccagggagataattttctagttcttctccatcctttgtgaacctctgaaagaaggcttttataattagacttcatagctttaacaaacatttcataacctgccagtaaaaatgtcagttctctgggccagggcataattaaatgagtaagtatcagtgtggtaattcagccacaaaataaaataatttaaagggtctattaattaagggcttgctttgattttggaattctaatcaacagtaagctctgtatgttatgggtaaaaatcttcttgctttcaccgttcccttttcttggcctattacaaatagtaaataaaataattgtatcaatgaaattttcactttgttgttcttttttgaatgattatgcacctgagagaatgttgttaaaatagcaacatattggatatggtcaaaatgaacattttgctatgagcctttaaaaccaaacctgagtaatacaagcaatatataaacggtatagtagactctgtttgagtccattaggtcctgactgaagactgaaaaaacagtaaaagtggaatcctggaagctaataatagtttgtttggtagggggtcttttgaactgagagcagtaggaggaagacaaatgtgtgaaatgatgggcaatataatgatagggtacagcgaggatggattaactattggtagctcttgtaacaaagaaagaaaagctaattttgtagacaaacaaaaaggctggtagagtaaaattaatattttagaatagaaaacctctatctttgagctgggtgtggtggctcatgcctgtaatcccagcactttgggaggctgaggagggcagatcacgagatcaggagattgagactatcctggccaacatggtgaaaccttgtctctactaaaaatatgaaaattagctggacatggcggcgcgcacctgtagtcccagctactcaggaggctgaggcagtagaatcgcttgaacccggaaggctgaggttgcagtgagggattgtgccactgcactccagcctgatgacagagcaagattctgtctcaaaaaaaaaaaaaaaaaaaaaaaccaaaaataaaacgaaaaagaaagaaagaaagcaagcctctatctttgctaggaattaattggtggtttttacatttttaaagatgtatttgaagtctgggaatgaaagagtaagcagtttcttagaagtcagcataataatgactaacattaattgagctcttacattattctaggaattgcagtaagtgctttatggctataatctcaaatcttctcatgaccccatgaaataggttagtttctatgaggaaactgaggcacaaagattattagtggctgagctacttaaccaagacagcctatttccaaaagtcaagtgcttggctatcactctgtatcctttccaaggtatattctattgataatgatgctttaagtacatttctaaccagggcagtatcttaatgctgattttaaaatggagactctggaaaattttctattgtacaatatattccaaaaggagagacacttccaaggttaaatcattgaataaatttccttaaaaatcttaaaaatgttttttgtaaaacttattttttattcagaaagagttgaagcgtgataaatggcaatttctggtcttttttttatccacttatttgaaatgtatgctgggtgtgctcatctggagcctaagagtaacacctaaggaaaatcatctcccct

SEQ ID NO: 126927 - DNA, 1089 bp, Homo sapiens
agttttgtgtaagagccagcctcaggtttatattagaaagaatgaaagtagaatttgagcaaagaagtttctgaaagaggagaaaattaatgttttgccacagtttccttctaaagcttacccaatgattgacatacttttcttttttaagtgcctatttgtgggtgatctgatactttttgtatctaacctttcttttattattgaaagaaataagacaaaattcaggaaggagagaatgtatatcttttttgaaattagactaaatgggtgccttccatgttttgcctgttatgtgtagtaaatttgatcttgtaatataaaagtagctatattcaaataggctagaatatcttcatgattcttgtttgggaaaaataattgttacttatttgctagctgtattaactgtgcagaagctggaaaaacattggattttgggtcagattcagattcgagtgtaatactgttacttagcaactttttgattctgagtaagacacttcttcaggcagaagggtatgatcataagtatgcatgggaggctcaccaatgaatagaatggctcatgtagatgatctggaaagtacttacagtgcttaggaaagagtacttctatttttgtttttgtttttttcttgtacatatataatgtctctgtgtggttgcaaccattgacacttttaaccaatggtaaatataaggagtgatgggtactatggcaaactggtatctgaattcacagtttaaagtatgtagattgcggtgatatgtgggaatgagggcatagttttgcaagaactggtttttgatttttgtttttctttctaaggaggagacttaagtttggagtttttctgtgaagtttttcatttatacatgtaagcatttcatcagaaaacaattttgctgcgctggtatgtgtcaaacaaaacaagtctttgagccagatctggcctgtggctgtattttgaatgttctactttaatctctatctctctctcttttttttttttacatggttatggagctctggataatctacacagtatgtactagagtttgtttaaatgttgaacaagatgctga

SEQ ID NO: 126928 - DNA, 2730 bp, Homo sapiens
acaagttttagtggctcaacatagatgaattttgatcttgtatagatattctaagttgtggatgtatttgttatttcatattttaagcagaactctgggattttaagaaaagtatttattattttgtattagaagaggcaggcccttgattttcaagatttattatacttttgtaataactggctgtagtcaggggctcagatatcagaactgttcatggggaaagtaatttccactgatgtcatttctaaccaagtgagtgacattgatgtacgtagccctggcctataactggtcagcctgaaataattaatcagaaaaaacaactattttagtacctgactgaattaaagccttattggtaatgaactaggttaattggagttctcccatctcgagactttcacaactgtctttaggttaacgaaaatattttagatctagctgagtgtatagccttggatatttctgtgatttcttttaagatcatatggggaacgttttatttacgttgcctggggtttattggtgcatttctctttaacattgtaatgggaaaaaaaaaactgataaaacttttgaaaatatggtgaaagtttccacttgtgttttattaaatgtaggcgatacaacataatagcataggtacatgcattctttatttgcagctctttcaggaggaagacattaattttcataagaaatatgacatttataagaattgaaaagtttaaaaggaagtgcacagaaattggtaagacttgtaaaaccttggtttaccaggtctggtgatgtcttgcataagaaaacttcagaacagagcagatacttgggacacttgtttatattttgctatttgtttactaagaccataaatgctaagctaaacaattcatatatagggaaagagtgaataaagagagaagattttattattttccttaggattcaaattttctgtccatcatagaatcctttgatttttacttcttatgaaagcacaaaaaggcaatagcattttccgtagctcattattttgaaaagaaaagtgaagaacatgaaaatactgctcctgttgattctaacacccacctccagagagataccgaagactttcaattcatagtagagatctaatcttgccaaaaatactaaacttaatttttatattaaaaataagatttctagaatatatagggaagatgattgatagttatttcatgtcaggcagtttttcttccttgtattagaatttcattcatattgattattgtttagtatcataattttgaggtaaaggattacctgaaactattgtaatttgcttctaatcagaatataaaatatactagttttgttattgtttataaaagataaagtaaaggagattggataattctgtcacaattctctttctgactcaacggacgttattagctgtactcagcattgatatccctttattcctttgcttacagtatatcctagtttcttcatgtagctactctgctctgctgtaggctaaatgcttcaggagaagctgaccctaatccaagctccatgagtgggctttattagtctaaggtgaacaccatctttcttaccacttcttgtttcatgtgaaaagggtcaggtacccacttaagcggactgatattaggagtagtgctggtgcctccctggacaggtcttcctttattctcactgggagagtttcttgaattgattctccttctattctgctaggctcctggccaccattctaacaccaaaaggagagctagctttaagataaagaattactacagattgcagaacagagaaaaatattcctaaccaggaacattttaactccactgcatattgtgtgtgtgtgtgtgtgtgtgtgtgtgtgtgtgagagagagagagagagagagagagagagacggagggagagagagagagatcagaagatgaggaatgtctttgataagaatttacactggcaattttttttccagaaaattccaaagggaaaattaaaatgtgccatttagggttttatttcaagtatttatatgggcaaaatcacttgcatgcatttgataaaatgtctctttttcttttcccccacccttcaaaggtgttattttatccactgcaagacttcaaaatggttatgtgattgactgaatatagtcataaagccaagccttctgaagttgaagggcttattgccttaaatgttattcttttgattatatgggtagtctatttgcatttgttagtgcctcatatgatataattggatgtctcatcttttgccaaaaatgttagaatctgagaaaccatttatttgaaaattccactttaagggtacaaaattcaggtagacaggaggaatatggtatttctttttagttctattgcacagtgtggtgaatataattaataatagagtactgtacattttaaaattgctaagagaataaatttcagatgttctctccacaaaacaatggaaatatttgaggtgatggatgtgttaacaagcttgactttattattctacattgtattcataaatcataacatcactttgtacgccataaatttatgcagtcataaattgacaatttgtgataaaaatatattccaaaactaaaattcaaagcaagtttaagatgtggaatgtatcttgaactattccctctttttctaggaaagaaataaaatactgatatagtta

SEQ ID NO: 126929 - DNA, 3425 bp, Homo sapiens
gtttttttcttcaatgttgcttttgagatcattcatatttatatatgtaactctgatgtaggtatacaatgtgtagtattttttagtgagtatgccataattcatgtatctgttgtactattgatggctgtgtaggttcttttcaattcttgctatatgtaccgatatcaggacattgttatgtatacttccctatccacatggacaacagattttttagggcatataactagaagtggaattgccaggtctttggtatacatttctttaatttactaaatattgtcagcttattttcaaaagtagttttgctattttatacacttatacattccttactcactgacgttcttatataagaatgtttcattttcagctcacctcataaaacttggtattgttcgattgtaaattttaatatatccaaatatcatctccttgaagttttattgcacatctccctgattactactgaggctgaacatcttttcatatgcatattgactattttccctctgtgaaatgtttgtttctatcctactcatttttctttttggtcattaagctttaaaaaaaaaatactgttgatgtgtaggtgtccttttatattctggataataatcatctgtttgtcataagtcttgaaaatatctcgtctgtggcttatcttaattttgctcatgtgttttttttgtacaaaaattttaatttctatgtggcagagtttttttgttttgttaggcataggtatttttcttgtttaggaattttcttactcttgtgttataaagatatatttttctatattttacttttcacattaggtctaatcaatcaggaattgaggtaggattacagatcaggaattagaggcggcattatacctctaatatatctacacatcttgcttttcacagttaggtcttacctgtcagaaattgaggtggcattataatcaggaattagtggtggcattatacatcggtgggggaagacaagaaaaaagtaaatccccatttactttgtaattagtcttgggtagggatttacttttcccccatcatccccctgctgactgtgatgccatctctttgatatttcatgtccatgctggcatggatctgtttctctgctctttgttctgtcgttttagtctagctgcgtgtctttggcctaatgctatgctattctaataatgatagtttcagtatctggcaggagacgtttttctaccttgtactatcttttcatagttatcattgttattcttggctctttggccttatatatgaatttcaagattacactatcaacttctatgaaaaactctatggaatgacttcaaattgatctattaattgccacaaatttgctgtatttatatttttttcccacatgtgaacatggaattacttttcattacatagagctaaggttttataattttccccgtaatgtgattatacacattttcccctgtgtaccgtatgtttttattgttgctagtgtgtataggctcacgttatctctctctctcttgctctctctctctctgtttcagtattgaaatgcttgttacttgtctataggaagtctgtagtttttgtttgctagtcttaaaacaagctacttttgaaatcttctaataatttgctacagaatccattaaaattttctattttggcagtcataacgtacagatatgggtaatgctttctaatacatatttttaaaatttttcaagtagtcttgtgatattgactattatctctagagcagtatgagagaagcagcggaatagatatatatctttttgtttttatgttaatggtaatgtgactaaaattttagtttgtgatatatgctgtaagctcttaagagatactctacattactctgtatttgggtagagatgcttcctttactccttgtttgtgaaggtgtggtggttaattttatgtgtcaacttgactaggcaacaggatgctcagatatctggttaaacattattttaggttgtttctgtgaaggtgtttctcgaagagattagcgtttaaaatggtgaactcagtaagcaaatggccctttccaatgtgggtggacatcatccaatctattgagggcctgaatagaacaaaaagatggaggaaagctgagttcattctctgcctaaccgttgaactgtagcactcatctcttgccctcggttcccctggttctcaggccttcagactcatactggaatctataccattggctctctggttctcaggtcttcagactacatcactgtctttcctgaggctccagctttcagttggaaaattatgggactttacttccatgatcacttgagcctataccttacagtaaatatatgtgtgtgtatatctatcagtctctgtctgtcttctctctctctccctctgtatccatccatccatccatccatccatccatccatccatccatccatcatgtttctctggagaagcctgagtaatacagaaaactttttatctcaaatgaatatttaatttaacaattatttttcttgcatttaatataataaattttctgatattaaaccatcttttaaatctgcaattaaatctagcttttatgcctccaaatcttttaaagaaatttattttacatattcagaaacaccatctgatttgttttaaaatctgaacttgctttataggatttatttttttgtctggtaaccaaacaatgttttattcttcatcttttatatcgtataatacctataaaatattttactttataatacatgtaaaggaattataagtagaagctcagctctgactttgaaactgatttcatttttttcctttgtgagcctatgctgttttaatatggtgggaatagggtgtggtaagtggtttgttctttaacagtacctggaaaaatgtaatattaggtttcaaatggcaaacattgcaattacttttgcactaacctagtagataagtgacataattctatagtggagcttggagaaatagtgtgagcataaattcgtagtctgagaattaggttccaaatttattttgtgaaatttctttttccactagctacttattggcttctgataaaagaagttaaaataatattcccattgcttgaatcattctatcactactctaagatcactttcttgcttatggatacctcatttacttccattaatttattgaaaaagcttttcagattaaacacaatagaaacaggttaacaaaggtaaaaaaacatgattaatttcttgttttatagaccaaaaaaattagtggtactgtttaattattgcagttgaatttgattcaaccaaacagtgatttgagatcatagaatactgacagctaaggcaaaaagacagccatattaaattagatgtgatt

SEQ ID NO: 126930 - DNA, 1031 bp, Homo sapiens
ccatttcaccacacagaataataaaacacatttaatttgagatataatggaactaagatttttactccttcatcgaagacattcttaaataaaacagactttgcttgctttaatgacagtgcatggcagtgaagagtacaatgactcagtaaagtttggtgccaaggctttgatttatgctaagctgctagcagttctcccaccagtgctttcatatcatctgtgaaaatattaacatatcaaaaagggtaaataacattttaatatcattatgaaaataattttgccctcatgaactcctgaaaggttctcatggatctcaggagtccattgagttcactttaagagccactgctttaaagaaaacagcaacacacagtattctgcatcttgtcaccctctgtcaccaagtatctaccttagtctttgcacacaaattgcaatcatcatttagtttactacttgagtaattttggaagatggtatttaaaacacctttcttcaacttccttagatacttctacttttaacagggttcctctctaaaatgtcattagcaggtgtttatattttcatggaaattttcctgtgacagatagactcacacatgtacaaaccatcatttgctgaggccattaagttaattttccttaatctatttgtttcaaagaattttagtatattcattttaccagtatactctttagttctgaaagggtcagaataatgacattctcacttgtggttctgaaatgcatttcagttcacaaagcacttcctcatgcatcatctcttttggccatcacaccagtcctgtgagatttgcagggcagtgtcattatctccacgagtaaacccaggttgagagagggggaagtgggttgcctaaggtctaaggccacacagtgagtggcagaacagaattgagatgctctgttttctatattcagtttcctcttgtgtatagtgttctttcttttcttgtaacaatttaaaaggcattccatattttttccctagtctatgtagct

SEQ ID NO: 126931 - DNA, 1859 bp, Homo sapiens
ccttatagtcgaagcttaaaagaaaacagggagatatcctataatatattctacttccatctttccttattgatttctgggaacatgtattgattggaagaagaagtttgggaatctcttaaagtaatacttcgggtagcaaatgaaatatagaaaatggagaaggagataaaaaagtagtggtaatggaagaatgcagaatagtgtgagaaatgtgtgtgggtgtaaatggagcactgtatggctgtttgcaaggtgaaaccaggtggtggtgtgtggcaagtgcagcattctgtgctaccaatgccagagaatgatatctggaaccattgaaagccccttacgcagcttcaacccaccccttcttattcacctgagcaatttatttgttttcattctttctcttatccattgccttctttctttatcttgtttcctcctatttcatcagggatatgaatccaccaatcacttcccctttttactggcatttccagtcttgtcttctccactgattattatcttgaacaataaatttgctcatgtattttctatgtagctctctccattctgtcccttcgtattattgctatattacttccatttccttctagtcagtttaccaaaaagcatgttacaattattgtagactcaaagatactgtacctgataatgccctttttggggaaatgaatcaaagatcataatcaacactttgtttttgttgttattgttgccagagttaaaatttatttcttatttcacttcacaattagctataattatgttgctataaagagaaattttacattgtctcccccattactgtggtagttgaattgatcatcatttagcagaaaatcaaagagcgcaatgatcaagcagtagaatgacctgttgctagctctcagaggtttaattccccagaagcagacattgagatgaggatttgtttgcaagtaatttattaagaaagtgagaaacagccaggcatggtggctcacatctgtaatcctggtactttgggaggctgaggcaggaggatcgcttgagccagaagttcaagaccagcgtgggcaacatagtgagaccttgtctgtaaaataaaaaaataaaatagtaaaataaaatgtagctgggcatggtggcacatggctgtagtccaagctaccgaggaggctgagaaaggaggattggttgaatctgggaggtcgagactgcagtgagccgtgattgtgccatacttcagcctcggtaacagagcaagaccctgtctcagaaaacaaaacaaaacaaaaaaaggagtaatcaattagggagtgacagaatgggaaaaaaagggaatggggaagaagaggtatgattttaggcaaagtcttttcaaggatagctttagtctaaaccttcatgagagctctggagtatgaattatttgtctgttcaaacccaaattaaatgaggtagatgttcatacttccatccctaccagccactgcctaaggatgataaaggggtacaggaggggagatgcttatccccagttagggggatatataaagtgactatagtagcctgagggcataagaacacttaacaagtcttatcttttggaagcaaaatcacactgaaacaacatgcaagtcagaatatgtattgtaatgtgcacaagtcttcttaaggaaccatgtgatggaattggataatttactttgcactccatcactccacttaaccacccattcttttttttttttttttttggctctatctcaccattttgactggaaaagggatgagtattttatagcacttttgatggataattgtgacattcttctttgatattatattgatattat

SEQ ID NO: 126932 - DNA, 1050 bp, Homo sapiens
acacacacacacacgcattgctagtgtttattgaattacctctttgcaccatgtttaactgttacttcttggtcatttttgaaaggtataaattattttacctttgtttttacatatatccattaatttttttttataacattgtaaaatacctttcacctaagatggtggggaccctttgttaactccaagaagatggatagccataggatatgctatatttaaatgtagttcttctgcaaataactatagaatatttatgcatttttgacaaagtttcagaggcataaatgctgccattgcccaatagaggaaatttcatacaaaactcaccaaactttatgtatggtcagtttctcggaatggatacttctgcagactagttccccagtcttcttgcacttctaacacacacttgagagatgggacctgtgggtctgtactggtcttggccatctggtctcaaggaccatcaggaagctgtcttggttcttgtgcttagaactcagtgtttcctggcttttgggaggtatttccagatttgacacctttgattttttttaataaaagtttttctttttgagtctcatttttttttaatgagaacctattcatctcctaatacaaattgatagaaatagacttgactttatcaagttaagtacttgagccagacacatgttgtattccagcctgtgttccaagtgctcctgtccccaccttgacagcctttcaggtttgtggcttttatttatatgctattgtcttgtggttagtaccttttcttgaatatagaggagtagaattattttgtgtttcagaaatgtttgttttaaacatgaacataaacgtatttcaacagcagataatctcttaatgagggaattcttggttggcccatctgaagtcaatcctgacattatttctgatagatttctgtggcctatggctaggtttcaatggaatcggttctgaaatcactacatgctgtcgaaatcaaaacttgtcatattaggttctgtaacaaatacaactaatgagacaacagat

SEQ ID NO: 126933 - DNA, 1669 bp, Homo sapiens
agtttgtcaattaccactgattttatatgactatttcctcaaattctgatttccttttaaatgttagagagtattttgaaccttacattattacaaaaagcaatttgaggtctttatttcagggagtgaaatgtgacattttaaaaatgagatcacatttatttatatacaaaaagtatttaaccatcaattatataaggccatttttactaataaactattattttagagattgtatttattaatcatgctgtaaagggattactcattttaaaaagtggctaacttatgtgcatgcattgaatgtaatctacgttcattggataaagtgtacattcatctagcagacatttattgagcatctaagatgagttaggttcagtgttttcactgggaatatggaggaattctgacctgaagcagtttatagtctagtaggggtaggtggtagcctggcaaagcagaaattgcaatacagtgagatcgaagcaagatgcattgggagtacatcgtaccagtattaatgctgcctgaggaggaaggtaactcctttccagaggagctgactctgagaaggggattgcagacacagagaatgggtaaatgttcagaattgttggcttacagtgtgtatgaattagaatggtaggtggggaggtaaaggtagcagagataagctatagggttaatatttatcttgtaaacaaggagaaactgtagagtgaatgatctaatcacattttcattttaatactgtcattctgaaaacatcctatgcgatggaatggagaaggaagtgatgactcagagtgtgaagagtgaagagttcttagtatttgttattggttaattctcttttgatttcaggggtcaaaaatctaatgtaacttgggctaacaaaaaagaagttaacaaaagaatttattggttcagaaaattgaaaatttccatgtcagatctagctaacctcaggactggcctttgcagtccatctgtggtatctgtgttgtgttacagagttgggttcattgcaggttatgactcctgagttcacacatacctaaatgtttttcttaaaaaaaaaaaaaaaaccctccaaaatgaatcaatatagtgaactaattattaatgtctgtgtgatttgtgggctatttttattggtgtttgtgaattctttattctcctaattgaatattcttcattctatacatgagtctaagctgcttctgggagaatattataaattttttgggaaaaattctatatcctgacttttctttaaagttcataaaaacaataattgtgttgaagaatcatatgtaaattcatgtgacttttctacacttaaaattgtggagaaaatacagaaatactaaatatttattaatctagtacacatttattaaacatttcttttaaattatgagtgatactaagtctctatgtatgaaagtaattttgtttaatagggcttttatacttgagaactcctttcctgttttccagtttgaattgtcttaagattcagattgacttcctagatagtgcactgaaatttggcggtgatttttatagaaaaaaattattatacttgacagttgtatcatatgatattccctgagaaaatctcagaagagtgtttcagttatattcgaattgcctacactta

SEQ ID NO: 126934 - DNA, 3959 bp, Homo sapiens
tatttatcttgaaggctattttactttagagctcatgagctaaggtgactgaccttgcattattctctgaataaagcctctagatcttaaacagcagattggactaattgaaccctccgaatgatggtagaaattgtcctaaagtttttttttttaaagaaacagattatatacatttataaggtgtaatttctatgattataggtaaatattatagtcatagtaatgctttattttaaattatttttgcttaatttcttctattttgtagtttttaaatcttgcctaaatatatggttattaaaattaatattaaccattaatattaacaaggtaatatatagtttatcttagttatactatgttaaatattgccaaaaaataactttttgaaagaaacaaattataaaatcattcttatttaacttatttcagatgaaggtaaaatacatgtgaatatggcatgctagtttgtaatcttccagtaaatcaaaacaggacacaatacacaattttatgaattattcttataggacatcaaattgaattaattactcagtatctaaggcacaggatagcattgttttcttcttccttttactgaattatcttttctaattttaattagcttcaaagcaaggaattatgaatttagtatttattttgagccttctatgtgtgagacattatatctgggtgtggaaatatttattccatcaactaggatatttaagtttcttcttttgggtattatttgttcttttttgtccatttgaaaattattatatattccgtgttatggaaacgtcactgttgtaagttcttactttctattcccagagaatggccatttaattgtattagaatgtttcagcctagatggggttacaggaacatgatttgccttcctaccagaaacaaacaaaaaagaccagatacaccgtatgaaagggagtcttcagacattaaatatcagacagttcaggacagtgatcctttaagaatggcaacaaatgaggtaagccctttgattgtaccagctgattgccttgagaggtttttccagggcccagcacagggaggagaacccaggtgaatgttggtagtctagggttgacgagacagagttgggagtctggggaagtccaggtggctagagtttgcaggacagagtactgactggagagaagatgcacagagagaaaactatatagatatgcagaaggtcctcgtacagccctcagctgaggacccatcagtatgtggggaacctacaaaaagctggagaaataatcacctcaaaagaacacagggaatagttttcagaatttatacagggctgggaattattcatgttcccatatcagccagagtggaaaacctcataattcacgaagcatcagatagaataaccagaagaatattgcctagtagtggagcatattcacccctagattaaaggctgtgccagttttgcctaacaaagtttaaaagccaacttctataggatttgctgttcccaagtaacttaactgttttctcaaacaaagctcaaggatgttcctcaggacacaagaatatgtagcaccccaaaaggtgaaaatcatgtttggaagctagtaaaaatattacttttaatgcaaagacacaggaaaccatgacacaaaatgaggagaacatcaatcagttaaaaaaaaacacaaatgagagaaatagtagacaaagcattaaaatagttattgtcacatttaatttgttcaaaaaaggagaggaaagattgaagacattaagcacagaaatggaagatgtgaaaaagacttaaatctatattctagagatgaatgttacaggacctaagatgaaaaaaatttgctggatggatctgtgacagtttagtctacaaagaaagaaattaatgaggtgacatcataacaatagaaactacccaaaatgaaccacagagagaataatggctaatttaaaaaagagacaatcagtgaactgtaggacaatttcaagtgcctcagtattcatgttattcaagttgctgaagaggaggaaagtgggagagttttagactgaaatatttgaaaaaatggtgggaaagaaaattgataaaaactataaactcagaagaaactaaaaaaaccccaagcacaagaagatgatacagaggcatattataatcaaactaataccagtgataatgagaaaatcttaaaagaaggccaaaaaaaagagacgtatcaggtacagagtaacaaagatggttaagagtctttgctttggaaacagtgcaacacagaggcagtagaataacatttttaaactatagaaagagagaaattatcaatgtggaatttttttttttttttagacggagtttcgctcttgttacccaggctggaatgcaatggcatgatctcagctcaccgcgacctccacttcccaagttcaagcgattctcctgtctcagcctcccgagtagcggggattacaggtgcccaccaccacgctcggctaatttagtatttttagtagagactgggtttctccatgttggtcaggctggccttgaactcctgacctcaggtgatctgcctgcctcagcctcccaaagtgctggtattacaggcgtgagccactgtccaaggccatcaatgtggaattttatacctagtgaaaatatctttcaaaaataaagatgaaataaaaacttgtttagatgaagtaaagatgaaaaaattagtcactggcagacctgtactgaaagatatgctaaaaaaagttcttcagacagaagaaaaatgttatcagttagaaacctggactatataaaggaataaagaacactgaaaatggtaattttctccccttacagactcttttaaagttatttgactgtttaagtaaaaaataataaaaatatattgtggacttcgtgacatatatagaagtaaaattataatagtagtagtgcaaaggctgggagagggggaaatgtaagaatactgatgtaaatttcttatactatatatgatgtggtataatattacctgaagacagttcatgataaattaaaggtataaactgtgaaccaaccactaaaacaacagttaaaagaattatagctaataagtcaagaaagcagataaagtggaataatataaaatatgcagttaatccaagggaggcagaaaaagagagaaaagaggctgagggcagataaaagcagtagaaaacaagtagcaaaagggtagattcaaatccaatcatgattgtatatatccagggaaaaaagagattatctcataatgatagaagggttagttcattaagaaggcataaaacccagcatttatgtacctaataacagcatcaaaatacttgaagcaaaatctgaaagaacttcaaggagcaagacacaaatccagtttttgttggagatttaaatattccttcttagtaattgatggacagagtagacagaaatagatacagacatagaagacctgaacaaccctatgaatctggtgtaactggcatctgtatcatacaaagaatattatctgagtttaatgaaattaaattaggtatctataacagaaagacttgtagaaaatctccacatatttgtcaattaaatgactctcctctaaataacccataggttaagaaagaaataaaagaagaattaaggaaatactgaactgaactgaatgaaaatgaaaacacatcaagatttgtgggatgtagctaaaacaatacttaaagggaaatttatagcaccatttgtattataatgaccatccaactacattacttaaagttacttgttaatgggttgtctttttgtatattccaaacaatttctgcttgtggggagaaattttagctacagaataaacatgatatttactttgcgagatggtgctacaaaacaattgatgtgtaaaaat

SEQ ID NO: 126935 - DNA, 1036 bp, Homo sapiens
ttcattatagaacacctttaaaacacttttaaaacaagaccttttaaaaagaacaacaggaattacaaaataccacttaattacctttagcaagaacacttaggcttgctcattgggcagattaaatagtctattgaaacaaaatcagttgatttggctcatttttccccctacattttttccagtgattgctgctctcatctttttgccaaattgatcagagttggcagtaaaacacaggcagttgaaaatgtgggagaagattaagttttctggattgcataaaggatcatcagagataaagagattacaaagaattggtcttatcaggttgatattctgcatcatgtggttgtctgttttctatcataatcaactagacctaaattaagaacccttgcctttagagagtgttatttttgttttccaaattttggtaaatatgatagattgaaccaaggaggtgtttataattcgtgcacattttatctttgtcttgtcattaagtatgagagcattaaattcaaattttatcgaaagtttgtgaaaattaacaatggtttgttgttaattcgtttgaatagactttgttgaaattagggcctaggagatggaatgctggcttttgaggcttgatcataaagaatattatatgtgacatatgtgtaaggaaaataagagaaagaggtgatttcagggaaagtaaagtagtagttactcatagcgatagtttggataacaaattaactaatgttgaacaggatgtggatttgaactcattattcaaattgacagagacctggaattagttcagatttacatatgagaaagatggtctgttacaacaaaaacaatgtcctattcagagtggggcagagatattggaaaggttcctgtttctttgggaatggttttcactattggtgaaatagtgaaagtgaaagctactattattgcaattatggcaagaacattacatactttatcatttaattttcagtatcattctgaaaggcagttgttgttatgcctgtct

SEQ ID NO: 126936 - DNA, 1049 bp, Homo sapiens
tttcagatgctttaaatatatgtaatcttattgataatattcagaagcattttaaattaatagttttttgaaagtaagatttaaacgtaaattaagcacaattgaaacataatacaatatttaccattcgaacagtaactaagttactgttatcttaaaggttttccgagaaggatacggccatgacagtgtagcatttacatgtgttctgagtgttcatttattataactgtaccacctgtagttttagatgctctgtggtttgcattttaaaagcatttggtgtttatagcacctgtctttctaagacatggcctgactaggtctgatgtctagtgtgatgttaaaaaaatcacattaagtgtgacttaagtatgggggttagagtgggaatgaaaatgaaaatgtttaatttttctgacaccagactagtatgcttcagggagaaatttagcaaaggtaattgggcagactaccaatataaattaggtcaatagcctagacctacaagtgctagcctttataacatacttgaccgcaacaaaaatctgttaaaagaaaatgggactgtccctaacatgaagtaatgggactgtcgtagatacaacacatggtacactttttccttttaattaccatatgagaacaaaatcagtttttgcagctggttcttcttcgttttatttgccttgactacatctcacaccgaaggggtttgaaacatgacagacaacaggtgtgaatatgtatctaataattgactgcagtttctgttcttcctttaaaaattgactgtgttgtaaacatctctaacactaataaagacagcctattttttcttatgtgtaaaatgccttctaagccatggttagattgtatgtctgaatcaaacttaaataagtcaagttattaaattactctttttagaagaacagtttttaaaggaatgatgagtttctgtcagtttaagtgcagctggcaagcagccattcattatagcctagtgtgacattgatttttgactagaagaaatggaaacatagcagtag

SEQ ID NO: 126937 - DNA, 1872 bp, Homo sapiens
taattctacaagagttttagatagagaattagtatttattgagaactcttttagcataataaatattttataattcaatatataataaatacttcacattcagaatatgtatcttgggaatgattgaatggctggtgagcaaggcaacgtcatgccatacatttaaaaattcctgttgtttcttctcaaaacaactactctttagttggcataaaaataataagaattttgttttagtaacaatatttttcaccttcagacatgtggttcacaagaaaagtgcacaaaaagagatttgtgatatgacagaaaaaaatattttaagatctcctttttcttccctggtaaaatacaacttagtaaatgtaacaaattaagaaataccagtgagttagagaacaattggacaataattgtttctaaatagagtcattatgaaagaaaatagtatgtcggagtccaaaatcttaattagttgaggaatatttataaatttatagacaaattctctgttgtttgtgtttttagcctcccagaatttctcttttttaatcattatcatgatctagttgtgccataggctttggttgaattggaggagtatttagagtggtcatctgagatgtccagcattcagtgatgcacgaggccttcagaatgaagaaggattgtaataaagctcccagcaagctcgtttgtgtgctatgaatagctcactaggtgaaatacagccgatgcaaaaagtacgtgggtggttcaggtgaatgaattgtattttgtagctcattggatttttttccccactccaaaaactgctttcccactgttcctttaactgcgcccctggatcgtgaagtgttgtgatgtagttctcttttgtgctctggagttggagctatgaaaggcagattcatttattgtttagttgaatcaaaatgactgcaattccacaaacaaattggacttcagttaggagtgctttgtcataaataacgttggaagagattggattttctcctagctgatatacttctgctttacattaaaatcggcgtctaaaagggactgatttatgactgaactgactgatcactgagcaacacacacctgtccttgttctgctttgtttttgctatctctattttcctaaagcatattcaggaaaagtttatggtaagggaaactaatattctattttctgaattattgttttcattttaaccttcattaaaaaaatcacttctatgatgcaaaactcagtgaataattcttcataatctagaaagaaaacctatttcacatattggttaaaggcattttccatggttgggtcaggtgaatcatatttttcacgtataatgttaggacattttaaactttaacaacatgttttgctacaggctgcaaataccgtagcaatacctgcaaatatctcttttcattgactgtaaaaacttttttttcccactgtaatgtatttacttcattttgtttcaagttactcagttctataaatcatccagagacagagaaaatctggtaatttcttccttggtggaaaagtgtatatataaaatatatatacacactttatacttatataatatatatatacaatttatacttatgtataaaagttacagcacaatatacatttggctagacccttggtacttaactacaaatgccataacaagttgcattttgttttcttgagtcaaacaattctgtgtggcagttacattgtatcagtaagaatcatttcatgtgtagggttgtccttgccaagtaggttaggttggcattaattttgttaagcattttatttggtcttgtttttgtaagctctagagccagaatttgcatctgtct

SEQ ID NO: 126938 - DNA, 2857 bp, Homo sapiens
agatttgcatatattcaaagacttttaggatcattccagagtttttaggatcattccagagtgcttaggatcattcattttactttgaaatcagtaagaacaaaacaaaacaaaacaaaacaaaagacaagaaacagacaagcaactttacattttaagtcttttctctatcattcatagccaccaaagcagagtttttaaagcctttatcactcagaaatctcattcagcgagggtgttttggggaaaaaaatgcttagctcaaataagaggtaacttgatgcacaaattttatttcttagtgaattggttttaaatggccttgcactatgtggagttagataatttccataaatattatgtttggcacttcagtgctttgaaaaagcacatttatatagttgtcgttattgaacaatcagtatgtttcacctaagaattctgatatctggatttgtttaaatgttagatcatgccacgctggcctcacacctcttcctggccatggttttctggggctcttcagttactttcattacttgcctggctttttgtaggcgtttgactttggcctaaataattctctgactttagatcaagttctatgtggcagtctttgagagccttaacacatattgatacatattttgtgatttggtagcaaatcttgacctcaattagtttgcatgttctttctgcaacacacaccttatactctcctgattaaaacacttagaggaatttcctcctcagaccattggtgttacttttcatgagctcagccttgcctccctctcaagacttttattttctggcagtcttcacagccaaatagaatcatatgcagcctcctttcacctctgagccttgtatgtcatgttacctgaaattccttcccaccctggtttgtctggtttacagatcctctacctcttccctgacagccctccctaatgctcactcttctgaggcatgcacatccctcccaaatgtcagctccttgagtcctggcagctactgtcttttgctctgctgtacacttaacactgcacctgtgagtattcacccagtaaatagccattatggacattttttgtgttcatcattgatataattctctgataacactgaagttttagtagtttgtgtttggagaaatatttaattttaatggaggaataacagatgttctcccccttaaatactccaggtgagacctttatcatgttaaattttattggcttacaataagtcttttccatatttcatttctcaccatattttatatttatgataaagttggaaacacttgtagaaattagaagaagcgtaggcaatattggtaaaatctatgaacattttataactctaatgccatttttacttttaaacaaataatttgatatagatacaaacagagtcatagttcttataaattacattactcttataaatgacattgtcagttttggaaccatgtaacttttaaatgtaatgttgagtaaaactctaaggttttagaatatgcaatagaaaatgtcattttctaatgtttgggtcttgaaaatcaagttcatgcctctgaaacaatatcaaaagatatgtttgcataattatttgcatattatgccagtgttactaaccttaagtagattcttcacaagttctcaaaaatagaattttaatttaaatgctcaaggaccccgatttagtgttggcttcaaacctaatgcagtcttggagccacgtattattcatcagaggctggtattctttttctcctctgcttcccattccaaattattccttgtcacatttcctttttccaatcacattgtccagtagactttctcttctccaatcatatgacagctatttaaattatacttatgacaatatttagggtacttgtttatctgccataataatttgtatctgttgaatccattttccaggtctcgttttatactgcctaattcagaactttttccattggcatatttctaatagattactccaatacacacttaaacatttgtgtgggtgcttgcatgtgcatgctacgtacatacactttgagtttgtttccgcttgttggttgatgatgcctacatttcatacataccatcagctgaatactccatgcatcatttgaaatcactcaaaagggaaggtatcctgcatgtgaactttgaaaagaaggggacttttttttttttatgctcccaaatgacctattttgagaagtgatgatttggtaatattcagagaaatgctttctttttacttggttaaagcaaaatctgtttctttttttctgttcatgtcaattttcagtgacatgagaattttttttcaggagagagtttattaggtaaacctttagacaagtttaatattagggaataaaactcgtgaagatagaggtgacacaatgacattatgtttttttccccctcaacttttatttttagttctggggggtgtgcagtttgttacatagataaatgtgtgccatgatggtttgctgcacagataaacccatcacccaggtattaggcccagcatccattagctattcttctgatactctccctcccccatcctcatcaatgggccccagttcgtggtattcccctccctgtgttcatgtgttctcatcattcagctcccatttataaataagaacacgtggtgtttggttttctgttcctgtgttagtttgctaaggataactgcttccagctccatccatgtccctgcaaaggaaattatgtttttcctttttatggctgcatagtattccatgtaccacattttctttatccagtctgtcattgatgggcatttgggctga

SEQ ID NO: 126939 - DNA, 3379 bp, Homo sapiens
aaacctgcactttatgcacatgtaccctagaacttaaagtatagtaattaaaaaaaagaaaaagaaaaaggtgtttaaaagatgtataggccgtatattttgtaccagtgtaatcattcactgtgttgtttaagcaaataagctagtttaagcttataatgagtttttaatttatagagaaacgaatcagtagggcaaagaaaggtgcaaaatcttggaagaatttgccttgtataataatggaagactcacatgagtaaaatccctactgaactagcttttgttggactaaagaatgcaattatattaaaaattaatacttcagtctaatacaaatccaatgctgcctgaattattatgtgccaaattaggttgctataaacaataacaaaatgggtgattgtgtaaatgaaagcatggagttatttaaacttgcaattgcatgtttaatgagatgcattgaaagcggaaaatgtttaatttagtaacgggtgacctgaatcagtctgtcctacagaatgataggcttttggactaattttcagttaaaacacagtaattgaataacacccctattaatatgtaatatggactatttcatattattcatttttattaagatggctcttttagtatgacagctgtcagttggaattattatgagttctgtgtgaaacactaccaaccaagttaagcctttgttggatttttctcttttagaatctgagaaaacttgttgttatcttctggttagattatattaagatcataacctgataaatgtgaaagagaaaaacttgggctgtggcatttggctggaatataattgtgtaggtctactctacttttatttattgtaggtagtttaaggtgcttacttagaaaaatgatggactcatcatctttagaaagatctctggagttgattatctacccagatgttatttagtcaagtacctgaaactgcttcttgcctttgcgttttttgtcttttagagtcaatacaattcaggtattgtgaaaatgttttttctcagagggtgtgaattcacagtatatgataatttaatgtgtcagttcagggcagagagttaaattattgaagagccaccttgattccctttggggtactcaatcttatgattatcctgtggtacagaaaaacccttttactcgatttaaaagaacttttctctctaggcagcatggtcctctatgaacaatggacatatagtgaaaatctgtggtgagaatgagaagctgcaagcatcttttaacaatgaaactgcttatttgtaaatgtggagtacagtttactgtgttaatccttcttcaatgagatatttcactgacatattctattcatttggagttggtttccaaattgaattagaagaagaaaatgacatgtattatcttacacagtgaaccacagttatcagtgttatatgtagaaaataatgttagatttaaacattatttttcaaataaaaaattgttatagttcatatgtacatcatttgcagatctagaacttgaaatctgtttggtttaaaagcaaaacaaagtttaacctttatgtatgccattttgtaactgtgtaactttggtaaataaatgtttttgtatgaataaacctaattagcatagcactttaaaacaaggaaaaagaacatttttttaaaatgggcttgctagaatactatctaaatcaaacaactaatcttttgttttaaataaaaatacttcccaaagaaataatatacaatgtatagtataaatctctatgcttcattttaattttttgagagataattatgatttattgtttggaataaactgctcattaaatatctttgaaaagttttttaaaaagcatttgttgtttccagaaacattccttggtaattacagctttgaacaatagaatacagacaaaactactatgtgggagttattatctggttagaagcattgtatagatagataaccttttcttggaaagaattataaagcttttggtttggacaatagttattaaaggacactgtactctgagtgttccaagaaagcttgtgttaactaaagcatgagatttggaaagagtagacctcagttcaagtcctgactcatctatccctagctcttttatctttcagatcctggatggcccagtcacctttcctgaacttcattttcctcttctgtaaacttgtgacataatgtgtaacttacaggattttattagggtaaaatgatacatgcatatgaaagtttaaaattttaaactataataattatagtctaattcattctcttattatagtgtataattaacaaaaacttccacttgttactaggtggagcttctctgtaaaaaaaaatactataatgaatcattttaagtggagcatgtttttgtaaaatggatgatcatcaccctcctttctctcactacctctcccaccattcttttgtttcacatattttatactgtgaaattttcaaattgcagctgtcaatgttgtgcttgtgatgtatttgagaatgcattctatcctcatggaaaagaacacattcaatttgaacttcaagtttgttagttttctttaattatgatatttgcagtcattcttagaagagatatttgtctccaaggattggtgcacagtttgatttctgtgggaagatatgctttaaaatatgtatcggtgggggttgttaaaatagtgggattggggtggaggtggaattgctatttaactggcagtttcatcagtatagaaaaccttgatgtattcatgtagattatagattaaaaatttaaagtagttatatttggttataggatcgtggataattaaacatttttctgcattatgttaattacatttgagagttacatatatgtttgctatgcaaaagttaatgttgataaagagctgaagatttttcccagaaacaatatacagttgacctttgaacaacacaggttggaactgcacagttatatgtggctttgttttcaactagacatggatttgagggatacaaaacttgtgttacagagggctgactttttttatatgagggttctgcaggacgactctgggacttatgttgtgcagatttagttatatgtgggtggtcctggaaccaatctctcatgtatacagagggacaactatacatgctaaataagcacatatatgtgacttgatttttttctttttacttataaaatgttaatacattgggttcatcaattacccaataaactaggtatcagatattctgacagtctgccccagatttaaaacagcactttgagtacaatattaggtagcgaaatatcctatttcagagagttttcatccat

SEQ ID NO: 126940 - DNA, 1027 bp, Homo sapiens
gtgttaactagagaagggcatcttttttactgagattcatagtgcttggcttcctggaattttcattcctgattccaaatatccctcatttcaaacatcatgtttttttatcctcatgtatttacgctgtaatcaagaatagtaagaattgccattttaaaattatcatttatctactgatttaatttaagctggtctgtttttattaaattcacaaatgggaagcttgataagacaataaaaaattctctattgtcacgtatttatagtataattttatgtctgtaatttttaatacctgtttcgattgtatactcctttagagaaagtttcttcctcatatttcacatgaaaatgacttattcttacatattttctaaagtaccacaacccagtatgattaaattgttttgcaaaatagaattctgaagtgtataagaatattgtcatgaaaatataggtagagaccttcacattaccttataggtgccatcccaaaattttgaatctactttgttgttttagttaacatcatctctcttgattaggtctaaaaatgaattaccttgtaccatattctgctctgtagtgaactggccaaggggacaatgtaccttaatcccacttttgtagaattcaaattacagtttacatacagtcatgagccacataatgatgtttcagttaacaatgagctgcatgtatgatggtggtcccgtaagattaaaatggagctgaaatattcctattgcctagtgaagtcatagctgtcatagcattgtagcacaatgcactactcgtgtgtttgtggcgatgctggtgtaaacaaacctactgtgctgccagttgtataaaagtctagcccaaacaattttgtacattacgtaatccttgatcatgataacaaataactgttactggcttatgtatttactatgctatacttttaatcattttagagtgtagttcttctacttaaacaacaacaaaagttaatagtaaaacagccttaggcaggtccttcagt

SEQ ID NO: 126941 - DNA, 1060 bp, Homo sapiens
tccagcatttttctcttttatacttatccctatctgaaatactattatattatttatttatcttgtttatagattgtttgtgccattagaatataagttcctgtgggatgagatttttgtttactgttttattcttagtgccttgaatgatacccagccatagtaggttctactgtgtatttattgattgaattcttgtttttgcatccctactaccactaccttggctgaggacctcatcatttctcacttaaatttccactgtcatctcctaacagactactggtatattgtttccaacatgatctttttaaaagccaaatctggtcatatctctctctccagctttatattcttcagtctatccccataaccttcagggtaaaatcatatttcttagcatgacacccaagtcgttgcttacctttctgacctcaatgcagtccctttctcacttatacatatttgtctttcccccgaaggtcttaatgcattttgtttctgaatttttatgcctgaaatggcctatctgaatcatctgaataactagctccttgatgatttagcctaaaacgatttcctgatgtttcactttattttctttagtctggattaagaattctcctgtagaaaccagtacctctgtctgctatatcatttacatgttatgttatacttattctagaaagtatatgtcttattcactagacaccagccttcctgagttctgttcaagacattggtaatttagttcatagtagatcttcacaatgtgctgaatgaatgaagccctgaatcagagagtaaagggaatttagactggtaatagctttttaaaaaatatttctgacttggtcatacaagacaaagaagaataattccttaattagttttcaccaatttcatttgtactatacacaaagaacaacaactaagtcagtatttcagtgggctctggtcagggagggaaatcatgttgtggggaggtgttggtgaatatacggggaatattatgaggttcatttacctcagagagctaaactatgatgagagaactttc

SEQ ID NO: 126942 - DNA, 1052 bp, Homo sapiens
tgttttctttctctttctttctcatatttttagagctttcattatcctgcccctagtctaattttcaaaaaatcaaacctggatcatctcactctgctactctgaaatcttgagcaatttctaagcagacctttcttgggcctgtgcagactcagtgcttctgcccttctgggtctttgcacattgtgttttcttttaggaatgttcttctaccctttgaaaccctagccatgtttcacagtccatctcaaataatgtcccttccatgaaatttttttctgattcctttgtccttgctcaccccatccttcaatccttgatgataagaattggtctctaaagcatattttcattagtacagctcctgacaaattatcactgctccaaaatggtttgttaaatcaaattgatatttatcagattccattgagaatcagagatctcaacacaaagtagagattttgatttgggttcaatatactgctcatgaaagtgcagctgaggcttaggagaaaaagtgtttaatagaatacatttccaacagaaaaaggcttttagtaatatagcctattctatgttcagagacagttggagagaatgtactcacgtgaatttatgtgggcagctggctgtcagctgaaccatgtgggaaggaatctgccttaaactgttttctgctaaaataagcaacattttagaaatgttgtctatctctttagattagtactaaattatcccacagctctttgaagctcatcaagttgataattgttttcaatgatctgtaaacaagcttgcttgcttgctttaaacagttaactcttgcttatttgcaagatgcaggtaacaaagatgcaggtaaagatgaaggtaacaaaggattggaatttaatagggggaattcagtatatcagcgtcctttcccattggttcctgccctacagcatatcatgctgtacaactgtgggtaccaaaacttcacttctgggagatttagccctttatccaccctgagccacatttaccaatatgagaaaactgcttcttcaaca

SEQ ID NO: 126943 - DNA, 1084 bp, Homo sapiens
gcattgttttcctattgctgccaccacatagctgaagcctgttcctgggcaaaaccatgagctaggtgaagtttgtcttaagacaactcctgcctcccttttctatctctgctatccacaaaacatctaatactcttgagttccttccaccctgtgagacttcacacaatgttattgattggttgcatcctaatatcctactccttttagggatatcagctttttaaaagagaatgtcttggggggaataatatataacacatagagagataaatctctaatggtagaatttaaaacatcatggtggtgctgtgttgatgagtgagaaaattggggacagagacttttgtctaattctaaagtaaatgtatcagtgactgcttcctctgtttgttttgtgaagctggggttattatttataattagtgccaattaaaaaatgtcttgaattaccatacttaaatagatagcatacaggcatgaatgggccagaatttactacttcttctttgaaaaagatactctgtaatgatacagagaatgaaccgacactatttttatacaatgactcatgaactcatagacatgaaggaatgatcattgttccacatttcaatttgtggtctatcctggaataatattttaattaatccagcaaacacctttatggatgagaagtaatattacccctggagaatagtatatagaaaaaaagttaatataatctgaaagctcaaaaaagaaaaaaaatattacccctattaagtctattaaagattgggtcaaaagataattcaaggttaagaatgtcctccttagaagttgcccagtaaatcggtgagagaattgggagaagaaaatctgagcttctggcctcttagggcatggagtcactgtttcctttgaggccatgtttataatcacagtaagtgacctggggagactagcgctcctagcaatgaaacagatggcatgaagttcccatcaccctgcagctcatcagccataactgaccaactgggaaacaaatgttaaataataacaaattagggtatgtttaaataatgacattgaataaatctta

SEQ ID NO: 126944 - DNA, 1090 bp, Homo sapiens
caacaggaaggagaagtgccaagcaaaagggggaaaaaccccttataaaaccattagatctcatgagaactcactcactatcataagaacagcatgagggtaactgtccccgtgattaaattacctcccattgggtccctcccatggcatgtggtgattatgggaactacagttcaagatgagatttgggtggggacacagccaaaccatatcagtatgttaatggagtatataatagtcttagcgggagttatgtggtcctgagactgtactttacactaagattttgaaaaattgttcatgtaagataagtgctcattttagagatgccatgttagttggcataaacaaaatccaattgttatatattcctagaggaataaagaaaaaattctatgagtaagaaaataaaaacaaataaatacttgtgtttttattagatggaggtcttttcagttcaaacgtaccgttcataaattattgaaatataggcatcatgtagaaattactttgattaaactctttaccttggcaactactttccaaagggtaggatgctatttggtaagccttttaaagttggttttgacagctaatttgctcacataatagcataaagtttcttctcttctgcatcatatttttaaagaaatttttttctttatagtgaactctgataaatatataagataactgatggactacatctacataaaaaagaattcaagtcactaaatacaatactcatgacaaatagaatacatttagactcttcagtcctaggattgcattctgtcactatgttcaagaataatactgaacattattaaaaaatgaaaagcagatcagttgaaaaggtttctttaaggcactactgaagtttatcataatgggagacaggtaatgataactttcaagtaatggaatctgtgctacagtacattcacttgacacattttctttgaatgaaatagttttttatttttttaaataaaaggcaagccagctttctcttcccccatttaattagggcagctacattgtaggcactaggaaaagaaaatcggtgattttcaaatcagtggggagg

SEQ ID NO: 126945 - DNA, 1043 bp, Homo sapiens
attttcttcccatgaaagactttgaaaattatatgttgactgaagaaactgtaggcaagttattagtttccataaaatttaagaagtatatatagttcttaataaaaaatggagtttgttataaatcaaactgatgactttggtatttgcatcctctcagtattaagatcaaacctacttttatttatatccttttcattccttccctttatgccactatgctccagccaaacataattattaattccagaaatattccatgtaatatttgtggttttggctatgattttgcttgagccttgaatgttcctaaccgtaacctctgtatatccagaacttaagaccccttcagaccttgctccctcgggaagtgttccttcatcaggtggaatgaatgtcccctatctctgaatctcacaatattgcacgtgcacctccctgcatcctcaaggtagaagtttgtatgctttgttcatgatgaccccatacccatggcaggataactgttgttctatatccggccacttcctttattttagagtttattattatgtatgatgtctagttttccatatttttcctgttaggctatgagctcatggtaacctccttattatgtcaaataaggctacccatgatctgatccctgtctttctcgtgcagcccaaaatttccactgctttgggctttatacctcagtgttccagtaatgtttcggcattgctgaggtatgtatatattttttttttgagatggagtcttattctgatgcccaggctggaatgcattggcatgatctcggctcactgcaacctccgcctcctgggtacaagcgattcccctgcctcagcctcccaagtagctgggattacagatgcccgccaccatgcccagtgaatttttgtattttagtagagatggggtttcaccatgttggccaggctggtcttgaactcctgacctcaagtggtttgcccgcctccaccttccaaagtgctgagattacaggatgctgagctatttttaatttctggactttgatc

SEQ ID NO: 126946 - DNA, 1030 bp, Homo sapiens
tcagtgcaatccctataaaattgtatgttaaaacttaattgtgttaccttgtgaataactcatgcacacctcccacactgaataagttgtatctgatttgttagaagtgaattttgtattattacattttcagtataattactgtctttccttcaccagtcccccacaactgtttttggagtgtgaattacttgtaggaagtagcccaagtatagaaatgctagttgggggaacagtaattctggttcaaaaccattaggaattcaattcagaacataaactttctttttaacaagctaattctcctcggaaatatttgagtttgttggtagaaatgtttgtgtgagagtgctttgctgttatttgtagagaagcatttgggccaagtctcttatctcattagcgtccctccacctcttatgagtgggcaatgtggtctcattgacttacaggcactgacctgtattccttgtctctgtgagcagatcctctgggagcctccatgggattcctatgaatatgcacagtgcaattgcatttttctcaacatgaaagaattcaaatagtctggaaacttgccaactttaattctgacacatctcgagattagaatgtcaatgtaaatgaagaagcagagttgcgccttggtgctactgctttgggatcagagactggaagatgtcaagcagacagagctgtaaatgatcaagcgtgagtgctttacgtactgatggggaatgctggtatcttttcatgtctgcactctgttaattctctaaatcattatactattactctttctgttgggaataacaagaaaaactattctatctgtgttgcctgctcctgggacatgtgcctgtttgcttaaatacgggtctttgaatttaggattacaaaacagttgttcagaaaacaaccacagcagtatacttcagaaaacccttctctcttttgagatataactggattggtgattcatgtctgtttgttaattgcaataaagctgctattgtaatttagtatgctt

SEQ ID NO: 126947 - DNA, 2139 bp, Homo sapiens
cctttctttgttgttcttactcaatcagttcttatccaagcctttaaacacttattactaagtttttagtaagaggcgcctaatttgtctgtttctttagtctgtgcttttgggaagtcatcctgtacgttacttcctagaccaagtttctcggaagaccagttcatcatgacatttcctttttttgcttgccactaatgttttctaaaatgtttgatgtgtaccaaccactgttttaggtacagtggttctgtggtgaacaagctggacaaagtttctgcctccttgggccttctgttctgtgttgtgataggcagtaaacaagtatataaaggatattctcacactgtgataagggctttggtagtaataaatacaatcttgggataacttaagagaccaccttaggtaggtgaagagtgaagacatctgaggagatgttatgtgagctgagacctgaaggatgtgaatgagccatgcaggaactgggaaaaaaggacttcatgcagagggaacaacaaatgtgacgtcccgggaatagggaagagcttggcatgcttgtaaaacagaaaggaggctgtgacagctaaaacataatgatggatgagaataatgagacgatgtcgaagggaaagccagatcatttagggccttgctagagtatggcaaggagttttattttgtttcaagagtcctgtgaagtcattgatggtgttaagaggagtgagttgacttgtttttaaaagatagataaatcctggcttatttgtggagaatagtttgaataggcaagagtagaagtaggagactactaagaaggttgacactagtgggttagtcagcattaaagatggagaaaactggataggtcaagatagaggttggagatggagtcaatgcaatgaactgggcaatgcattaaaagcccgaaatgtttgttctctatatgctgcatcatggacaaaatcctttgtattttgaagtctctgtaacctggcctctttatatgtctgtttattttcctttacaccccaaggtccactttgttcttcaagcaaaagaggttataatatagtaattaaaagcacatgtttttgcacccgacttcctgagttcagatctttgctttgtcccttcctatgtgatatcaagtcagagaaatcttgccttagtttcatagatgacaaaactgtaaaattgagacaataatatttagaaaaagggttttcgtaattcacttaggatctcaagatggcatcctttggctagtagaaatagctttttagttgctgcctcagtcttcacatggtcttctctgtctttctgtttgtttctccttctcttcaacggacttgtctttggattagggcccatcttaattcacagtactcttatctcaagatcctaagttaattacaaaaaagctttttccaaataaggtcatatttacagtttctggaagttggcacttcggcatatcattttgggggttcactattcaacccattacagtgagctttttgaatcaggctaagaccacattagttccaactttgcttttattcttctgttttatacattttacccaattttgaaaatctggcgtaaaccttatcacttccataaaatagcctctgctgtataagatttgttattgggagataaaaagtaaaatcaaatacaataatgtttttcaatgtctgtgattatcaaaactgcacagaggacctgctctcaatagactacttaggttaattgatttttatggattatttgggtggttgaaattttttttttcatgtttcatgtcttaaggattgggaaaatatttcattctcatagaactgatgacttagaaaccattaaaatgaatatttctaattctgttaagaacaagatatcttaaaagttggattagaggtagagttttaaatctaatttctgggtacaagttgggtgtagatttcaaggaaatagttttgatcacagaaaactagattacttgtgtatgtggggaaggtagagcaagaacaatatatatgagctagaaaattataaaacatgttattaacaaaagatcatactttattaggttttcctttctcactttcagggcttaaagatgaaaaagtcttcagt

SEQ ID NO: 126948 - DNA, 1388 bp, Homo sapiens
gttgaggtgggaggattgcctgagcctgggaggttgaggcttcagtgagctgagattgtaccactgatctctagcctaggtgacagagagaccctgtcttaaaaagaaaaaaaaaatcaaaaaaagagttatttaaatttccaactattattgttgaatcatctgtttctcccttcatttctgtcagtttttatttcaaatatttaagtgcatcattattggctgcatatatgtttatcatttctataacttcctgattgattggctcttttatcattacaaaagttccctctttatttctgaactgggaatggggagtaagggagcagtcttggttcaaataccatactcttccctttcttaccgaatttccatttttgtaagaacagatatttcttcatttgctgtctgctctgaagatcatttgccttaaaaaatttgtttaaccagtttcacgggagaccagaacagtggagatcctcatactgtcatgccagaagttgatctgtcacgcttctttctataatttttttatgtgtgtgcttgttttccatcatagccaattagtcttataagctttatgaggctatgttttattaatgtttatttgtccactacctagcacaatgcttgaaatattgaaggtcagcaattcccaattattttctcttttggacacagctttgaatactgaaatttttcatggtacacttgaatgtattttaaaaaaagaaaataatactaaataacttagcaacaattatgctacatttattgctatagcttaacaacatttcatgatttctataaaaacaaccttagttgtcctaccattcctgtggtctctttccagtaccctgtcacctttagagaagagctgtttactgctctgactgatctgtctcttcactgtatgaaatcaaatttgtttgtttttggtgccacttgatgtcatttcctatccttgacttataacagagtacccccatttatataatgctggtgtacagaatgttggtacattttctgataaacgtggatgtaataatttaatgtcttcttagttttgacaaaaataactggttattttttgggtcagcttgggtgatggcacctctgtgaagtttactatgcctcccaagtgtctctgttgggtacttagtgtttggtcctgttggataaaataaaggttaaattatgaagtatataaagtatagacttcaaatgctatggaagtcttccatgtaacctaagctgtgaggtttgtgacagtttcttgacttgccacattttttagtctctgtatcctatgtatttaaggggttactaaattttattgcctttatcttctgcaagtttctaaatttcagtcctttctttctgtcttt

SEQ ID NO: 126949 - DNA, 1006 bp, Homo sapiens
gcccggctaattttttgtatttttagtagagacggggtttcaccgttttagccgggatggtctcgatctcctgacctcgtgatccgcccgcctcggcctcccaaagtgctgggattacaggcgtgagccaccgcgcccggccaatcatgtctctttttacaactttaatgatgtcttgttacccaaagtaaagcccaggccccttggagtagtgttcttgtttattaacaatctggccctaacctctttttccagctcgtcttcctcgactgccattctcctaccacataccctacatgctagccactcctaactgctcatcatttcagattttatcattcacttcaacacctccctgctttgggaagctgcttccatgtttttcattttctttctccctgtctttgccacataaattcatattcatctttcaagacctgcctaaatgttacttcctctgttctgtagttttcttctttcttgcattttcctaggtagaattagtgtcaactctatatgcacatttagctccttgctagctcccattcttgcatttaccacaatgttctgtaattgtttttcttctgattccccttttgatttcttctttgacccattggttacataggagtaggttaatttctacctatttatgatttttccacatttttcctgttattgatgtctaattttattctattgtgatcagagaacatatattatttttatccttttaattcattgaggtttttttatggcctagaatatgatctgtcctggagcagtgttccacatgtgcttgaaaataatgtatattcaggtgttgtggatggagtattctactgatgtctgttagattagttgtttatagtattgttcaagtctcctgtttccttgttgatcttctgtctagttagtggttctatgcaatgttgaaagtgagttattggccaggccatggtgtctcatgcctataatcccagcacttagggaggccgagggggtg

SEQ ID NO: 126950 - DNA, 1059 bp, Homo sapiens
tgagaatcttctaactgttggttttgatgccaagtgcatctctaactgtacttctgttaaacttttcgtgaactgtcctgactccatcttcttctcttattattttttctttatgtgtgccttctcaataattagtctttttagtgttatactgtatgtacttctgtaagctatcaaaaatccttttggaatcctgtaggtaatgaatgaaaaacaacataacaacctacaagtgtaagctttgattgaaccttcttccttggttttggattatagtgactggttttcatacataacccccctaccagatatgaggactttcagggttattgttgtctctcattctttatcatgcagaagtattaagcacattactttgtatttaatagtatccctgtgaatattttgcagtacataaatatgcatttattgaatctagatactgttgggtatacaaatatgaattaagtgtggtctctagcctcaggaaattgacttacagttggagagacacaagaaagactgtgttaagtgctatcatatgctgtggaagtcttgaggagggagaaatgaattctgattggtgagggtctagaggatttgaccaggggaatactgctttggggaagtctgttcttagcactgaaaattgaattgcatgagcatttatgtaattcttgtatgattctgaattgctttttttctcccttaagtttcaatgattcccctttaagctagtgttctgaaatttagagaatacgcccttaatgatatcatgatttcatagacttcagtccaaacttgaaaactttagtgttgcctcttcccttcattttctgatcattttaaaggcttttctctgttcaatcaggtctttcccaaggaaacattgctaattattttgtaaatgatgatttctgattatttttgtttttgttttcctcacagggtgtcctgcttagatgatcatacgattttgaggtcgtttgttaggctgttacattgtactaaaagccctctgtaattgcatcctgatggcctttcctgccttgtgttcct

SEQ ID NO: 126951 - DNA, 1836 bp, Homo sapiens
tttgttgccattgcttttggtgttttagtcatgaagtcttttcccattcctgtgtcctgaatggcattgcctagattttcttctagggtttttatggttttaggtcttaggtttaagtctttaatccatcttgagttaattttattaacaaataacctaaatccaccaaatacgaatttctttcatagaatatctcttccctttgaccacatctttattcctgcttatggctgcatatctacaattgaatgtgatctctgctgtctttgaaactctcatagcacattgtttaacatatatcttagtgcattggaaacaacagtaagaacgaaaaccagccaaaaaaaatctgtaataaattacaagagaatcgtcatgtgactcttagaaatgtaatgttggtaatttttgatgtttacctatgcaaggcatttcattattgagcttatggaaacccagattctctttgattggaatttggatagattatattttccagctttatgaagcaagattaaatgctgcaaactttatagactccaatatttctttctgttggtccaactatccatcatgcagaagggagtccgtggaagttctcctgtctgtgaaactgcttgagggctatttcaaagggctgtctttttggctttacatttctagttctctgtaattagacttatatacattttttattggataatcatcaattccctccaactctgggcccgaatcagaatgtatggcagtttttaatttcataacaactttgaacaaaactagcaagccgacgtagccattttcatactcaataccttgagaaaaatattgccaatttaaagtatattttgtttgtttattttttttttttggtgtggattcttgattttgtggaacaaaagactgtaagttacatctgtatccatgatattagtgccatcctttgccctccatccatggtgcctttacaaatcagttatggtgtttaatacaaaagcctttatggtggctttacgtagcagttatgatgcttaataccacagtcaaaatcagggtttgcagatgttttcctgattgcttagtaaatacttctgagcaggtaaagcaggaatatgtacgtttagagattcattttgtatcgtaatggcttggcacacttaagtgagcaggatatatgctccttcttatttttcttcccatgtagagaaaagtaaggttgtttcttatgctggtatcattaatttattaccacagacaggattgaggtgggctttaaagaacattgtttctgatatctaattattggctgtaagaatggtttcatagcaccttctctaaaatcaattgcagagatcctctgatattttatggttcatagtaacaaccccatggagcaagtcatctcacttctctagggagagcacattttgcagccagtttatcttgaaacattgcctaatttgaattattctaagggtgtcttatcaaatgttttcttttacagcatggtgattgggaatgcctgccttggaaagtgtgtatccctaaatcattctgactaggctctacatctctgggacctcagtcacccactgatgggtgtgttaaagaggatccatgaccattttctgagagaaatcatggccttcctttgcttaggagtggggtactctccacatgctgctgttttgttttcatgaagtaatgcaaacctggttgttaatctgctaattctctaagttcaatatgcccttaattgacaacagagaatatttatattcctgttttttctcggagaccacaatctcaaactctatgccactttgtccttatcaa

SEQ ID NO: 126952 - DNA, 1013 bp, Homo sapiens
atatccatttcttaagcagctggcctcatttggattttaagggagggagtggtttctaattaaagtcacatagtaaggtatgaaatgcacatgaagaacttctataggatctttatttgaacacacttccttctttcctcccacaaatatttacagaaatcctgctaggtgccaggcattattctaggtatagtgaatataaagcagacaaaaatctctactgttttggagcttgcattctagttgggaggtggatagaaaattagatatatatatatgtgtgtgtgtgtgtgtgtgtgtgtgtgtgtttgtatatatatatatagtgagagagagagagaaagagagacagagtattaaatagtgataagtgcaatcagaaaacatgaagcacaaaaaggggatttatacagggtcaaaagttcaatttgcaatagattcatcagaaaggcctcacatatctgtgtatcacagatatttctcagttgcctattttgggcttctgcttcttttctcccttgcttgacagaaataggaactggcagcttggcacacactacttctacaaggttgctgacctctgacataagtagggtctgtaggatttaaatcattcattttttttttttttaaaaagaagtcaatcatgcttaaataaacacagattatattttaaaattacatctgaaggcatttaaaacattccaacgaatatacaaatatgatcagaatttaccaagtatataggcagtctatttaccttcttctatatatttagaatatttctcctaatttttcttattcctcatattatgtgttgcacagtgagggatttttgtaaagggtgataggcaatggagtatgaaaggattcaacagccccactcccaggaaatccacttaatgcacatgatacctaatggtggatcaatagcatgatgtttgtatttgaagaaaaactcttataaaacaaaattaagaatgatgtggacttactgctgtgagcatgggaag

SEQ ID NO: 126953 - DNA, 1236 bp, Homo sapiens
tttgtttgacaagttttggttaatttctagagctatatactgctcattctggttttcctgagacagtttaggtttatgcccatgttcctggtgtaattattgagaaaaatctgtttaactcaaagtaaattatgccttataatacatctctcaaatcaatatacttttgttagccctgggctcttgttctgattttgccaccaactagccatatgactatgggtaaagaaaataacccaaactttaagtttcttcatctgtaaagtgaaatggtaagggtaaatgatctctgaatattcttgaatgcttttaagattaatgtttctttgatgtttagttgcttctaatatagcagtggtttagagcagtgactttcaaagaagtttattctgttttactatttatggtctttctctgttctattaatatcctattaaaataaatgctagtgatgacctactaacttgattgcatgatcagaatagggttgggttgaaatctatatcttgatttatgtattcctgagtatcattcttaatttgttacactgaacagttatttaccttctctaagcttcaatttccccattcacttgtggtaaagtgttctgaggattaaatgagataaggtgtataaggtgtttagcagagcacctggtgtatggaagaaattgcatgttagctctcctcttatttattcacgttgtgaatgtgacttctctctgctaagattacattacatagaatctaatacatggaaagttttttgaaccacattgttaaaaatattttaaaactacagataatattatatccttgtcaatcagcaattttgaagcatatccgtaagtgctttgtcaaacagtagttatatttttatagtagttttgtgaaggaggtacgtatttggtttgctagctgcgtagactccccaccaagaggtcaaatgtcaggaaagtcgttgaaaaaaatacattattaattttttgccctgttctacttaggattttcatcttgtttttcatttgaaataatatgtagcttctttatattgaaacctatatgccttttaaaaacattagaatcaaaaattgctctcacaaaaagtgaaaaggattaatattttgattatctttggagcagtaagctattcttttctaaaataaaatactaaatttatacctgatcagtcttttggtctaatgctcaatcaatacactggggaaagagccgaatt

SEQ ID NO: 126954 - DNA, 1006 bp, Homo sapiens
ttggacattgatttctcatctcatgacagaaatggcaaggttagcatttcagaacttctgttaacaatatcttcatcctttcattagtttaattcatgataataattcacacaagctttgaccattaaatccttttaggaagcagtgtttcccaaaggccaatattcgttatgaataattagtttcttcaattcattttagtgtatgaaattaacagtatatggaaattcattttctttctgatgcaataaactttccattaatgtatgagataatttttatgttttttttcttttcctatacaactgatggttagagtattcaatagggtattttattctgttcagagtaaagttcgtttgggaggtttgtggttttagtagttgttccctcaactctgttccttccatcacacctttttttcttttattgcacattaaatgatgaggtctcaccaaaaagcatttatgaaatccctgaagaaccctagtaaaggtggtgagattgatttttgtgtttcctttttaaaaattgtacagagaaatgtgtgaagcccatatctttgggaagcttaatattcaaaaactgtcaactcagttttgaaaaattgccttgtttttgccattattatttctgacatatggatcaggtgtagttttaaagaatgggagaatcaaccttaagttatttcttcacaaatatgaaaggagtcccacaaaataaaatataggatgccctaactttgcatagtcatgatcatagaaatcaaatcccaaagcacttatagaggtaagtaaaagcattgcagaaataaataatcaagattgattgcttccaaactgtgagtatatgtaaacaaacaaaaaatttgctttatgagactgaacttttaaatttattcagccagagattcattgttctgatgtctgtgtgattttctctttaaggaaagagtgagaacatattcatacgttataaattgctaatacttactagttgatacaat

SEQ ID NO: 126955 - DNA, 1044 bp, Homo sapiens
agtcagtaaccccttttctgctttaaaactggacacacacacacacacacacacacacacacacacacacacacacacacagagtccagtgataatcaatgtgatctcatatataaaaatgaaaggcctttaaatatttctgaaaatttgttgacatagataccaaataaataaagacagatttatgctagaattttttaaatagacataatttttagagaagttttagtttcacagagaaattgaacggaacatacagagattttctatgtacctactcctgttcccatacattcatagacttccccatttatcagtatcccccaccaaactggtacatttgttacagttgaattgacattgacacatcatcacccaaatttcacattttacattagcattcactgttgatgttgtacattctatggctttggacaagtttgtaataacatgtatccactgctagagtatatagggtagtttcactgctctaaaaatcttctgtgaatttataaatttttttgatgattaaaattgtatatatgtactttggaaaatttagaaatgtaaaatagaatgaagaagaggaaaagatagtcattgcacacattttgatataaattttatttaaacaaagatatcaaagtgatccttgcaaatttgggccatcttttttacatttcatgatatttagagatttattataaaaatttgtgatagtttctagaaggtatcagcagccatccattcccttgccctattctggcctccaccacttttcctcagaagctagtttacctaattatcaaccactttttgtgtaaagcaatgcagatagagaacaatagaatggagaactcatccaggttagtgacattctcacagggagtgtgttggttctaagaccaggttctaggatatggttcttagcttcacaggacctgaaagctgattcttcattattttaaagtttattagcctttccaggatagactcaccaaacaaattcataaatatatgttatctggtattactgatatataa

SEQ ID NO: 126956 - DNA, 2594 bp, Homo sapiens
attttaagctatagagtttcttgtctccctacgtttcccttatcttatgtgccaaattgaaaatgagaggttcttaatactttttgtgccatggaccccttttccaatctggcgaagttcgtggatccagtctcagaattaaaaaaaaaaaaattaagcatgtgaactcaaaagtcttagattttttttttttttgagatggagtctcgctctgttgcccaggcttgagtgcagtggtgatctcgactcactgcaacctccacctcccgggttcaagcgattctcctgcctcagccccgcgagtagctgggattacaggcacacaccaccatgcccagctagtttttgtatttttagtagagttgggatttccccatgttggccaggatggtcttgaactcctaacctcaggtgatccacccgccttggcctcccaaagtgctgggattacaggtgtgagccaccgtgcccggccagaatgttattaatgcacaaaataaatgcataggattgtaaaggaaataaactaaattgaaatagtgccatcaaaatattttaaaatctctaaaatagtaatacatgaatagtaatagtaatgggatgcggcattacttctaacaggtactataattttggagttagtgatgagtgtaacaatatttcaaaatatatattatttctgtcggtcacaagtacaacaaatactactgtgatttgttgtctgcattcttaataaagggaaatttaaacttttagctaattgttagtgaaaataagcatatgatctttttttcatccaaatacatgaatcatattccctatattgtatctattgaacttttcggtggggtttaaaacctctaacatagtggaaagacaagactgagtgaatctatgtgaaaaagtatcaattctttgaccagggagataccacatagtaaatgaatacttctgatatactaaatggttccttatggacctttgggagcaaaattattttgagcacacactctgttttcttccatttcgttaactggtttgagctcatttacttataatactcatccaaactggccatataacatttaaaatttttgtttatttccaaaaaattgatttcttgcaatcatcttcactaattgcctggcatagaattcttactagtgtgtttccacgtgtactgtttgttgtacatttgtcagctcactcaaataaaactgcaaataatgaaaacaattgtattttctccagtacatctgtgaaataatgtcttcttattttttcttccttctctcaaatcttgatcccaaattatgacaatttcacaaccatttgaaaaattattgtgtttattggattatatgcaggtgcggttctgtactttattctacaaatcagtggttaagttaatgatgcactagtttaaatttagcaaaatgaagcattacaagctcagctgaaaaatgattcttgttttaaccagtatcttcacacagctgtttaaataccatattgtacttttttccctttccttatttaaggtggcacatggtacttgtgtaatctttgcttattttaagctggcataaaagaatggttctcagcaaattgaaggcagtttgcaaaactggaggatattctcatgaatttaggccaagttaaattattattgaagaatacatctttttttcccccaaaatttctcctgagaattttttattataatgttatatttgaaagtttatgacaaaggtacttttttttctcatttgttccatgtaattttctttcttttgtatgatgataccattaaagtaagattggccagaaagagtcagatgtttttaaattgtagtagttcactgtctgtactatcaattttataatatttttctgcctagaaactttttgttctccatacatagaaataaaggccgactcaaagcatattacattaagatggcaagtttaaataattttttgtaactgcttgttttttcactcctgcactatccccactgcctacgtcttcaatctccagattcctacatcaccaataagacccaaagtttccttttcttttgtatttttctcaaatgcaccaaataaaactttacctttagattttatttgtttacccttatatatttatttagctttcatattttcatgaaaggtgtataatatttacagatattaatagtaagattttgtcacaatatatctgtgagatagggtactgccagtgtagacattatatttactttttagcctgggatttttttctctatgttggttgattgaagcaaataatcttataggccagaaatacaattgaatttggacagatacgcacaagcatagttgtaagttaagagactgagttgaactatatcactataattgttttagtttgtgaaaatctcaatctatatctctatttcttaaaatttgtagaattgcttaaagtgttcaattatattctgtatatgtattcaaatccccttaatatcaggcctgattttggttgaattttactgttttgtatttatggaacttatttttattattactggatttacacctaacaacaa

SEQ ID NO: 126957 - DNA, 1420 bp, Homo sapiens
tgcctccatacatgctgtttttctgatctgaaatattattttttcttgtattctttagaagccctagtttttccccaagtcacttccctgaagccgcctgtattaggctattctcacattgctatagagaaatacctgaaactgggcaatttataagatgagaggtttaattggctcagttcttcaggatgtacaggaagcatagcagcatctgcttctagggaggcctcagggagcttttactcatggtggaaggcaaagcgggaacaggcacttcacacagcaaaagcaggagctagacagagagtggagggcagaaagtgccacactctttcaaatgactagatcttgcgagaactcactatcacaaagacagcaccaagccattaaacatacacccctgggatccaaacacctcccaccaggccccacctccagtgctggggattgcagttcaacatgaaatttggattggacaaatatccaaattatacaccatctatgacccttcttggctgttgtagttggctctcctgtatacctgatacacatagtctagttattatttactgtattttgtctgtttcctctgattctatttcctgacgagagtaaaaactcctatagttgattttacatctgtaactctgggatttgtcacaatgtcaggaacatagacacagtaagtatttgttgattattaagaaagttaagattagattgagaatggcattttgagtgcttgtgtagtatttggttttctttacagttattattataccataaaacatatatttaatttattttataaatggttagaagataaaatgcatcacattctgtttttccattattgtttggttttgtgacagttagtgctgttatctcttatctatatatctgcccttccacactctactgcaaagatataaaacctgtgaaccacacatgccagattccattgctagcaagttttctattaggtacagccaaagcaaggcaatcttgaaagattgtaaggtaggagagaagaagcagctatttatttccttttattggatggtgtacttcagcatgcagaagaggatactgaaggtgacctctggtggctgtgagttccagaagcattagtgttggcatcttgaatagcagtagcagtactcctgctgctggacagtataggctctgttgagcaataacagagcattcccagtggcacctgtagaagtttttccaggagctcagcaattactgcaggcttgtgggctccagcctagtggggtagcaccctcactttggtttgaaaccctgtttttgttttgtgccttcaagtatttatttcttccttttttttctaaccccttcaacaactgtataatcagtttctggtattaaatttcctattctggaaatgtctata

SEQ ID NO: 126958 - DNA, 2441 bp, Homo sapiens
tgataatttttttactgaagcatataaatttatgagataatacattttgactatcggatgtccttgcatattactttattttcccttttctccctttactttttaaaaaatttgtttattctctctactccttcataaagaaatgtgtgtgttaaatttatggccctcgtagcttgagtgttcctaagcggcagccctcttcaaaatggaatcttgatgaataagaacctggattaatttattcatggctaaataatttttcttttctccctaactatgtattcatccctaaatcatacatttagatcataactaagaattttactttgttggctcttaacataatgaaatatattctggttttcaggcccttttttcgacttttgtttcctgcatgttctttctttgtctatgagtcttttacttggggtggctggcttgtgctttgaatacatctaacatcctccactctttatgcttcttatgcctttctttataccatccacccagttgtaattcctgtctactctcagatacagccatgtgccactgcataatgtcagtgatagactgtgtttttgatggtcttcccataagaggataataccatgtttttactgtaccttttttatgtttagatacacaaatatcattgtgctacaattgcctatggaattcagtgcagttacatgctgtacaggattgtagtctaggagccataagctaggggtagtcggccataccatctatgtttgtgtaagtataccctgtgatgttcgcacaattatgaaattgcctatatgcttttctcagaatgtgtttccatcattaagtgatgcataactgtactttcctgttgttcaggtgtggtttaagccttatctcttacatgaagtcttttcagacttccatagccagagtaagtttttttttacattcctatgtagttattatctgtaatactcacctttttattagttgaaaaatgaagccttttttttttttttaagaagccactaggaaatgtttccttgtgtgttgtttgcttaaatggacgtagtctcattcattactgaaagactacgtggcggtgaggaaggtattactatgattggtttacattaaatagagcttaagtctgaagctgtggtagaaaggatttggaagagcaaattgcattgtgtgcacagataattgtccatcctggaaaatatccacgtaaatttttaagaaatgcagaagcatcagaaatatttttagaaatccatgtcgtttctgtcttcactttatttatttgttttttttttcagtcatttcctgccattaagggactcataggctactgaaggattcagataaatactttttagtaaagtatcataagtaccatatgtataagcaagatcctgaggaaatactagtttcttcctattgtcttaccacctgtcagggctagtttcctgtgttatttggacttctctctgcaggactgcccaaatttttcatatcaataaaagaagcttaacgcaaaattactgattttgattaaagaggatatttttcctggttggttgtataagatggactgtgatagcgtcacaaatgtttgccttatgatatgttttaaaaagtcaacgatattctgggggagggccaccttaaaagaagtgagaattaaatcggaatttttctttgggtgagatatgcacgtatacttttaaaatattttcctcccgatttactttggttaacttctagttctcctaattaatatgtgtgaatttggcatattaaaagggtagattttctgtcaaacagtcatgacaaaatagcagacaaaaaatagaatatatttcacagcttaatttaagttacatttttactacccttgcaattatattccataggtctccactatttgtttagaaaaatctataggataattttatttctttaatcttgtagaaaacacagttattaaaatggacattgaaaacatattaatagttattaaagtgggcttaactgatagattgattagaagctggggaacttgcatagagaaggaggaggagaactagctttttcctagacaagtgggaattacttcagtttattgtattacttcagtagttattgcattacttcagttttattatcctatactagaacagctttctaaatgatcttattttcctcatcttattcactctagtcaatcctccattcctctggcaattatctttctaaaatttaaattaaaaaatttcaaatgcaacatcattcaatcaattgtatgagcaatatattaatagaatcatactttgctcaccttttgcctgtctaaccttttcttcggcatattcctgattatctcctcatttgctatatttcaaattatatacaattctactttccaggacatcttatgctttgtcagg

SEQ ID NO: 126959 - DNA, 1128 bp, Homo sapiens
ccttttgctgtttcctttagacatctgtatgtgtctgcaatctgttactaccagatttcaccaccagcccttgaactcttgaattgtttgtgtgctcaaccccttttctgttctttgtaaggaacctgagttctccattggcttccacatctgtattaaccaggcatctggggaaaggacgccatctgctttgaggagagaatcaatcaccctttcatttacactgatatttgggctccttaaaggccccgtggccctccttcactctttaactttttagattctgacctatattggaaaataaaactgctaaatcataagctagtgtagtttttacttccctaatccttcatggcttggataaatataacattataaggattgcattataagtaagtggttatattctgttaatatttatttaccataattggtgctcattaaagggcagattgaaaaaatgtagatttcaaaatataacagcctatttggtattttttcttaagtaaaggaaaatgagaccatgtagaatctataacaaattttattgaacctttcctggaattttcaaagtttcacttaactctaacaggttcaaggaaataatgaaatattaaattcacagactttgaaaagcttattattaatatgtttaaagaactttctttaagcatcttaaatttttcttaagcagttcaacaacaaaatcaacaccctcactaaccaagtgaaatcaaactgacagattgtttgtagcagccttataatggtctccttgggtttatgatctggggaatgaagacaaattgttgatttttaaatagaatgccatgtactctttgctaagaaaatttgcctttaatttttagacctttgagtattttattactagtttttttctgtctctgattcagtattattatatcttcaaaatactgaatatctagggagtctgattgataaacctcaatttccagagagtcaggtagtatttctttgcccatataatgttggatcttaatatataaatcttgcattcagccaaaccatattaagcttggcaaaatcctttgtttctacattatgtctgaataatgatatactgacaattagaatcttcatttattt

SEQ ID NO: 126960 - DNA, 2015 bp, Homo sapiens
aatatgaataagttgcttgtactttaaggatctaataatcagtgattgggggaggaagaacaaagtaaacagtactgtatggtatgataactataagcatagggtgctttcagagcacacagatgtgtcacctggagaaactggagaagtctaacaatgttttcttgaggattacacctgaatcaaactcaattgctttagtgttctggatgaggaatggtggtgcctagtactgagagaatatgagtaactgagtaatttcaaattgtttggcattgttgggtaccacagtgggagtggtaagagttcagtgtgagcagcaaccagtcagattatcaagggccttgtaaacagtgttaaagagtttggacttgatctgagggtagtgggttgttcctaaaatgttttagaaagattattcagattgtgttttagaatttatgggttgtaggccagagaaagggaaaccagttaggaaactgataaaatcacctaggtcagaaattatatgggctgaagcaaatgctgaggaagtgagagagaaatgaatagttgcatgagtgaacaagaatttggactgtaagaatgggaagaggcagagtggctcctcagcttctgatttgagtaagaaggtggatggatggtggtgaagccattgactgaggtgaatggagaaacacaagaaggtgtagtttgggatttcatagaattagcttctgtcttggtaggacagtgtgaccacatgttctgtgacctaacagtgtgcagcctgggtatgatctattgttgaagcctcacttgacttatggctggggatcaatgacttttcctctctttctgtgtatatatatcttcccacgatggaggctgatgtggggatgaagattttttttaaagtggttttaatgcacagaaatatacagtaatgaatagttaacaagggaagaaagagctccagttaatagtactaagttaaaaataaaagagaaaaatagaaataatttttatataaagtcattgttacgacctcccatggaatgtggcagccgaaatattaactattagttatcccctaggaggccttgggcattacctggaaatgggccctgaaggtgtattttcagccaatgttctggtcttcctttaatctgtttgtttcctgtttcatactatatgttatgctaacattctaaaaaaacttaggtttaaattgcttcttttctaaaatagaacttatcgctatagaatatagccttctgtattaaaacagattatagggttgttattgagggctgatctttgaaaccaaacatataaaattgatttaaagctaaaattttgatttgtaaaaattttgaatgatgaaaattttggtagttcactgattactattctcttatgactctgcttcttccactttctaccctaatctcttcccaccatctcaccagccaaaaggagttctacttagatctgctaaactatgaattttttttacggttttggaaataacattatattatatttggaacatattggagaaatctataatatgtagcacattagtgtagaaggatattctacttcctgtgcagagatgacttttagtgcttatgaggactttaactatggtctttaagctatatagaacatcaaggtcacagctttatattgctgaacagttctctggatgatgtgagggtgaaaaaagaatgctctcagcactttttttgagtgtgacaagattacaaatgattcctcacaaagtcttgaaagtgtaatcgtgccctcagacttgccctcctacagacatatttggtaacgcttacttagccttacattaagccacatggtgattttctgattaccaggatggtaggacagggatgttttcttattggtcattgtgatgtgtggacaacatttaaggtaatgatagcaaaatagttcacttatctatatagttggctaacttgtggctaaatggcaggctaatcttagaattattcagcaaa

SEQ ID NO: 126961 - DNA, 1022 bp, Homo sapiens
aattataaatagcaatgttgctcacaattcagttataggcaaaactacattataatttaaattaaaattccagaacattattactacagtaaaatttcatgaggggttcaacctctctaataaagaaatgcaaatgaatcaactgtgagatgccattttgatctactacactgatgatgccaaaagatagaatgtagtatggaaaaggggtcaagggaatagaagttatatactcgtggtcggaatgtaaagtttcaatatttttgaaaggtatttagatgatatattaaaatttacatcctttgattcaggaatttcacttcaaggatttttttgttaaggaaataatcagagacacaaataattacatgaagggctcgattacagaaggatttatactattaaaacactaaaaaaacctaaactccaaaaaataatggaaagattaaaaatattttggtaggtccacatgatgatcttaatatacattcatttaaaattatattttggaattcatttactaatatggtaaaatatctatagctatattaagtggaaaaaatggaattaaaacattatatttattttgcgcgctttcacatttgtacttatctgcatacaagaagattgaagcaaaatataccaaatactgttattatttataatttaaagatagctaatctttaaaaggttctcattttatatacctttttgaactttccaagattgctaccattaatcagtgttatattaaaagttaaacattattttaaaaagctctaagaattagctcaaagaatatacagctatgaaaacatatattattttgtaactaaaatcttatatttcttttttgtggattaacctattattgggttttatgctagtaaaataacattcactgaacattgcattctctatgagatggcatttgcaaatctcataaattcagagaacacaattatgtcagtgaattgaaattaatgaaatggcatcccacacaggcaccataatttgcatat

SEQ ID NO: 126962 - DNA, 2232 bp, Homo sapiens
gtcatattgtttaaattatttttcctgaattatatcagtttttgaaacatctttaatattcctttgtaacctgccactgggtggaaaagaaccccagctgtattgacagttttcaaaataacttttaagagcttataggagaatactctgagagagctgttttaatggtgctgttttcaaaaatcgtacaagttctctgagtaagattggatctttgtagtttcattagttctattatgactgagaggtcatgtggttttgtaaaaatattttttagtttaatgatgaaaagatggtgaaatgtgggtggttatgctgctttataatactttattctcatatgtattcttatatattatatatctactatacgtacctattttccaaacaggtgattcaggtatgtagttaaaaccctcatttccacactgaaatcaggagccttttgacacatagaaatctggagaattaagaatttcttgtattatgtacactatgttttcagcttgcatttctgaccttaagcaatttatggctctctttctttctacttctgcatttattttggccaaaccacaggatttgatgatgacttttaaattattaatataccataagattactttctagcctctaacttatttctgaaaatagttaaaaatatttttccttttcatgcacaaatagcacatttgtgagctgaattttcctatatttatttttatttattaatatattatgtatttgctcatgccaagtgctacaaaagaaatagttcagtcttttgaagtgtaagaagtacatggatgaatgaatggtgggttacagtacctcgcaggaacagctatgatagagacatgcagcaaagggagttgagtacatgttaatgaaattgtagaaattatttagttacagtgacactttttatatataatgatctatgtgagtgaacactcataaagcaggttaaatgaggcattctattttgataatattttctcttacatgaattttaagaattattatcttgcttaactgaaactttataccagttggacagcaacttctcatttttccctctcccaagcccctgaccaccaccattccctttttgcctttatgaattaaactattttagatacttcatataagtagaatgtatgcagtatttgcgcttctgtgactggcctatttcatgtagcacagtgttttccaggtttatctatgctggcaggattcccctttttccccatccatatgccaggattcccttctttttagaagctgaataatattctagagtatgtaaatgtactacgttttccttatcctttcatctattgatggacacttaggttgattccatatcttggctattgtgaatagtgctgcagtgaacatgggaatacaaatacttctttgagatcctgatttcagttattttgaaataccaaaaaccaaaatttattttggataatacctgaaaatgggattgctccaagaaatggtagttctttttataatttgggtggaacctccatactgcttccagagctgttgcatttcccaccaacagtgcataagggttccagtttttccagtgttccctgtacttgtttttcttttgttgttgtttgtttggtaacagccatcctagcaggtgtgaattgatatatccttgcggttttcattgcatatttctgatgattagtgatcttgaccatctttgcatattcctattggccatttttatgtcttctttggagaaatgtttatgagaagtaggaatcttaatgaggaatatgttagcagctgaagaagatttctgaatggaattgtttaagagacaactgagaattgaggcattgtacagctttcacttatggagggagaatgcatgcccataattttggaattattgtaactttaatatctgagatggaaagatatttcaattataatctttggtattgatcaaaaacttttttgtagttttgagaaaattttaaaaatttaatcaaattcattatttgctaagcatcttaatttttatttggcaatctcagtcttataaatgcataatttatatctcaattgaggtattatgatgaactaattgccttcaaaatacctaaaatatataaaattcgattaagtgtaattttctttatatctttatagacctgaaagtaatagcaagtaaagagagcagaaatttactcaggtttggtt

SEQ ID NO: 126963 - DNA, 2232 bp, Homo sapiens
tgagctttatgtacattttgtatactaacctcttgttggatatgaatcttatttttgataaatctattgccagtctaattcttttacttgtgtatgttgtttgaattcatttgcctggattccctgaggatttttcctttatcttgaatgtctactacttttactaaaatatgtctctgagttgattgttacaagttttttttttccccccaccccgtggctagtgggccctttcagtatataagttgtggttgtttgtgtttgaatactttcttggttagaatttcattattagtcatattttattttaaaaagtcttcttcagaaattccatttatatataaattgtatcttctttttcctgtcttccatttcagccactttctctttgaccctttttacttttttctctatttcattttattcatttagttgattttctactatttttccagtgtctcttattgcattttctttcaaatctgtttttccttgggcatcttgtaatttacgttccatttctgatgtgattttgtatttttcttctcttttctttctgtgttcaatcaattggtgttttattttttccttttaaaattttctggtcattcatttctctacttagtttttaattcttatttcaaggttgttttttaaatctacctaattgcagaatttatggatatttattagttttgagtgttatggttttcttctgttttgccactgttcttgccagtgtcttgccatttgtttgtgtgagagggtggaattttttatcaccttaattgtttgggtccttattttcaattttctttttatgctaggtttttgtttatctgtatgttgggatggcttaacatttctagttcaagagcaccctctcctgttattgtaagcaaagtattgtttctttactggatggcatggttttcaaatggcatatgccttccaatttttaaattttcttttgttttatgtaattcgaaatgttctcccctttttctctctctaatgtatagtttccaaagaaacctctcctgttgttttagctgtcttttctctccaaagtgacgcctttgcaaggtggcttgtcatgtcccatgtgcgttttcaagtctcctttctgttatcagtgttctgagctaactgttcacttttcagtatatatagggccaagggctgagtttctttctgtttctagcagtggttttaaatcatggttcaacctgcccttaactcctctctgctctcgtttgtgtagtttctcctgaactgctcttggtctccatgaaggctactggcaggagcacatgagagaggtaggtaggtcttgatgtttatatttatatttacaagtactttgaagtttggagtttccttgttttctagttatgttgagatagggtgtgtagttttaattcttctccttctcttttttttcctcttcctgtttctgtttcttttcaggatattttggtactttcaaatttatacctctgccacagcttcagctgcctagaatcctctctattaatgcattcttaatagcgctcaacatcctgcagcaacttaaatgtttcgtatcttggcttattatgaatttgaatactgaataacatgattgtacatgaaagcttttcaaaagatgtgacgatcttttaaattattgtaggctttatgagacacctagtctgagcaggttaggaaaaagtagattctgagatcttaccaaggtcttactaatgtaaaaatcaatggctttttttttctctgtgttattaatggttagggtcccaatgtttttttgtgagactaaataataaaataatgatctttttaagtgtggtgcatcattgactgctgtctttttatctgagaaaactatgtatgtttagtaagtccaagggcacgttgaagtttcatgtggaatagttacatgggaatttgctgcagcaattactctgctgtttaatgacaagcaattatccacatcacttctcaagctatacatctctctctcttgcccttcagcattatgaacatcccacccatgggcatgagcatttattctacacagtatccagctgttacctactctaagacgtaacacacctctagtttttataactaattctaagccttgctgtattggggcttgtaaaatataaacccttactttttataattgccatttactttatattcttcaaactttgtaatgcttttaga

SEQ ID NO: 126964 - DNA, 1281 bp, Homo sapiens
atatactacagtgtctggctaaatgatgctagataaggatcaacaatttttatttccttcatgtgtgctttttgtgctataagatcctaaactaactcccaagtaggtaaagcaatttatttttcataaacttgtactattaagtgtacttattatatatgattgtttgatttatggcatatccattaattatttttaccaatgtagtttattattgagaatacctagtccccatttatgcaataacaatttactgtaactagaatgacaggggtgggggtagatggttgaactttaatgttcttatctaaaatattgagattcatagcaaaaaaagggggggaggaacgtgctaaggagaaaaaaaatagcaatagcatttctttccttcacagtttgcttctattctttaatcacacataacttctacacatctttcctacaaacactctcctctgttaaactgatctcatctttgccctacagttatcatctctgccactgtgcatttgactgcagaactttctcttctctaccatagttgaggtcctgcctcctccatgaagtgctttcactgtgcttctgcccttgccttcttcctttgtctcactctgttctctgtctcacctacttgccacctttcacaagttgccctgaatcgtaatctatccttttatgtgtgttttaactctccaactggattatgtgcagaggcagtcctttttatttctttgtatctctggtaaacctcatagaggccttcacatgacagatttttagtgaatgtttgttgatgctgttgctggttttgcttctgctaatgttgatggaaaagaaggaaaatctaatcctgaatgtatggtacttagtttttctgtttgccttgggtaactaagacactctaggtttaactaatttgaggtcagacttggttcaccttgctgaatggttgattcatttatttgtcagcctacctgcccattcaactgtccatacatctgcccatgtatggtacttagtttctctgtttaccttgggtaactaagacactctaggtttaactaatttgaggtcagacttggctcatcttgctgaatggttgattcttttatttgtcagcctacctgcccattcaactgtccatccatctgcccattcattggtccatttcatccatccatccatccatccatccatccatccatccatccatccatccttccatccaaataacttaattaataccttcagttagatactgcaaaatatgtgctgggagcc

SEQ ID NO: 126965 - DNA, 2141 bp, Homo sapiens
ttcttcctttgaaaaatctgcctttttggttctagctctatcctctgtggtttcaaggatatgtttaaatatttcatatgttatcaaggctaattatttataaagatttatgcaggagcatttaccatgggaatggttttaatttagatcataatgaaatagttatttcaagccagtttcctttctgtatttatatatgtttaggtgtgttaagactggattgaaagtctcatttggtgtatatatacacgtacaaattcatatgtatgtaactatgtttttttaaacattgattgcagtttacatcatttattcatatattcattcattatgtttgctgagtattttctgtttccctccattagaatgcaagagacaggtgcctagaacagtggctcatagtaaatatttgttaaatgaataaaattgatttaatatcttgagaacttttctgtgtgatgtattggctaccagaattatcactgagaggttaggttgtattaaagattgattacacagctgattagtagacgaattattactagaatccaattattctcaatattgctctgctgaattcattgctgcagaatgtaatctttgaaaaattctaacatatacttaatatttttggtgaaaattaaaaattgaagtatatcatacaaacagaaatgtgcacacatcttgaaagtacagcttgatgaacttttccagagtattggtccatgtaattatcacactgatcaatatcgataaagaacatttcctccctcatgtgaccttcctgtctttacccagatgacttttgtctccataggttagatttgccagaagtgtgtattaatcaaaagcgtacttatagtaagtactcttttgtgcctgacttctttcactgaccattgtgcaggtgaggttcattcctgctatttataacagaagttcaatgtttttttgctatgtagtattcctttgtaagactgttctatgatttatgtttccatcctcttgttaatagacatttgggttgtttccagtttttggctattacaaatgcttgaactttcctgtacatttgtgaatttctctttggtataaatctaggagtggacttcctgggacctaggatatgtacatacatgttctgccctaggagatacagctaaagaattctccaaagtggttctattatgttctatatttgaaagtatggtggacattagagatgtgttttgaggaaatagggatcatattggctgaaaacatacacagtcttaattcttaaagaatctaaataggatataattactttgttttttaagaacaactagaataacatcttttatatttttctgtttatcccagcttttcctttgacataggaaaaagttgaatggatgtattatcaggctgtcatctctttgaagtacaaagaagtctgtaacagaacaaaaaatgtcaaatattcagggatcatattgaattactatagatatatttgttgcccaataataatgattctttttgcactgtgtatgctacaaaacttgaagtcaggaaaaaggaactttcggatttcagttcatttgatacccaataactttttttttctattttttccacatgtactagagtttcttgattatgtttaatatgttacagtgaattgtttctagagtattctgtatatagaatggtagtatcagtgatctacaaagaattgatatttctttgacaactataatttgcctgagaatcccaactagcactctggggggctatgtgcagttcttaaaccatgtgttttggaacatagcatccttatttgatatggcttttgaatgctattttagcctcagttcctttcagtatggtgtttggaaggtattttgatatattacagaaggctaactagtcaattttcaccaaaattcttttactatgcaagtataggtacagaataaaaagttgagttgaagtctttgaatgagatagaggactgaaaacattactagcttttgtatctttgtttcatgttcaattgtactgaatagtttttatctagttgagaggagtggtgtagtttgtttaattactcctccttacttccagttttttcagtcactatttctgcaattttgatt

SEQ ID NO: 126966 - DNA, 2757 bp, Homo sapiens
tgaattcataaatattgttccatctacacacctgtaatctagtcagcttcttgtcttggctcacctcagagctataagctctcagtctctagtgtggctttctgtttatctgtccatgtatacttccagagggatcttttaaaataccatagtgaaagtataaattttatcacttaaaaaactcagtgggcctgtaagtgtgaggtaagttcacactttttcctggatcatttggaaggctccatccaaactacttggagaaaaatgtagttggtatgttgattgcatagatagtttgaatatatgagtcagcttacatattgaataacagattctggatctaacagatgctcagtagtgtctcttacccccttctctcctctgctctgcttaggtctctcctgaaatagcccaggacaagggttagggcatagtggagtcaacatgggttcaattcctgactttgttactcccaatatagcctctagcaagtatttctatttctgtaatcctcagtatcttcatttataagttggtgattataatgtcttccatattaggctttactgaaataagacatacaaagcacttactacatatgatggttcttatcgttgacttagtgtatttgtctttgatcattgaaatatagcaatgacaacatatttagaagagagtggttaggtaattgaaataacccaatgttatgtcttgcagtaatggttgaaattgaataagctatagctatttaatctgaagacaagaaaactgaggcaagaggatatgcaatagctgcttccaagtatttgtggagatgtggaagatgaattcagtttattctcttggctctaaggagcatagccacatgggtgtatattaaagagtttaggtaggtttttcactcaatatgaagaattccataacagagctgccttaaaatgacctggacagtatagcagctattttggtggaggcctgatgttcaccagtcaggattgtcaaatgggacattagtactttgaatacagagctagacttgttagccactagccagaatcccactagataatctccattgcactagcctcctctgatgttctatgagtcaactcagtttttgcatatcatgttattttcaagcatattccacctggaccatttacagatcacagtttctgtggtaaccaattcctgtaatatgttgcagtcctcaaataatcaaataccatacattatttcttcttctgtatttgcatgctgtcttttatatttccccaaagtgttaaatctggcctttaggaatcaacatcctgtaaaccccaggagacagtccaatgtgtgcaacatagggcttattgcaaacagctgcttattgcagagtggtgggtagcaaattgtgcctcaggtgaccaagaggaaatgaacctgatcatgttgagctttctaatgaagcacaactaaaatagtttgatgtaaaaatctgtctacttggaatttttacttgacctcaaattagtaatattacacatttagtaatattagatttgcccaggagtgataaaggaatttattgaatcttaaaatgtggataatgttttatgtgatattatatgaaatttccagttttcattcttaataaatctgttcaataaaactctaaggaaaactgtatgtgagttactcagggtttatctttactactacctctgccctgtcagttttactactgttatacccgagttgagtccctgggtttctgggacttaaatgttgttttgcctcatattctcctccagagatttatcactgtggcctcttcctggtgcctttaggtgccacttcattttcagaactttgtcgacttgttctctcttattaaaattctccagtgttttatcttcttttcctccattctcctgtttgtccttcctaaggtaacagcgatctacttttaaaaactcagctatattgatacatgttaatacatgacttaatctcaggtaacttatgtatgaacggtagtgttcaaaacagaaggcatttatccatctctactgatgggtgttaggctgttgaaggtgaaatttagagaaaataagaaccttgtgttcacatcaaaatagtctgcatatattacacctatagacagcttccctgcctttttgcttccttcctaaatcatttttagtctttctactgtatgccagacatggctctatctattgggaatatgctgaagaacaaagaaggaaagatcagtgaatgggtaatagagaaaaacaggaatacagattgagagttcagtttagatatggtgtccaaggaaagtctatttcaagaggtattacattgaaactgaaggaagaaaaggaagcaggcatacacaaagtgaagggaagaatgtgctagccagaatgaacagcatgtataaaggttctgaggtggaaaaaacttggcatgttgcaagatctggaggaggccatgtggctggagctttactaggacaaagctggtggaggtatgtttggagaggtcagtagaaatcagatcattaataggatggtaggaagtcattgagagagattttaagtaaagtgacttctatttatagtttgacagctctatattaaaataaattggatggggcaagaatggaaataatgcatttagaggtctaagagaggggaagtggattactgtgagtatagaaaaaatggagataagtggtcagattcaaaatatccctttgcaggttca

SEQ ID NO: 126967 - DNA, 3372 bp, Homo sapiens
attagctgggcgtggtggcacgcgtctgtaatctcagctactcgagaggctgaggcaggagaatcgcttgaacccaggaggcggaggttgcggtgagcagagattgcgccactgcactccagcctgggtgacagagcaagactccgtctcaaaaataaataaataaataaataaaataaaaatgctcccctcattcattttgatttaatgggttggtatagaatgcaagatatttttcccagtgtacacgcaatagcgaattgagcaaaaaatgtattaagtaagctttttactttcacatcaaaatcaataccagcctgttgttgaaaattttaagattatgatttcttcatcaatttgcattgtactttcatctcttactgtgtaatagttggccatctaccctaataatactaaatgcaatgattgaaaatgcatagtctatttttcatctaattcatcatccccaacaattacagtattcacggttttggtctaagtggaaactttgtaaggaaattagggtaatgtggcctctaacacaattaaaaatagatacaaaagatgagaggtcaaagtcctcatggtgactatgaataaactattaaatgttatggattatttttggaagaggtgttagagtctcttttcctatagtataaaatactctatagaaaggaagtgaaaagttgatattctatggtgaggtcaagctgaaaccttctctgaatcaatacacgacttcagataaaagctgctattgtggctatgattatttatgaagaatgatcatataaaatgcagataattattatatgcctagacccccctatctgaggaaggaatattgtaacattacagtgtgttgaacacctactgtgtactgctttaggatctggggacactaagatggccctgttcaatgagttcatagcctaacaatttataataatatacactaatatttaaaaaataaagataagtccaactatatatatatatatatatgtatatatgcaagcttgatgatatgtaatatagtttattattttaatagttaacatcaggattccttttaagaagggaacatctgggccaggtgtggtggctcacgcctataatcccagcactttgggaggctgaggcaggtggatcacgaggtcaggatttcgagaccagcctggccaacatggtgaaaccccctctctactaaaaatacaaaaattagcctggcatggtggcgtgcacgtgtaatccaagctacttgggagggtgaggcaggagaatcccttgaaagcagaagatggaggttgcagtgagctgagatcgcaccactgcactccagtctaggcaataagagctaaactccgtctcaaaaaaaaaaaaaaggaccatctttgttttgataaataaagtaatgagctcacatgcagtagatgagagccatgatattgggtgtgggtcggggactcttattctacatcagagaagagacatttattttgactagaacagggagagggctcctgagagacaataggagaggaagtcaagctagaaggctggattgggcctcatgatttggccctactaagagaagccatgtattttctttggcctccccttcctttcctttctttcagtggctgttttatctagctcttgtctctctttaaagcagggacttcattctactccccttgctggtaccacctgactacccttcttcctctacaggcattcttagtgaatgaactgttgcatagttaaggctcctagggcttcatgaaagccaagaaatatttatttgccttattgaagtttagagggagaagctgacttttatcatttgaaatttaaagagaaaggcacctgatgtaaattaactgggttgcatttggttaaactttgctcaaaaatttaaaactattttttgctgtctcacttttttttccatagtgaggtatattgcatcccacttgcctgtaaaattcttgggggagtggaaacaatgtttcatgcattttggttaccatcccaatgcctaacatagcagctgctcaacataggtgctccttcatatttgttaaataatttattgttattaacattagccataattttatttaatttgttattttgccaatattttagtgaaaaatggaattgaagtagcaatcctatgttctgattctggtaattagagctctgggagactcctcgtaggtaatgtagtttgagctctgaaatcatttttttcctcatggcaaacaattaaaatttcaggaaaactatgtctggaaataaaacagcctctgatgtgttctgcatgcaagctgaagcttataaagtattaaccagtacacacagaactcagtctacttgggaaggaaataaatacttgaaaggatttttgatgaagaaaatatttctttgctagtctaaaatctttccaggaaagtccttaggagcttatgagatacacataagatggacagaagaagtcatattcattgctttcagataccagaacccttggatgtcagagtcagctaatatgtaaatggcacaggttcattttgtaccaggagagcatcgagggacctatgagatatattttaatgctatcttaacagtttctaaagactatcacacaagtctagttctataaatgatactaataataccattgggagtattttaaaaacgtttggaagcaatgatcttattcgtagggcagactcatgttaactgtttgctattaggacaattttgcaggttttctttatttgttattctcaaaaactgcatcatttggtttctaacatactgaaatggagaaggaagtgtattagagtatagttagatggaccgaaaactggctcagtctttttaagaaaacatgaacatctactgtgttttagggagtggatgagaatttagcattaaacaaaatgtgacctagttggagagacgtatttatgaagataaaatcttctcatataaagattttatataagcactttagaagtatttcatcttcataaatactttgatagaactttttttttattatactttaagttctagggtacatgtgcacaatgtgcaggtttgttacgtatgtatacatgtgccatgttggtgtgctgcacccatcaactcatcatttacattaggtctatctcctaatgctatccctcccccctccccccaccccacgacaggctccagtgtgtgatgttccccaccctgtgtccaagtgttctcattgttcagttcccacctatgagtgagaacatgcagtatttggttttctgtccttgcgatagtttgctcagagtgatggtttccagctgcatccatgtccct

SEQ ID NO: 126968 - DNA, 1034 bp, Homo sapiens
atgcagaaattactgaggaaaatcagaatgatgtaagcttatctagaaatgactagattatgttttctgatacttggtgctacagaagcatgagagagaggaggtaagttctattgcagaaaacagtatgaccaggcacagtggctcatgcctataatctcagtactttagaaggttgaggcacaatgattactcaaggccaggagttttagatcagcctggtcaacacagtgataccccatctctatcaaaaaaaaaaaaaaaaaaaaagttagttgtgcatggtggcatgtacctgcattacccagctacttgggaggctaagccaggggattgcttgaacccaggagttcagggctgcagtgggctataattgtgtctttgtcatctttgtactatgtttataaggttttcttaaaaaatacttctcccatatcctgtcaagcattaccattcctgtaggttttataatgcttctgatgtttgtgtccatgattccaaacatctggctaattgactgcatttataccttttacacatatgtcttggttttatgtatatatttgttgtgttaatgggaagcatactgatataaaatgcaactggaaaaagtagtacagaaaaaggaaatattctctgtcaagtgccattctgttgaaactgatgtttaagtagatgaacatctttttcactgagaagttgtaaccaaatcagattcagctgcatgttaatatatcaaacaggaaaaattaaagtactgtgtagcagctgtcttgaaatatgcaggttgaaaaaatttaaagtgatatgcattggatatatgatacaacatttatgaaattgagatggacaatatgtctgcactttcttatttcaaatacattgcttgaagtttaacagaatgatcatgtaattagataacaaagtacagtgagtgggtgccttttgtttttggaatcacattatagccacttatttaacaatttttatctgtagcactcatttgaaatttacatatgtcagaaaggaatagg

SEQ ID NO: 126969 - DNA, 1441 bp, Homo sapiens
ttttgttttcatgaaagtagagtttggacattcagatctacgttgcagaaaaatcaaatttttgtatcactgaccttgccagtaaaaacagcagaggcaacagcagccagcctctgtctcaccgtgttaaccttgccttccaaagtaatgccagtgtatcggcttggcaagagctaggtgatgtgccaacatctaactgtcaggaagtctaggaaataaactttagctttctagcttagcttttgttctagctatctaacttagcgtgcatgaaagaacacaactgaaatggagttgagtacactaatctgcacacctaggaaaaagatctaaaatgaaatataatagtatgtcgacaatgattatctctggctaaatcacagcaccttctccttcctttactatcttgatttctgtcccttgttaattttcatcagtctaaaagagactttctcccatttccagttgtctcccttggttgctataacagcataagatcaacaatgagaacggtcatattggtgatttctggcagccatgggaagactttacttttagtgcaaaaactatagaaatttcacccatgcataattcttttgggggtggggttgtctggtgaattggttaagggagcctttcagtgcaactatatgtgtgttgaaatatgtcaatcttgattattcttgctttgctgcctggtgtggatactttggggtttctgacttctaattgagcttaggcattatggtaaccaaagattattgtgttagggaagaagccaagataatcacaagataatgtgattttttttccttaggtaggtcagaatcagtcacttttgtcttgttatgcattgctgcttactgaagattctatataatacatgatggcaaaagatgctttcattaacgtttcggggttgcctaagtaacaagtggaataaatgatttatcctcagttcctggttatatcctggtcattgaggagctgagaatagagggtagtaagataatgcatctgaggctgtggggtaggtgaggaaacgtgaaagagtagtccagaaaggaagggaaatctaaacatactagatgtcagcaaatcaaatagttcattctagagtgtgaggcacccagagggtatagcaaaaacaagccaaatgattatgtactctgaatctaaaaagtgaatggttgacagcccagtacaaagattgggtttctactctgagatagggtatcaaaagagtccagaatgccctagggtgaaaaccttggcttgctgtggcttgcagaaatcagagtatgggagtgtgatgggtgtggtgtaggaggcattatagcagtaattccaaagctggctagtgcccttgggttactttcagtttccatgctcatgggaagattggcatgccccacatggttaaaagtaccagatagaaatg

SEQ ID NO: 126970 - DNA, 1057 bp, Homo sapiens
tatgttggagtttattaattgcttgctttaagaatactcagttatgctgcaactgctactatagaaagtataactctgaatagtgagttagctaaaatatactcccagataattgaattagtaagtgtatataattatatataaattactctctataatcctgcacaattaaatcttcaagaatgcttgcaaaatgcaacaattttagttttgatatgcataacgttgagtttgttgtaatggtagcagtgagaataatagggaacagatgcccacacagttaataagttatgaaactggtatttaaacccatgtgttcaatgccatgttatttctactacagcaataggaaggctgcctagcattttgtacatatagaaaattggctatatttaaatatagtttattgtttactattaataaaaggaatcctggcattgttacaggatttcactagtttatttatggttcattaaactcttaaaaatttaggaccctaaagagcttctgttctgtgggttagtttcatcaatatttagcatattggaaattaagattgagaaaatttaaaatatatattcatcatttaaaaataaaaatatttattatgtatcaacataaatacgacagttttatgaaaaataactatatatttcaaaacaaaaatatttagtgagaagagggcactattttacttttgctttgttctttgtttttttgaaacaaggtatcgctctgtcgcccaggctatagtgcagcagcataatcatagctcactgcagccttgacttcctgggctcaagtgattctcctgcctcagcatcccaagtatctgggactatagatatgtgccaccatgcttgactaatttttttattttttgtagagatgaggtcttgctatgttgcccaggctggtctcaaactcctgggttcaagcaatccttctacctcagcttccaaaagtgctgggattacaggcaagagccactgtgccccaggcctgttttagattttcataaatctcttcaatatctggccgaatacaaacaggtgga

SEQ ID NO: 126971 - DNA, 1038 bp, Homo sapiens
cttttatattttattttacagatttgtcgttgttgttactcttgttgccagtaaaggaaacagattgacttaaaagcaaaaaaggagtttgttagacatatctggtatctgggatgggaaaagctcacaggattgaagggagactaaagagttatgcttgaaacagataagaattaggcagatctggaaggtcttggtagcaagaactttcaggaacaacagcaacaaaaatgttaggctgtgttgctggcgtaaataaactctaaccacgtctttggtatgtgcattgattctgcttaatacactaagtcttgagagaatgtgtctgactgactgaacttgggttatatgttcacttccctataccattggactgagcagagagttttctggaagtagcctttaaaagacatctttggtttccataatggagaacatgtatttggatttatgcttccaccaggactgcatagtagagaaaattcccccaaaagaagtaggggtgatgtcaggaaaagggctggatgctgggctgccgtaaaatgacatatccacttaatacacctgataattctattgtgctggaaaactcttttttcctatatccaatataaccagcattttccatataagcatattcaatatttataaaatgtggattatctagtgtgtatagattgagaatattttaaaagtttttctatccttttgtctctggtggcatcttaattacttaataataccttttcctttttttaatgagtggtcaaaaggaaaaacgaagaggagaattcaaatctaagatagtctttattttatgtacagcgtttgttgctcagtgaatggaaataatagctatcatctattgcttatccactggttttaaagtactatatgggcattttacctctgttttcaatgtaagaactatttgagatcagaatctcaggttcaagtgcagtggagcatgttgtttacaagtatgaggtctagaatgagagtctctgggttcaaatttggactcacactagctgtgtg

SEQ ID NO: 126972 - DNA, 4889 bp, Homo sapiens
gcagtgagctgagttggcaccactgcactccatcctgggtgaaagagcaagactccatcttgaaaaaaaaaagtcgcttttaccaaactcaggaaatctgttcacaggtttgctaaggtacagttgcttagccaggattacatgttgttttctacctacatgagaactgtgtttgttgaaaatgcacatttccaggcttcactcagatattatgaacgagccagttgagtaccagaccttgacatcataatttaagcaagtggattggattaaaaaccacttttttttttggtggcagatattttactgtctcataagactactattattattactttagatggcttttcatctgtttcctggtagtttttgtcttttgacctgcctctactctttgtagcaacactcaacaagcctgttccttttaatgtttggcaaatacggcatcagtgtgtgagtacttttagtctatagtttacatcctgagagttctgctgagttaataatcagtgaagactctctttctgagcacctcctaaatagtgggagacaacactaaagtataagaccccccgctatgaaggagctaaaactgtggtaggaactgtaaatatttaccaaaaatattcaagtcttcttgatacatcgtgatatcatatttgatgcttaaatttcacattttcttgtctctgaaaacaaaagtctagacttagtgacaatagttttttccctgatttaatgtaactttccctcagcaatgtgatagctgtagctaacattgaatgcagcatccagtgtcttcacacaggcttagataacctcaacactttgttttctcacttgggttgccaagctaggagagaatactattaaagggtcagacttatgtggtcaggccctattagcttttgatttaaggccaaagccattttacttgtttgactctcagggtctgactgtcttttgggtttaactttgtaagagctatatggctttttcccctttatactgtgaaaaatgcaaggagccttatgatatgttgttcatcagagtacttgttagacataaggacaataataatgtgggagaaagaatggactttgaaaagctcactttgtggaattgttgagtcttgtcattttctttttcctaattttggtttttttcctcttgagaactagcttctcatcactaagttctattaggtttttcttagttgttcttctaggatgccagtctttccattcattaactttaagttaccagcctagtctaggactttactagctacagaatgatcagtactaggaaagataaaaggctcagtggtgattttattacatgaatattgacttgatttatgcaaatgcattgtcagcaggttaccaatttacattattcagtatgcatttatagacacctgacaatatcaagctttagcatgtgagcaatttttggagacctgctttgtgcttggatagttcagagcagctcccattatataatctgaagtgaccatgatgaaggcttggcttttttcaggaactgaatgaggtctttgctgcagagtaaaatgggaagggtcagagcaaacctaccattagaaattgatgtttggctttttttttcctccacgattaaaaaagtaggggaaaaaaacccacctcaacttcgatttgattcaaaatagtatttcctaaaacataagccattcttgtcaaatatgagttccttaacttaaaaatgcattcatttaaatccctgatgtattttctcgtgttcttcattcatgcttggggacagagtgagtgggatttatgagttactgtactcagcacaggagaaataaatttggtataaaatatgtagagtataatcttactatttttgtataatattagaatttatcctaatcttaccaacccatccttgaaggcattttccttcagttcataatcctcactaaccaatttttctccaatgggaacttataaacattagcaaagcttataactgaagttgtcaagaaaacagacaaattgaaatgtctgccccagagcagctttacaagcagcagctcctggatcatgaaaggaccaagaaagaggatcctaactgcatggcctcttttccacttcaccttacttagtagcagtgaaaagcaggtttctctcttttattcagtgttttttctcaatttcaatgtatttactgtgtgacatttgctgagtatatttgcaaacatctcatccagttttcaaaacaattctgcccagtagatgataccaacctttattcctcagatgccacactgtcttccagtatgttaacctttttgatcatctcgaattctttttccttttcatagaaaacttatttttttctttccttttatatattttcagttaaatttaagaaatactcatttaacaactaccctgtgggaggcatgtgatctctttctctctacagttttttttttttcaccacttaatgctactttaaagtgttttggggaaagtttcttaatcctcaataatgaaaacattggaagatattgtaggggcaagtctcttaatcctccgtaattaaaactttggataattttataggttccttcctccagtgggtaacagaacagattacatcaatgttttatgttcacttttaccctaattgttcatcttcaatgtgtagactttatgggtatttgcaagaacatgatcaatgatctacagcacttgaaatagaaaaatgaaactgatgaggaattatgactgctcatattattctgtccctgttttgttttgctagtgcaaaactagtgtttcttatcatccttgctcatacattatgttcatggccttttgggtagactaggagggaaagagatagattaaataccctttcttatctgccatcctgtaccatgctcatcatttcctttattttatgaaacagaatttgcttatgttaaaaaaaaaagaacagaactcatcagaagaagtgacaaagtcaagtgatcatttgaatgtttacaggcagtcagctccatctctcttctctgccttccttggtatctgcttccttgtaaggtggctcattttgtggttgtgtgatagtagccagtgggatctggtgggtggcaggtggagggtgaaggaatatttatcatgtgcccactgacagaaggaaggagaacaagagatacgtattcttttctttcatgtggctccagtattttatagaagtattcagcttaaaggaagtattattccaaagttttctttgttgtgttttgtatttttttcaaattttttattttaatttttgtggatatatagtaagtgtatatatttatgggatacatgagatgttttgatacgggtatgcaatgtataataatcacatcatataaaatggggtatccatttcctcaagcatttgtcctttgtattttatattttgtttggtcattgcttgcaatttttatgcatgatgttggcacagaacctcagactggcagttgtgtaatcctggctgtttctccttgacaaaattggaatactgaaactttggaaaatgtttgtcaaggtgattgttctcttacccaaaattgtggccatttgtcaatatattctgagtttcacagtttgaagaataccagttatgaaacttaagactcactactttgaagtgcgtgtttgatgctgaccagctcagctttaaaaacagtgttttcacaatattttatttgtatgtttgttttgttttgcttcaaagaatagttgcctaagctgagcctatttaaattacataaacatatgactacacccacctcttcacaccttttagaattttaaatttttagtatatgctatatatatttgccagtgtttactttacttttgtgcctttaatgcaatgccttaacattgtgggagtgacttttaagttcagtctctgtacatacagtctctatggtgatactgtatcgttacatggtgaacagtccacagaaagtacttgcatgtctttcttagaaactttctggtactcctatgctatagtcctcttttgatggatgccttaggcatatgctaacaagattttgttttttaaaaatcttgtgaccccattatccaaaggcagtcaaaagcacacagccattaagggggctgaacaagaggactttatagtccatactggaaagtcaccacaaccccagtaagatcttcttttctaagaaagggatgcaattaatagaaagatgcaaaagtatgcagacattttgagagaaggcaggctgcagaatctaggatactgtagcagccatgaagaagacatcaccacgagagaatgggaaaagtcgtacagagaaattagtagattagtgaagaagagtccaagcatggaagattgtaagacttgccacgactctcctcaagttgctatgtattttgagggcagctatattctgttcttccttacctcatcatgtatcctttctgtagcccctccatcacctggcatactctgactgtgtttctgctttggagatgcctaagaatggatgtcttgcacttgactattgaataataaatcagttttcaaacagtgatgatatataactcaaataaaaatcttatataataaaatagcctaaaatgaggctgaaaaacaccaggtatggaagtggaatgtctgaaaaagaagtgagataataggtttttgtgttaatattttctcaccatgtgcagattttatttatctttaaataaaacttacctggttgtatcatagttcttaagaaactatggaataatttaaatgagaaaaaaaatatggctatatactaaactggtttaggggaatctcgttaacatgct

SEQ ID NO: 126973 - DNA, 2750 bp, Homo sapiens
caaactcaactgtgactatttattgtgaaaatattcaatagctggacaagctaaattggtccaggaaaacctaattgggtatttccatcttgcatacctctgctgcttataattaaggaaccctagggaatagctgttagtaaaaatattgttacatatctgctgctttttcaatagctgcatgttaattcaagaagttaaatttcaagggactaaaattttaaagaaaaaaaatctgaaccctagcactagtcctttcatgtccatttaggtgaatagttttgcttctattgcattctgagtgttgttatcagtctgtgtgtggaggatcacacgattagcttgctcatattttgacaaacgatcattatctggctgaagcatgttgtaggagtcaatgaatatataatctatttcagattccttaaagatattaaatatctaactttgaatatagagggtatttcttaataaatgtttaaaaactctcatggcggggccttcatatgacaactaataaatataccattggatggtgttaacaaaaagacgtaatactgtgaagtgccttcaaattttttagatattataataaaatattattttttcctgacaaataaattagcagtgatttaatcattttaagttaattaatgttgcagaatatgcacagaagagttttcgatggagctattttactattttctagtaacttacttttgatttttatttagatagttcataatactgaattggctatggagaacagttgccacttgcaatgtatacatggattttatttttacctaaacttacgtggatgtatgaaatctgttattaatgttagaaaataaagttgttcatgaatgttatttcgtctaaaaattgcagactcgaactgacttgctagttttcttaatcttaaaatgagttcttatttacttgatgagcaaatagtaggcagttacatgttagacaattttgttatttagagtttgataatatgtggcattttatacttctggaattttcggatcttgaaacttaagccttcagatatgtatcattattaataatatattattatttgagaaaatggtgtttctatttgactttcagcctggttcctttccactatattcacttgataagggaattatgattattctttggctcagtgaaatatcaatagtgcttttctgaggtgcagcaatctaatgtgagattgttttaaggtgccatattatgaaatttcatttcaccatgtaaacatcttgacatattttgcagtttttaaaatggcttttgatgaaatgtctgtaacaactattatcttgcataatacatatataatttatgtactctcattgggtacgttccttgactggaatataaattttcatttacatatcagtttaagtttgaattatgttgtaggagagaggaagtgatactgtacatgatgtttcttatctttaataggactttttttttttttttttttaccataagggttacttgaagttttcaatgatattttattggcaattctggtcttctcttacagtgtacaaatgtcacgtattgtgttcttcagttgataaacagattgtattctactactggattagcctttcagtaaatgtgtttcaaaatggtctcattagccttttaataaatattataattaaatatgcataaatatgggaaggtctactgtgtaacaacatggttattatatgtttcaaattatcttgtattcttatggaattgtatacctgtttctcatgcagaataactacacccttaagagagtatactaacctgtttttatgtttgtaaagactgcaagtcagctaggtggcttgaattaatctgaattcaccttcatgatagagctgaagaaattgatactgcaacttatcatgtaacaagaagatctcaagtttaataagtctttgagctgattcagacaatggatttgttgctaacagcttttttgttaatactgatgtgagaatgcaattggatattataaacactcttcagttcaactgtttagtcattaaaataattttgatataacagatattgattaagaaagggattttagagatagaaagacttgacttcagttctctgatttgccagttacaactacagcggtgcccttgggtgattataacaatacctgcttcatagaattgctttgaaaaataatttagataataagatttagtaagtactaataaatgtgaagtattattataaaagtcatgaacatttttgtcttaaatatatttaaatttgctggaagttttatcaatttttatatttgtgacaattataaaatgttgactaactggattataagtatgctaagctataaactttttgggtggtcctttgagtgccaatacaatccacatatcagaaaacattatacagttgacatttaataaaattgaattgaattttcatggcttcaactggtataagatgattatcatgcaattttgcttacatcctgacatataattgttttataatttttctatattacctgccaaactacattgtaaacaaaaattgattagagattatatttcagttttttttatattatctaaagttgtgttaaaaaacacgatcttcagctaccaagtctattccataaatatttcttggattttaacatgattttttttaatggattctccgtattccccttgattttaaaagaaaaatga

SEQ ID NO: 126974 - DNA, 2688 bp, Homo sapiens
gctgtgtggactctaaaagtgatttggctgagcaggtagcatttggtatgggttatatcataaaacaaatttctattaaaaatggggttatttagtattttagttttttttttttttttttttttttaaagacagagtcttgctctgtctccaggctggagtgcagtggtgtgatgttggctcactgcaacctctgcctcctggtttcaggtgattcccctgcctcaacctcctgagtagttggaactgcaggcacgcgccaccatgcctggctaattttttgtattttagtagagatgaggtttcatcatgttggccagggtgatcttgatctcctgacctcgttgtctgcccaccttggcctcccaaagtgttggaattataggtgtgagccactgcgcctggccgtattttagtttttgtaaaaaaaattattattctagatgtgaatgacagaactttagtgcttagcttaagattctgttatgcaaggcaataacactggcatacatgctagccatttttgatgttaaagatagtttatgaataagaaaccatctatattgttaaggcaggtttttctttggtttcttttggatttattttttggcagcttgataagcaatagctaaaacgagttcttgttgaaccttgtttattggtttgcaataatgagaacagttattgagtccaataattttgtgcttttattttcaagtaacaaagtgttcttattttgtgatgataccacagaaagctggtttaaaagctagttttaaaggatctgtagcttgagaggttgtaatttagaatggagacatggtggtcagaggaaatgagccaaagttaaaagccttttctgtgccattgcatctgtaaccatcctcaaagtactctgcactttatgtcacaaaaaagcctcaaatcctgtgggtaaatgttatctgcaggaacctcatcatttttgaaaacagtacttttatccttagagtgtttgaacaagaaatacaaataatagtattttcttttctttttacaggacaacagatagatagaagtattcttctgctatttttgaataagtgctatgtgatataagaagcaaaatcaaatttaaaattaatggatggtgagatagaaacttatggtattatcttgtttaaatctcttttgcctcttttgtgaaacagtcattctcttctttttgtggggttattttatgcctaattttcttttacaaggtagaatataattgcttgtcagctaatagtttatggcacagatatttttgccaaacacattaaaggtagatcttggttatacataaccttcaaggaacacagggagcacacatgatatggacagagaagttgatgggcagtgattatgatcgcacagggaaggggagtgaaggcttgtgttattctttttctttaaatgtatttacagtttatcatgagtcttttatgagttttcatgtccttgtctgctgtaactttacttgcttcttatccattccctctctctgtctgcctttgtctctcacatacattcattcacacacacccaaatacacataccttcacacttgaatttgagtagctggcatgcttagaaatattctcaaatgggggttacatagggccaatgtatataaattgatgtacctttatgtatatatgtatttgtatagtcacacactctattttcaaatagaaaaccagtcatacaaagtatttgccttatcttaaacattcagtttatgtttgttaagtgaatgaatgtatgagtctaaaaagagcaatgatattaaggattggggaaaactgggcataggaaggattactcatggggaagttatttattcagcaaagattgacttgtctagattattatatcaggttatttatcaatcatgtggagcaggctgggagtggtggtttatgcctattatcccactgctttgggaggctgtggtgggaggtttgtctgaggccaggagttcaagaccagcctggacaacagagcgagaccctgtttcttaaaaaaaaaaaattagctgggagtggtggcatgtggttgtagtcctagctactcgggaggcttaagcccaggagttggaggctgcacagtccagcctgggtgacagagtaagaccctgcctctattaaaaaaaaaaattcatgtggagcaattggtaggttgagtttattccttcaccccgccttactgaaccaaatcttatttctgattagtagagggtaagtggataattaattgagatgtacacatatttcattggaaaagataaattatgccttagatgaagacagtgacctgggtatgggatcagatatttgtaatttttttccttttccatcagcttttcttatggcagctcattttctgtcttatgacagccaagtaaccagtagagtaaaatgacgtttatatggtagaaaccacaatgaaccactcaggacatctgcctttaaaaacagcaataaaaagatcaaacattctctagttacaactttaacattttaccatttggagtgatactgctagtcctgtcaatgaaaaggaccacttggcatctttttggagtatccgaatgtgtggttgtggactcacttcggcctagggtagcgctatgggtcttgtacaggattttctgaaccacttttc

SEQ ID NO: 126975 - DNA, 1098 bp, Homo sapiens
ggtaaggtgttttatgttagttgaatatattttagtagtgaagtaaggagtgatattacaggttgattattgaggtctcttgaatttatcctataattagaattttattcttcatagttacgtgttaatgtgtctgcatttgtgcttttttgttttaaaatgtgatactaaaaatacacagaaattgaaatttagccccactgcagttccataatttcttcttgctttgttctgttgctaagtcggaaattcacatttgctagattattacctattgccatggaaatcgtttgttgtatttctatttcactacaggaacaagcagcaggagctaatggaccataagagggaaatttgttgtttaaacaatgattatcttttatatttggctaacatgaaaaggggaaagtacactttttctgtcacaccgcatgagaaggtaaatggatgagatttagagacagaatttacctgaaaaaaatttatacctgtcttttgaggaaataaagttacctactcacaagacaaaattataaaatgtgcctatatcaagctatgttttgtcaagtcacaaaagaggtcctgtggcaggttgggttccctagaagcagacattgagatggagtttggggtgtgagatgtattttagggatcatccctggggaaaggaagaagaaagatacaggattgagcaggggaggaagccaaactgtgaggcaggcctgacagaaccctagacaagccagtggggccctcagacagtgtggccttcagagttgtctcaagttacccctgccctgtctgaggatgtcgaataccccaagggagggcggttctctgcagctgtggcgatgttgaagtctactgacctggcggctgtctactgactgcactgcccatatatgggccatgagtgagtgcttctttgaagggggatctgggtgatgcatactgttgtctacataggtcttattttgtgactatcagggaaattttgcaattttatccttatatttataattccccaatgtacatcatctttctaagccaagtattctgtgagaattaacattttacagattttagacacgttcaaga

SEQ ID NO: 126976 - DNA, 1023 bp, Homo sapiens
gacaaaaagcaaaaagcaacaaaataaacctttcctcaccagaatatatttgggaagagattatcagtataatccttttttttttcttttttggcatgactgcaaaatcatgtcacttctgttgatcattatggaaacaagaaaagttgtaaaattataaaataatactaatactcttgaggcattttgttttagagtaggatgcagtcattgatctaatgtcatacgcatttccaaagataagtctatggggtaagcaagagattgagagctcctttttaacctcacacctaagcatttcacatcaccgatatcttctgaataagccatgcagtatatctacacacaaatttaacatggggaaggtacagtaaaatgcactgttgttcagactacagatatagatggctgatccatagaaaagccttaaggagcacaaggtgagaacattttaaatggacagtggggtaggctggagaaggtcaaggaagtctggaagggtcagactggtggggataggggaatattaccaagcaagagatgtagcagcagggtgtgtaaaattggtttctggggatacaggtcatgtcatcatagaattttgagattgaaaaatcttaagagatctttgtgctaagaaattactgatttctgaattgttcaccacagtctaaaatgttaagtgacttattcactgttgcaatcgttagtcactggcaggcctgaaaggaattaaaagtcttgtagtcttgtactcattcatttatttaacaaatatttacagactgcttactatgagctaggtgatagtgataaaatatctgagacatagttcttctgaaattcttttggtttagttgggggactgactagtaagtcagaaatataaggtgataagggctgtgatcagatacgttgagaggtcttggaaaacacacaggagaggtatcacattcagatggagagtgggactaaggactcagaaaagacttctggggcaaatctttttcaatagctagagga

SEQ ID NO: 126977 - DNA, 2342 bp, Homo sapiens
gctggaaatgcctcaggaaacttacaatcatggtggaaggcaaagtggatgtcttatgtggtggcaggagagagagagagagagtgaggggggaggacctattaaacaattttaaaccatgagatctcgtgagtactcactatcacgagaatagcatggggaaaccgccctgtgatacagtcacctcccaccaggtcccttcctcaacatgtggggattacaatttgagatgagatttgggtggggacacagagccaaaccatatcacggtcgtggtagcttgcacctgtagtcccagctgcctgggaggctgaggtgggaggatcacctgagcctggcggggtggggggggggggtcaaggctgcagtgagccgagattgcaccacagcactccagactgggtgacagagtgaaaccctgtctcagagaaagaaaagaaagaatagatgtaaatagacataaatatatataatgtgttcgtggactatgaaggcaatgtgtctggaacagaaaatttccattgtgaaggtattaggaaatagttttaatatacagatatgcagattcttgaatgccaccttgaggatttttaatttgattttatagtaaattgaagctttttttgttttgttttgagacagaatctcactctgtcacccaggctggattgcagtggtgcgatcttggctcactgtaacctctgcctcctggtaattcaagtaattctcctgccttagcctctcgagtagctgggacttctggtgcatgctactgcgcctggctaattttcgtatttttattagagacggggtttcactgtgttgcctgggctggtcttgaactcttgacttcaggtgatctgcctgcctcagcctcccaaagtgctgggattgcatgcgtgagccaccgtgcccatctgtaaatgaaagcttttaaggtttttgagcaagtaaagtgataaaagcagcatcttaattctggaaaaggatgattccatttcattatatgaggtaatctatagagatgaataaggaaacttgatattgctgggaatacaagttgggcgtttcatagaaagttagtttcagaacagaaggcttttgcttggttttaatttgaatatataggacatgtacattgtgaatgaatggaggattgctttttcctaacttaatattattattattattattattattattattattattattattattatttttgagatggggtcttgctatgtggtccagcctggagtgcagtggcaattcacaagcacagtcgtagctcactacagccttgaactcctgggctcaagcagtcctcttgcctcaacctcctgagtagatgggactagagatgcatgccaccctacctggcttctattatttttttaaaaccttgaatttataacatgataaacagtctctcagagaatatttttatggattgtattcaccagtcttgcatttaccactgtgtttggaatgttggcagtgctaaataaataatggtttaataatgagcctatagtcttcctaattctattccttaatagcctctcaagttattccttccatctgatgttgaacgtagctatgcagtccgtggtttaccagttgaattgctcagtatgaccatgacttgcttaacatttttctcaatcagacttcgtgaatatttaaagaacctcttgaacagaagtagtagtctactaccagtcagagcccataattccagagtgctacaggatgtgtaatctgtagtgtttctttggaaaggacatgactggttaatttttctcttattcaaagaagtacattgaaatttggaaaggtattagaactgcagttttaatcctacttatctatatattattttaatgctaaaattcttttgctactacaggatttgtttttctttaaagaaccatattctgccttgtgttattgttagttaagcacaggtctgtcttaatcagaatacactccttggaggcagaaaattgactttaattgcctttgctcccccataacacttagaataggttggcaatcagaaaatgtttgagttaaaatactgtctttagtatttacaggtaagtattcactagcaaattggaattgtattttatttacagattaaccttaactcatgttataacttattggattgcattttagatcaagaggctgagtttttggggtatttcaacaagataaacaatctcaccacatgctctcaaattcttaaaaatagaagcaaatctgttctgtccaaagtaaacttactcccaacatttatggaaatattaaaaacaactaaactagagcaagga

SEQ ID NO: 126978 - DNA, 1285 bp, Homo sapiens
tgttcgtggtgcctgtatacttgggagcagtaaaagcagagaaagagagttcagagataacagataaatcctttaaatttgagtatttccatttcttgagacctttgaaatttttataaaagtacaccattgcacattgtctagtaagtaactaaaaatgagctgtgtaagcacatgtgaaactcactaaaccatagtcggtaaaaggagttacagacttgtaatgtcttagctcagaaagataactgattgtatgttaccagaagtcttggttaaatttgtactgtatttaatttgtagaactgtagttctagcaatctacacctggtgtaatttttatttttctgacgttgctataagtaacagatgcaaggtgaagtaggaattaaggaactactttagacacattttttgggttgcattttggagttcagacaccagaagtgattctgaaatttttgtattgcctactgacagacattatgtaccaagaactcacattactgtaggtcactgaattaatttaagaaataccaattgacatcattcctttagggaattgtgggctactgcttgatattattgtctttgacaaatgtgaaaatttagaataaactttatttttagggtgttgggaccttaagaatgaagtgattcctttccaaatttaaattttttcaaatggataaaaagtatagtttatagactttctttctacctgttttcactgaaatagttaagtggttgagttttccgtgaactgttgtatgtagttacttatttctaaatggaaaaagagttccagaaagcatttaaaagtcttgagagttgtgctcagaggtcgcttgtgatttgtgggaagaaggtagtcaaaattggtattccttatgtgtctattacatttgaatgcatgtatattctgttatgtataatgtgttctagatgaaatccttaggaagtaaaattttttcattgtaattacagtgacagctgggaaaaccctttttgcttgaagactctcagtaatgcccctgaacactcctaatatttcagcttcttgtggtgaccatttttaattgtagcacactcaacctgaattctttgtatgctagttatctactcagatgaatttacatcctttttactccaaaatatataaaaaatggattgactagcatgaatttctgtggccatttgttttctagccaagtagataaagtactgtgagctagggctgtgttaaatgtgatgcatatgccaggccttcataaaggataaaactccc

SEQ ID NO: 126979 - DNA, 2274 bp, Homo sapiens
gttatttcttacccctacctccaggcaaccagtaatctattttgtatttctattgattttccccttctggatatttcatttaaaaagaatcacacaataaatggtcttttgtgttggcttctttccctgagtgtaatgtttctgaggttcatccatgttacagtatgtatctgtattttgttcttttttttgctgaatattattttttgtttagatgcacctcattttgttaatccacacaccatttgctagacttttatgttgtgttgcttttaggtattatgaataataccatgaatatgcttttataattctttccgtagatatatgttttcatgtctcttaggcagatttctaggtatggtattgctgagttgtgtgatatatttatgtttaacttttgaagagactgccaaacctgttttccggagctgctgtgtgtaccatgttacattcccatgagcagtgtatgagggttctattttccccacaacctcaccaacatttgttattttttatcttttttgattttagctatcctagtgtgtgtaaagtagtatcttattttggatttaatttgcatttccctaaaacacatatttatgtgtcttactcaaggttacaccccaactctggggatactgggaatttcattatgtatatgtcggctcaaagaccctgtctcttttcctcatgtgggataattttcaaaaactatacccactgcagaggttcctgtggcttaaacctctgttagaaccacactgcaattcagcttctttctctgcctgtcctgcttccttcactccctttcagatgttgttcctaagggcactccccaaaatgcatgcaaatcccagaatcttagagcctgttttctagggaatccacctattaacagggatatagaattgataggagtcactaatttagagagagtgattaaggaagacctctaacttgaggtaatctttgatcagagacctgaataaaatgaggaattaaaccacctagataagttgggggaaacttttccagacagaagagcaaatgcaaagatctaaggcaggaccatgcttgacagtaaaagaccatgtggggagtgaccagagtcagtaagagggaggaaaggtagaatataacaagaggccacaccttgcatggcttttgaagtgttttcagtaatggaattccatgatcactctagatgctctgtaaaaattgagtgtaagggaccaagaacagaaatagggacccagtaaggaggctactacaatagtccaggtgaaaatggttgtgacttgagttagggtggtagcattggagtggctgagaagtggccagattctggatatattttaaagatgtacttttttgatggctgggatatggagtatgagagaaatagaggaatcaaggaggattctgaagtttttggcctaagcaattggatgaatggaaattgtgtattgagatacaagaggcaaaggagtggcaggggtggtagaaagcaaattttaccttttagacatgttaaatttgtatgcctataagacatccaaatataatgtagagaagttgtcattcatatctgagtcaggactgaagatagaatttgggtaattttcaggatatacattatatttaaagctatgcaccttagtgagatcacctagacagagattggcaatttttcttctgtaaaggatcagaagcactatctagtccttgttgcagctattcaatttttaccttgtattgtgaaaggagctgtagacaataattaagaaaatgggtgtggctgcgttccaataaaactttatttataaaaattaataggtggtaagctacatttggtctgcaggtagagtttactgacctgtgacctagacagtgaatagagaaagacaaaagtcctatacccctcctagggtagtccaacacttagaggttaggaataatgggagtcaggaaaatgagaaggagcagccagtgacctaggagggaaactcagagaatgtgattaggttatcatttatgtttctcctcacttcaactatgtttttaagtgcataaataattcatgtaaaaatccaaacagataatactctaatcttttataatcttacacatattgtttctctgatattatactttgatattctttagaatttatgtgtattacaatataaaatgttcataactttttagagatttgagtgtgaagttctaataataatttttagtgcatttttttcaaatatgctattttta

SEQ ID NO: 126980 - DNA, 1495 bp, Homo sapiens
ttatccatggggacttttaatatgcttggttatacagatctgcaaatttttagctgtgggctgataaccatattgaatcataaatttattactgatgcattgctttctaggtggacgttaaattttaagagaattaagggtaggaattggctttctattatgaaatggtttcttcaactttaaatggatgtcttaaatgtaaatattactagtttgtgtaatcaatacacaaaaacattatttggaacaaaaattaattacaaagtttcttaagaataatagaggaaatgcaaaatatttctaaataaaaacaatttaactgacagaagcttgtcagcacttagcaacatttattttcaattacaaatggtactttttatcaccatttttattctagctttgtatcaatatatcatctagacagaaagtgctgatgtaggtttttcagtgctagtctgcaaaggaattgaaggtgaatgtggttttagttacatatcttccttcctctacatctgtgctttgtgttttattagactgcttaaaatacattgttgtcaaatatctaaatgtcaggcttgctgatcatttatatgccttcatatttaaaaaaaatattaactacatacaatgtggttatcagctgtcttttctaggggtatctgtaaatttgagagtgttttattggtagatacatgagaagttagtatctccaagtatttcattcatattggcttactgccatgtgaaatttattactgaactttcatatgaaaaagataaaacacactgtcatctcatcttgtcccattgtacatttcagttacaggaacaaaatgatatgcttgcagttctgtgatatgatgcactagaaaaatctttattatagagattgtgtgacttagagtttgtgtgtgtgtttatgcgtgactgttgcagaataaagttgtatttatgtgtacccatagtgatatttctgtgtctgtatgaacatagtgattcagtagattagatcatgagcattctttatatttgtctacagtaattaagtctctcactgaatatgcaccaagtactggccaagctgtcttataataaatattatacttattacttgtttcaatggctatacagataatcagaagtgttgcaagttggtcacttattggaaaatcttaaatacgctacttacagggaacttaccatgtatgtacacatatggtattatcttctacttttttggtttgttttagataagtgctgttgcttagcatttaaggtagaatgttttatttttataagttaattaatatatatttagttctatgaccttgagcatgctatttaattttcccatgcctgagttatctcatctctgaaataggaataaaatagttcctgcttcgtaggattgtgttgaagattaaatgagttaatacaaatgaagcactcagaacaattcttgaacctaagcaaattttcagtgagtagtagttat

SEQ ID NO: 126981 - DNA, 1795 bp, Homo sapiens
taatttatttgatgtaatttcaggctgagaatatcttcgcaacacaatattgaaaaaatagtttattgaaggatggcttaatgaaatataaagagtatgaaataaactgtaaatcaaagaaaacttagggactatttgcataagtggcatttagctattgggcatttttatatttgtatgtgtacaaatataattttcatagtacaaaaaggtggttttacaaatgtttgttttaggagcaatctcttcaatataattagataacagaaatttttgtgtattttttattttcttaaattaattggtattgtcaggctagcatttgatttgatcaatatattgtttactcaaagaaaagccttagtggtttaaataaccatgactgtaaatgtattaagaacttcactggcagtagcactgcaaagctcaaaggcactcagtgtaacctaattactaggaatgacatttgtattagtgctagtgaggtgtgagctttttgtaccgaaggctgaaaagatatcagattaggtccagagtgagcagaagggacgtatttcaaatttacccttttaaatcctagaattcagtgacaatgatgtgactgggttattgatattgcagtacatctaggatgaagaaaggaatacatagagattactaattagtgaatatatattttaatcaagacataattttctagcatcagggtcagatcaaggttttattggggacctgaaaggaggcagaccatttggaggcagccctcctaaaaaaaatacaaaattacagatgcaaatttatatacaagtcaatatgtatttagaatgagaaaagaaatcacaactgattacaatttcgtaaaagatggtcagtgacattatcataataatatttggaaaaatagctgctgatcacacttttaaactaccttttccacatctataggatacataatgtttgagcccctctcagatgacaatgactttataatataattttttatagatttagaaagataaattggactttcctgtactatggttaggaagattttgtttttattattgataattgagctgtataaactgtgcagcttcactcacagacatagtatttatagaacagctgcagatttgggctttgcaaacgcagtgtctgaaaagttctatttcattgtgagtcccatcaaaaagaaaaaagaaatgtctgctacatttataattgtatatgcactatcaactctattcctaataagagaaaacttgactaggcattgattacaaatggaattatctgcttattctatttcatgtctccttattggaagaattttccacagagtagcttctggctgtataaatttcagtctctgcttctctcccatttgccacaaatctttagttctcgttgccatgggacacattcgtgacagaggttacacattgaggggtcttcatagacctctgactacgaaccttcatatcaggaccccatgtgagttagcacagttgggaaagggatgtattcctagaagccattcctatactggaacagatggtaaactaattacacatagaaatgaccaagaaccacttacatatatcccactaaaaacaatgtgctaccaattctgaatgtatcacccaaactgaatatatcaccctttgcatgatccccaggttgctcactgtgacgccctccacccgacaacaggagattggtggagaagaagaggaagtggagaaagatatttcattggcaaagtatcttacttttacaaattttactaaaatat

SEQ ID NO: 126982 - DNA, 5605 bp, Homo sapiens
aggggcctttttttgtgttgatgcctataggcatgcttacccccttccccaggccccacatgtgtgtacctatatcaacatgcatttccctacatgcagttcccagagattcatgaagctgctcttgaagctcatgggcaacacctagattaatatacaagtgttacttaatgaaagaagaaaaaaggattgcatgttcttttatttgatagaaagcaccatattcatccattcatatgtcctgagcacctattcatccaactacttatgtatctgtccatccacccacctcccatccacctagccatctagccttcattcgcgttttatctgatactttctatttgtcaaaactctgtgtattttatttttacacttttaaaattgaatactatactgctttgtaagtacttatggagctttgtaagtacttatggaaaatgaaagaatgattcacggcaactatggagatgttctagtagagagtatgtacatatttgtttgtggttgtataataatatagtttgaagcattaataggtttggaaaggtggtatagatagtcatttcagctttgcttatcttagactgattttatatttcagaaagtctttttgtgacctttttgtactgctctagttttaaaataaactgcattgtcagtaaagcagagttagatttctttcgtgaaagtaaaattgatagacacttgaacatttctttagaaagttactgtatcaaagaaaattttaaaaggtttttaaaagattttacccattttactgaaaaaagtttctcttcttttgaattgattcttaatttatttcacatatgaagcatcttgtaaaggttttatttagggcagtaaggaaccattttagtatttttaatcattcaatttttatatagaatttttttccagtccttattactttaaaaaattacaattgaaaccccctatttctcttgacatttttggtattcatttttctactgctttagtctttatcatctatatgtgaaacagaaaatatattttttagacaaagaagacagagtgacttatttggaaaataagattctaattactctatcattttctgtaagggtgaaatacaatataagggaacaataaagaaaatcactctcctagaatattgcaaattctaaaaaaaggaacataaagattcaaatgcactcaatctgctgacaggactgagccaatgaggtgtacagcatgagtgtgttgctacacagactacacttgtaccaggagcgtatcatgaaagatgaaaaattgaaagtgggtactaatagcactcagattttaaaatgaatatcattagtattccagcaaaattatattcatagctatatcttaagtccaatgtgtttcatgggaagaaaatgtcagtgatatgaacttacctaatagaactgagcctgaggctctgtatttgctcttaatgacattaaagatgtaactattttaaaattttttgatatgtggggctagatttataatttaatactgtcgtaaatattaagagtgcttaattttttggcataatggaaacatagcatggagattaatatctgatccatagtcaagatccttttccaaggttgttcccagattcacactgttctggcactctgaatagaaacagtcttctgtttaaggtttattgagttggatcacttaattgcatctcaaagttatagcttcgaattctcacttctttctatttcaatatggtaatgtagttttctgttaaatagtgacagtcattattatttgtactaacaaatgaaatcaggttttctatttattttttgttctagaagtctcttttctcttggatctctgaatgttcttcattttcttttataatgcactgtccagtcctaagaagtgccctaatattaatcctgcctttcttaactgattttttcagtcattagaacaaagcatttcatttggcttagggatcatttgatagtacctacagaaaataatttgaaacaaattacaaagtatcttgagtctgaacttctggcccaactcagtcgctgggaatttttttagaggattatttgaggtgaaggtccactgatatttctatcctcagccactaacagataaatgataaaagaattctaaggtcttcgctagcgaactccgtaaagagtaccagtcttgggtgatcagtgaagtaaggagtttggatctgaaagggagcaaatgaaaaattatcatgacattaaagtgatcagtaatgcaatgagactatgagttaggactttgtaactatactcataaaataagatgaattctggctcacctcagttcctggctcaaatttaaaagcatggttgtacaattgcctgaataggtatatgggtaaatattttttattgttaattactactatttattaaacaccaaacactgactttcattatttaaaaaaatctcatataaccttcacgttaagcatgtgagatagacagtgatatccacatcttgcagatcataaagaaataatattgcagtaaactcacatatgccagaattttggttaggttgcttagaaaggcaaactactcatcaaaggaaatgtgaccagccacatgccttaaaaaggacaacataacatatttaaagtctctaaatagattgtagacaatttacacagtactttgatatttgtcctttgtcagttttttgggggcagagttgctgtgtgaaagatttgcatttttatttgcatcctggtctagggaaacctttctaatccctgagtatgcactcttgggatttcaagactttagagaattgtttcccaaagtgagttccagggaaaacatgttattgcaaaaaacctctcagtggtaataccatcaaatgtgaacgaacatacctttaattattataaatgaaatacatgttgctgtgatttagtggtgaataagcaaaacctaaattatactggtgattgaaaagattgcagaatcttctaaaatcagtatgtaagatacaaaaaggagggattaatgtacatatatttattttaaattattttgacatatttgagaagcaactaccagaaatatataatttaccttttttagctgtaaaacaaagtttatgtattataaggttacctacatgatagtccataccctgggatgaactttctgctccctgtacccaatctggcaaaattttactcacccttcatggtcccgaaaatgccctccctgtcgtgtttttatagcagttaatgtatatcacgttgtattacaattcagttctctttttctgtagcatttagaagagacatctgcttcttagaggtctttgacatgtatttgtggaataaatgaaggagtagatgaataaattatatgtttgattaatttagcaagatttttatcgagtcttaattatttggaccagtttttctgactactaagaaatgatctaagaatgatccagcaggtgggtaactaagattatggttcaaaatgtttgggaacacttgctgattcctctttctttactgagtgaatttgaaaattaaaaggattttggagaaatgactttttaaatttgaaaatgtattttattatggaaattttcaaacatacagagaagtcaaaagacaattacagtgaacaccagtatactcaccactcatatcttatcacttttctgttatcttatctatctatattttaatccctctattcatccatcagtccatcttatttatttataatgcatttcaaagtaaactataggcacttccccctaaatactttcaacatgcgtattgttaactagagttcaagaatagtttacagtttttttttcttttgaggtaaaatttaaatacaatagtgtatataaatcttaagtgaacatttgctagttttaacatatgcctatgttgtgtaaccctaatctctatcaagatacagaacattaacatcatcccagaaagtcctctcatggtccttctcagtcaccttctgctcccacacctcacagggaaccacatttctcacttttccccctttactatagattagttttgccaaaacatgttgtgtttaaggaatcgaagtatgtaagtgtttatgtgaaaaacagaaaggggaagcaatccctaaataaacatttacatctattacatttacatttcagttgaaactaacaaatgaaatgacagctggaaaactacagagggcaattgatgaaggaaacttaaaatgacttcatgtaatgactaatgacctggatttagaggaatgtcagaagtacacatggctagcattccattatgccatataattgctataatggcagcagactgtgtaaacctgaaagtcacttgtcaaagaattttgcctggtagtcaacaaatgtgatacaattctgtgacccaaataaccacatattttacaaaagttgcaaagtcaaaatatggtgattgtttcaaatgttttggttttgtggtagaattgcttaatatttggcttttagaatgatttattataaaatgttgaaaatatagttttaattaatgtacaatgaagagaaatattttggaatgtatgaaattactctgttaagagtcttcatatttaagatatagttttaagtagcatggctatacatcatgcatagatgattatacagatgtaatgaatcccagctgttattcaggtaccttgtgatatatgtgtcacctaatatatttaaatgctgagcttttgtcagtagagaaaaaagtcacgagtaatatctaaaaattagcatggcttagtctgggacactggccctcgcagtctgttaattacttgtagtctctagcctctctcttttattcataccacagccaaacactgagtattaacggatgggttttaagaatctaccgaaaccacccatctatcttccttctctccctcattctcttcttccttctctccttccttcctggctacttaaacagatatttgttgtgcacttgcgttgtaacagtgttaaacggtggagatactgtgatgagtagaaagtaccttaccgtaaatcaggttctacagatgctgtttgcattcgtaaacattaacctctaacgaatcagaattcacttaaaaaatcatacatcctagaatttgtgaatggattttgtgaagaacagggcatgttggtatacgtgataagattgattattcaaagttgatcagatgtctatactgttcatttaattacgttatctctacagctgaaacaactacacttgctttaccattgaccatctgcaataattatcatgctcagtgtagccattagtatagttaactatctttttacttaaaaaagtttcactgtcaattttgttgatgttttcaaaaaaccagttcctggattcattgatttttttgaaggattttttgtgtctttcacttctgcactgatcttagttatttcttgccttctgctggcttttgaatttgtttgcttttgcttctctagttcttttaattgtgatgttagagtgtcgattttagatctttcctgctttctcttgtgg

SEQ ID NO: 126983 - DNA, 2281 bp, Homo sapiens
aaaataaagtgtgtacttttttttccataatgcaattgcacatctaatagattacagttcagtgtaaatgtaacttttatatacactgtgaaaccaaaaaattcgtgtgactcactttattgaggtgatctggaactgaacctatggtatctccactggtgtgtgtacctctgaggtctttccttgatgtaatgtgtgagtaccagtttcccctgcctagatcttcaggactagaattgcagctttgagaaggtatgagagcactggaggggaagcttgagactgggccactagaattgtggagtagagattggaagggaggattggaaagagccatttctgagaagcagagatgaagggattagccgtggagtagatgagtgaaatagctaagcaaggatgtaaacttcagggagaagcatttccagaggatagctggatgctggggtataagacagaatgatttgtagtagtatgtccctggtgtagtcaaggaagggctgattctaactgctggaccccggcttgatttcacattgtgtccacattcttttgttgccaagtaatgttgtcatttgcatgcaaagttcctctgaggcaagaagtgtttcctagtcatttttatcctattagtgtccagcacatagtagacaaaactttgttgaattttagttcatatttgtgaagacctgtatatttaaattcaagatacttgacaaatggagattggaagttgtaatttcttttttaagagattgtgttaggggtgtagaatgagagggctgtgtttagtaactgatagtcttactggtcaacatctatcttctgggaagaagcgtgactaatcctacacattcctttcacattggctttctctgctttcttttgcctatcagctttgtccagattgtaaacaataacctagaagagaaaggttttatatttcattatcatttcttctaacaacacagctttgtgtgaataagacaatatcaagtagattgtttaccttgaattaaatttcccaggaaacagttctagcatttaactttgattaaaagtgaatttttgttctctagaggattgtcagaagttgttataaaaagagctatgtttggaaacagtgggtgtgggactcctgaatataatagtaatttaaactcagaggtttttcataaaaatcttctttttttaataaaaaagagatgacagtttataaaaaaatgtagttctataattttagatgtttaagaacataaaaatggattacattaatgatatatagatttacagtattctttgagactgtcagcatgttattttaaaaataattgatatgtgtctaatagtaaacaatttagtatttttggtgaaaaatactttaaaaatttactgctattataattcattcatattggcctttaataggtaactccgttgagttggtttctgcctcagaaatattttgctgttatagatttcatggaatagcaaagagcaaataatttgtacatgcttgtgtaacataatgttaaagaatatttaggaattgaaaatgttgaggaacagcttttcctggcatgcatgcctagagagggtttgcatcaccactagggaggacacagaactgttaagatctctggcgttttattacatgtctgataattatttgttcacagccagacctaccatattcagttctgcaggttgtgcactgcataactgtaatgatattcacatgtgtaaaacctacacatttgtatgtagtgactctgggttttgaacaagataaaaaaatttcttaaggagtttacattccagtgggccagacagataatcaataaataagataggaatatatcagataaaaatagataccatacattgtaaggtgaaagcggccagatggctggtttagaagaaatagtaaaatgaaaagaactggtaatttaaaaaataaaatcttttataaatggtataattaaaattattttacatatatttctagacgttatcgtttttgcgttttgttgctaaagatagtctgacacagttatttgttttcactttgggtttttaaaaactgtgatagcagtgggatgcattaatttattttttttgagatgtagtttcgctcttgttgcccagtctgtggggcaatgggcgtgatctcggctcagtgcaacctctgtctcccgggttcaagcgattctcttgcctcagcctcctgagtagctgggattacaggcatgtggcatgttgcctggttaattttgtattt

SEQ ID NO: 126984 - DNA, 1803 bp, Homo sapiens
agaggcatggggcagaacagtggaatatatgatacagatatccaaaaaatgaaatctaattgataaaaaagcattatgtcttagtttaattggcagcctttttgcttctagggatatataaatagtaaacttatatcatataatgatggtgctttggattcattcatatttggattcaaaatattgatgctgcagtattttattttgagtaatttgaatgggatgacttatgacttaatggaaattttaagaaagcctgtttatggaaggtggatcaaaagtcatacttttagtgatagattctgtcaagggatacttttaaagaaaggttaaaatcatgtcttttattcaaatgtaaaaagaatgggtatcaaagactttattaagctcattaattaatgaggggatcagtaagatgttacaaataattcaaaggagaattttaagagcacacatatatgggcaatcaaggatgctgaaatgaatgtgaaacagacgcaaaactggttaatagccacaggccaattatccatttcatttcactggacacaatttatttgcatttttatggaaaagaattgtttgtattattctgtgtcttacaactgcatggttgtaaagtagcagaaagacaatgtgaggctcatattctgactgactcagataatctggaagggtatactagataggacatccactaatattttgcatatttcagtgtttcacaattttcctgacaaatcttaaagtttagaagttttcctgatagactttgtatcaaattttaatttcatgggaaggatttcattcagaccatgctagaaagatgattacctgatgttttcttatggtttctcccttaatcattcatcattccatctagctgtgttagagtgttaatggttttgaatttctcatttatatctttgggtcagtaaattgaatttaatccagattatatttttgggtaaagagaaacttaaaaaaaagctttaaaactaagggatctacaaacacttattgattatatactttataaaagcccatctaattaaaataaattatctcaataattcttaataatgaaactataaaaattataagaagaatcttaggaatattttttagtaattttttttgaaatgatacacaggaaatattaatgaaattagctatatttgagtgggtctttgtatttaattccttttatacttcctttagtgagttgagaatgaatagtttcccattttttaatggggttaatcgcttaaatatggagaaatggaaaattaaatgtatttgatggagagcagaatcaaagctatgatcacaaaatatatactttttcaaaattaaaataaaaaattttaactttatttttacccatgaattttgactgagaataagttgtcacttgatgagccacgtgtggtggcctgcacctgtggtcccagctattctggaggcagagatggaggattacttgagaccttcaagttgaggcttcagttagttgcgatcgcatcactgcactccagcctagctgacaaagcaagaccccatctctaataaaaaacaaaaaccaaaaaccctcaaaaagtccaaagttttttatatggtttcaattcactgttagaaagttgtctcacaatgctttgatgatgtattaaatatatgaatgcatgaagttcttactgagcatgcagatacagttatttaagtgttatgtgtatcagctgggtgaggtatatttttgagacgtaaccctttacatttgaaagtctggtatttaatttggctaaa

SEQ ID NO: 126985 - DNA, 2522 bp, Homo sapiens
ttatatttactcatagaatattgtgaactcatcagtttgtattagaaacatttgctacattttttagtggctattttcaataacattttagcatcctgtggtgacataaagcagataacatagttcattctgggtgtaaggactagcaaatggtgaagattttagattgttaggattacataggataattatatgtccccaagtattgagtttatatacaaggagattaggaggatgtagagaaactagaagttttgaattctaatagtgtatccagtcattcaaggagacatatcctgaaggaaactggaaatacagaatcagagactggttaaaaataaaggctaaaaatgttctttggggattcatcagtatggaaatgttagttgatcttgtggaagcagatgagctgtgaaggagtgaatcaagatgaaggagaatataggcagagaatcaaagggggatgctggtgggatagaagaggaaaaggatcttgaagagagtgacagaaagaacagagggataggagaatcaggaaaattttctgtttggggaaattgtggagtaaagaactttttgaagggaagtagagcagaggcagaggagaaagataggaggaacaattttattggtaatttagggtagttttcctggtaacttagggtggtacaatggtaagttattcatttgttaaaacagaaagcatattatgtttatttttgacagaatgatagcattccataagtttttttttttcttgagatggtgtcttgttctgatgcccaagctggagtgcagtggcatgatcttggctcactgcaacctctgcctcccaagttcaagtgattctcctgcctcagcctcctgagtagctggggagtacaggcgcacgccatcacgcccagctaaattgtattttttggtggagatggggtttcaccatgttgcccaggctagtcacaaactcctgacctccagtgacccacctgcctcagcctcccagagtgctgggattacaggcgtgaaccaccgtgccctggtgcattctataaaaattgatcaaagtcttttgactctttaaaaaccacttttaattaaagactcgatagagtaagcagaaattatttacatttttaatagaaatttagtcatacaatgaaaatgcactcgaacatttgttgatacaaagacaagatttatactaagaagtagtcaaaaataccaattttatttattgatttattggaaaaataatgtatatcttggagactggagcaggctaagtgacttgaaagctgcaagagagaaaaaaaggtagcacatttaagctttaaatcttttagacaaaaatatctagatagtatggttctgtttagaaactcaaagatttatatgctatatcttgaagcaactaaaggacatggtgaacatttttcatatgtcacaaagtgttttatatttttgctttaagggacaaattagcaatatttggagacttcacaataactttgtggggagagctagggcatttgtaatgagaaaaatatagttttgccatgtatgaaaaagtaagttataggtcagtaaaatgtttcagtatcttgtatacctagaaggactgctgtgacaattgtgcctgtatagatctcatttatccttaaaaccttctagttttaaattggtacagacagtgtccttagtcaagtagtatggttggaatatatttaaatttttgtttatatattctgtttttggcccactgcagaatctaacagacaggtttttatagttttcttttttttttcaaggccagtattaagtaaaatgtagcaggtgatctgattttgtataattgataaatatttagaatgttaggtttttagttaggaaaagaccttattgatcatctgcatttcacctgcttttgcagataaaggacttgagacacaggaaaattaaatattctagttccactagaagtgagctatctgactgtcaatatgtgtatttccaataatctctgctgcaccttatcttacaatatctgtgctaaaatgtaaatgtaaccaggtagagaattaccattgactcactgttgatgtggtttcagtaattcagcaaaccagaatcctgagtcaagtatcatgtagtaggtaagagaagagagagggaaggaaatctaggcatgggatgttcagtctgttactgtaagaattgctctggtcttggagacaaagggcctgggattcagttttgacaatgccacttattaactgtgattttagagcaaaaccctaaattctccaaccttcagtttctttatatatgaaatgggaataaacattgttgcggtacttacttctaggttaactgtgagaatcaaggccactgtgagagtcagtttctagtttaccaacatttatttgctgttactatgtgctaggcaatattgtagccttcaacaatacaaagacaatggaaacttttataacatattacaaaaggctaaaaactaagaagta

SEQ ID NO: 126986 - DNA, 1737 bp, Homo sapiens
ataatgatttactagtgtcatagtcttacagttttgtgggtgtattttttccttttgcctggggttcaatatagtccatatttttatattgaccattaattaatattatggtaggaaaaatgcagtaatcttgaattgtgataaaaacatagaacatcatgttgggctttagataatcatgcaacctgactgtaatctttttttttggcaattgtgggaacaaattataaggacaaataatatcaaagaaggattttgataggattttccttgtggaaaaatttgcaaataactgctgtcattcctatcttctcctagttaacttttcttctttaaccacttaaaaaaaaagacaaggaaaacatttattaaaaaatctcccacgaatacctttgcttatgaagtataaacaaaacaataataaaatagcctgactcttttgttctttctttctaactttctgaaaggttaatttgttggcattaagttagcttctcatttctaatttgtcttcctctattttcttttagttcttggaatttgcactaaaactcttaaacatcaatgtgttcagctgtatttgtgaaagaaatattccttatctaatagcatttagataataacagttaaaatttcttaaaaaactcaattcgagtgcccaagtagttgtgtgcttattctgtttagtttgtttattgcatttcaaatgagtttaagtgtgagttacaatttgtgactgaggctctggctaccctctctccctgtactcctttgaccctcatgctaaggtgacatctcagcccacacagctgaatttcaaaataaagcatattgcctggtttttagttgtcttctggggcctctagaggtgcagtaatacaaagagctactccatgaagcatttttctttcattgaaatctaagataactttattcaaattctctgattttccaagtcagcttcatttcaaagcagaaagccaagaatgctttccagactttagcaatttcctttattgctccatattctttcttaggaatgacagtgcacacttgtaatcctcctaccataggatccccctgcactgaagagggagttcccggtgaatttctgatcagtaaaaaggatatgttttaagggaaaagctatattttactataagaaattatcgatgatatataatagtaacagaaacttttgcctgtcatttaggttgctgtgacagagggaaaggacatgataaatggcacttgaaacttttgactagaagtatcacataccacttttgcttgtatttcattgctcaaagcagtgacatgtttactcttaaagggggagtaagtaaatatagtataatgatataataaagatataaaggaatgtttgtttatcatttgtaagtactttcatagatctgattggttgattgattagtttatttaaataaaatttattgaatgcttactgtttatcattgttgtattactagtgcctatcatatgcacaagggacaagattcctgcactcatggagctaacgttgtgataatattgttttggaaataagcttgtcagtatttatcaagaaccttaacaattcttttatcttttttccccattaatttcacttctggactgctacactaaggagatattattaaatatgaaaatatgtataatgataagataacagttttctttgtaatattgaaaaatcagaaacagatgtctagtagg

SEQ ID NO: 126987 - DNA, 2813 bp, Homo sapiens
tacctaggaatccaacttacaagggacatgaaggacctgttcaaggagaactacaaaccactgctcaatgaaataaaagaggatacaaacgaatggaagaacattccatgctcatgggtaggaagaatcaatatcatgaaaatggccatactgcccaaggtaatttatagattcagtgccatccccatcaagctaccaatgactttcttcacagaattggaaaaaactactttaaagttcatatggaaccaaaaaagagcccgcatcgccaagtcaatcctaaatcaaaagaacaaagctggaggcatcacgctacctgacttcaaactatactacaaggctacagtaaccaaaacagcatggtactggtaccaaaacagagatatagatcagtggaacagaacagagccctcagaaatggccctcttctcttttccctttgtccactgctcttaacttcttgcctacctgatttctttttgaagcatcatacctgtaattttagctctccattggatatatgtgtatgatgatattcctcagacttctcaaacccaacctagcccataccaaactttttttcttcttctggttactattttgattattgccatcatatttagtcacaagtcaaagttagagtcacttccatctttaacttctaggtttttcttatcatctgtatccagttagacacagagtctttttgggtctacctgaaaaatatctattgaatatttttcttttctccatttactaagtccaggtgccacatagatctctccttctttgactatgatatgttttctctagtacattttccacattgctagcagatttatttccaacatgatttggataatatcactttcctgcttagaacttctgctgattccattttcttcttatattgcatatgagtcctagactgctgttctatctttaactctagacattctcttttatagttctctctcctctaaaagtcaagacttaaaaatatttcaaatgatgaaattttaggcttcttgatggctactgggagaaactagccatccaatatggatagtatggcccctacagccttgctataataataataaatgggcaaatacaatgtatttatgtgatacccataattaggttaataagcatatttctttttttttgtaagtaaatccctgtgtggatattttagttgttgggaagcaagggttaataacatccaggtaacaatgagggatgtatgttttatttacacatatgctttctatacttggaaactaatatagcagattatcttggttaagctgtacagctcagctgacttttataagaaaacaatagatcccctgaggtaatactaatgtaagtaaaaagtaattatggccattagtatatctagttgggatgagaaagaatgactttaattgttacctatttactaatatttttacaattggttgtttcctggcctctttattctcctagcgtatttgagatgagatgagatgttagttctctaaagtgcaacatatttttcttcttagccaaatcctgttattaacctcatttgccttagctgacaacaggtttcccttaggcagtgtaagcatcgatgctctgaggaagaggataaatattaattggagtgtactacttcttggagacctttaagaagtgctaaatagtctgagaaagtgatttttgcttctacttcgggagtgtttgtttaaatacttaattacttaatttgaaagaatactagaggtcataaacagtaatgaatatattgtcaactagaatatttttgcatatactcagaatgttttgtccttttctcaaaactaaagcaaggtaataaacaatgatcatagttaaaagggtaattaaccttaccgtctctgtaatcccgaggaagtctagacatgaactcaggagttggcatattgttttcaatatacataccagccatctttgaacatttattctgtaaaatgacttgtattatgcttaagtgagtatgagcagtgtgactcacataagtaggagaaaagaagccaaaaactgcaacaaaatattccctttaaaatgaataccatctttacagaactgaatatatttctggactgtatatagaattggaaattttagaactaaaagtttttaagagcttactatgtgtcaggaattgttctaaatactttacatatattacctcatttaatctttccaatagcactgtgaggtaagaactgtaattttacagtgaggaaactgaggcacatagagattgggtgacttgcccaaggtcacccagtaggtgctggggtgaggatttacaccagggccttctcgcctcaggggctgtgcttttgaccacttgggtcttctgctgatcagtgatttaatctgctatttggtcaatctggttttttacttatgaactttcctgctactactcttagctcatacttagtacagttgtcccttcatatccatggggaattggttccaggacctctcaattgtaccaaaatccaaagatgctcaagtccctgatgtgaatggtgtagtatttgcatataacctatggacatcattttgtatactttaaattatctccagattacttaggacacctaatacaatgtaaatgctatgtaaatagttgttacactgtattttttagggaataataagagggaaaaaatgtctgtacatgtttagtacagacagttttttcccaaatatgtttgatctgcttttggctgaatccatggatgtggaacccacagatatggatggcctac

SEQ ID NO: 126988 - DNA, 4205 bp, Homo sapiens
tatattgcaaggatttgtgtatttggattgctagaaagttaccgtatagtattatgacagtacagtaggaaacatttcagtgtgaagaatagtatgtctcacataaattttaccatagaattaagtaagaatcattaaaatattccgggtttattaaaaattcattattctactagatgatctttaaagagcaataagaacttgaagaaataataggaaagctttggtaacaatgacactgtgttaattgagttgcaagaaggtaaagaatgtattaacagaatggatccaaatttggcaaaaaaggtttgtaataaatcaaggggggaaatcagttaataaagaaagaggccaattatcagtgaggggaggggagtgtatttaatgattctaaatgaaaggttaaactgcttgggtgaatttcagtttaacaaaaaggaagaaaagcaatatggataattaggcagtaataagagcatactgaaaaaaaaaagcggaaaactgccttaggtgctaggggaatattggctaatgaacttaacctcctgcagttatctttgaatattcacttttgctttataaatgggagaagtgatgtttttagttattttcaaggaggtatgattccttagcacactttatcatattgtggactttaaaaaaagtaatttcaacttttattttagattctggggcacatgtgcactttgttacttgggtatattgtgtgatgctgaggtttagggtatgattgatcccgtcatccaggtagtgagtataatagccaatagttagtttatcaacctttttccccctttttccctccccactcaagtagtccccagtgtctattattgccatctttatgttcatgagtgaccaatgtttagctcccacttttaagtgagtacttgcaatatttggttctctgttcctgcattaatttattcttaggataatggcctccatctgcgttcatgttgttgcaaaggacatggtttcatcctttcttatggctgtgtagtactccatggtgtatttgtaccacactttctttattcagtccactgttgatgggcacctaggttgattccatgtcttagccattgtgcatagtgctgtgatgaacatatgagtgtgtgcatctttttggtagaatgatttattttccttttgatatatgcccagtaatgggtttggtgggtcaaatgatagttctgttttaagttctttaagaaatctccaaacttctttccatagtggctgaacaaatgctgttaaatgctgcttattgcaaatattctctagaatattgatattgaatctaccacagatgtttatgcaatgtcatgactatcaactgtcagttattcttaacatgaagtaggttgacataaacaccaacaatgtcattcagtctgccagtattgaaggagcagtgattctctgtagctccatgctggattacgccttgctaagaacagtcaacagtgggacacttagcatctgctatatagtaagccaaaaagggacatatacaaccaaggaaaacttgaaaacttttaaggatgtggtaaagctcaggtcttagtgacatctggctctgtacttttgtatttttttgtattttgtattttgggggaggctgccacataggagtccagatggaataactttggaatagatgaatacactaactccagttatgtgaagaggggccacaaacagccaggcaaagaaaagaagacatgcagatcgccatggaaagctcctctttggaagcatagtcaccctgtgcatagctaactctattagctagattttcaccatccttttatctatgtgataacattgaaataacagcaaatattcaagaagtggagctgatattctttatttttattatttttaataatgtcattttggaatgacaataatagttttatttgttaaaataaatatagggtatacgtacaaaattaagcatgttgcttaatcaaataatcttcattcatttttatcagcactattttgcattttttttcttttttctttcttttttttcttttagtagagacttggtttcgccatgttggccaggctggtcttgaaatcctggcctcaagtgatccacccacctcagcctcccaaagtgctgggattacaggcatgagccactgcactcagcatagcactatttttggagcagtatttctacaaaggaaataactaccatgactacaacagttattagcttattaagatgtctcataaaattaagttttaaagtttcaagtgatgtttacttttcaatttcacatggaaagttagcatgaaaagactaattttttaaataattgtgtcttttcttaatgaaaagcataaatacatttatagttgttggagtatattgaagaaattacagctaaatattttggttggttacaattattggtgattctggaactgtggtttacctacaacataatggttgagtgtctttgaagattttattgggcaaagcaggattttaaatcttgccagaatttgaaatacagtatatcatcatatactatagctatattttgaatataacttttaattttgtatgaatattacattaatgagcaacatgatgccttagtaagttaccactatcaaatggcagataataatggttgagagtagtttctctgaacttttccagatatgttttcttagaacttttttttaaagagatgtgtacttgaaaggaggatattctctttaaaattcatgtggaattggttgaaataaattcagagtatatatatacatgcccaaagtaaaacacaacaaaactgaatcgtgagttgacatacgttaacaatattagttaaattacaagttgactggtgaacaaaggatactcttatggagattatgattttaagatttttttacaagtcattttattgaatgtggtacagaataagatcgtatataacagttaaattttcactgacatttcaagaggtggaataatagaggaaatacccacggactaggttctagtctgggttttgtttccagtagctaggtgacctgagtaagccacttaattagttaggactttattttcttaaagtcatgatgttgtcctgggtgtccccttcattaactttcacactaatatgatatatatataggctggctgtgatggaacctttctgaatcctgttcttccagtttagtatttattctagaggataacattttgaatgttcagggacgttcaaaagaaatataacgtgagccatatatgtgattttaaattgtctactaacactttgaaacaagtgagaaaagaaacaagtgtaattttaattttaatattttctaacccaatagatctaaaatatttccacatgtaattaatattaaaatattaatgagatattttacatttttcgaaataaggtcttaaaaatctggtgttggtttcatttggcacatctcagtttggactagttgcatttcaagtgttcagtaaccacatgtggcttttggctactgtattggaccttgctgctaaagttatggaatctttatatctatacccatgaatcaaatttagagactttagagtcagctttaattaccttttgttttctcctctcttctatacaataatgacagagacttgcattccctagaatctgtcaagatttgcgggtaaatcagtacattttgctcttatttccaagcatctggaaagagtactgatgtttatttccaaacatctggaaagagatatttctgggaagaaatatctgtgagtcctcttcaattccttaagtcacttactgccttagtttagtaaaatcagacttctatctctaatattctacaaaaactctttggaaaaattctcaaatcttctcattgctaaatccaatggccacgatacaaatgtttcttcatctcttagcagaaatggacagtatgaattcttcctccttgaagttttctggccctttgttgtatattacatccttttttcttggttctgttttagctttgtatgctttgctggttccttttttggccctcttctctttatttatttatttatttattttattattattatactttaagttttagggtacatgagcacaatgtgcaggttagttacatatgtatacatgtgccatgctggtgtg

SEQ ID NO: 126989 - DNA, 1016 bp, Homo sapiens
gttgatctttaaggtctctttcatttaaaaaatgcatgaaaatagctttagggatcaaaatggaattgttaggaagttcaacataagaattaatccctcaggatatcagaaaactatgttgcatagttttaaagttggagtcaaaactgacttgaaattttttaaagaagagctatattggcacatgaaatagaaattctggaacagataggagacttggaacaccaggtctttattggtgaaagacatcaaatgaatatatacttataaagattatgtctgtagttgcaattattgaaaattgcaaacataaatgttggcaggtagacgttttacagaaggatgagatcaaaatcctttcctatttatttaaaattactcaaaataagatagtggtagaaatctttgtttctttgttccttgtaatttattctgggagtagagtttttaatattctaatggttaattttgttctggttatctccatatctcttgtcaacttaagatgtgtttcccactggtaaacacagtgtccgctggttcttgctaaataaagataccatagtctatattctgcttcatattttaggtcttggaaaagtggaagaaatctctaaactaaacttaaacataaccttatttgatccaaggtcagtagatacctttcatttttcttttccttttagaaaaaaaaaaggcactgttttggtgagtagaggtggcaaggctgggaaatgtgtcggtagctgataagaaagggaaaggccttaaaacgacacccaccaaattttatcagtgccttggagctcaggaaagtatttctttccaagaagagaacaggaatgccttttaaaaaaattgtttatttccattaaggagaaacctcaagggcccatgaaaggttattcctttgcataatctagtgacaggtttactcatactcagaggttacattaatacttactgatggcacaagtataagtttcactttattaaaaattgtatggatgttggaa

SEQ ID NO: 126990 - DNA, 1062 bp, Homo sapiens
agacggcatttgcaaaggacctcccaaatacacgttaaatattatatgtaaggagtcagatttagctatcgaggagaagcattttgaatgtaagtttacataataattacaacaaaattaattaggatattagagtagtgaacagtttaggtttcaagcaggaaatagaacacaaggcaaatcaaccgtcatataagggtgtcaacttatcttaaatacttttggaattaataagatatagaggcatacataaagataggccacagatcagtcagtggctgatttctatttctggctgtaaatggactagtttatttcaaactaaggcctacactgtgaataatgaaaaaaactggattagaaaaatatatatatctaaaggcattggagcactaccaagagctaaagatctaagaatgaaaggaaacacactgaagtgagccctgtatttggtgtcatttttcaccttgggttctgtcaatttgcaagcaacacaggccaagctgagaaaccaagcagcaatagctaagatggtgacaggatgagcagaacttttggcagtttcacagtgcctgcaagctaaaattcaggaaggaggaagaaggaccctggtaaaacactctaagcttttcattggaattcttgtggggctatatcctaggagttaggaagaactataaataggccactacttacaaaaatcaaaatgtattctttgataaacccaatcttgattttaaggtggtctgcctttacttcaactgtctgtcattgctggaagcaagagacatcatgcagagtttctataatttttttatacgcaacacttggcatttaataaaaaattataccatgcatattagaagccaggaccaagaaaaacaatataaaacaagaaaggatagaaacagtctcacagtaatctagatattggaatgattagacatggactattaaataactgtaattggccaggtgtggtgagtcatgtctgtaatcctagcactttgggaggccgaggtgggaggatcacttgagctcaggagtttgagaccagcctgg

SEQ ID NO: 126991 - DNA, 1028 bp, Homo sapiens
acgaaagatgctttgtgtcttgagtgcttgtaaatcttgaaaggttccttgaccaaccaaggaaattaattggaacctgctaaaaatggaatttcatgttttggccacagtaataataatactgaataatgacccataattgtattaaaagccagttatcaattgagctgggaaaatataattgtgtatacttatctgttctatctgtactcattcccaatttttaaaatctatggccaaacatttttctgagtttgtagttaatgtagtacatttaggaaccaaatgtagaaagaccatgacttttatgaaagattctttagggaggatgaagtacctaggtttccagtttttttttttttttttttttttttgacagtaaaatgctggggagggaaatcctgtgttgcagtttatttttggtactttcaattatccatagtaatttgcagtcattactaagtatatgtacaagtgacatttttaaaataaataaaatgagatagtataggtattattattcttattatttgatatagattaaactgatttttaaatgctgttcatagccatacaaaaagttgatatccttggccgggaacagtggctcacgcctgtaatctcagcactttgggaggctgaggcaggtggatcacgaggtcaggagatggagaccatcctggctacggtgaaaccccatctctactaaaaatacaaaaaattagctgggcgtggtggtgggcgcctgtagtcccagctactcgggaggctgaggcaggagaatggcgtgaacctgggaggcggagcttgcagtgagccgagattgcgccactgcactccagcctgggcaacaaagtgagactccatctcaaaaaaaaaaaaaaaagttggtatccttaagacagtccttaacagcaatttattttttaaagtaggataaactgccttcacaatgcttatacacttaattatgtaataagacattttcttagttcagagacaaattacatcttagaaatgtttaataa

SEQ ID NO: 126992 - DNA, 1071 bp, Homo sapiens
taaaggagaaactctgtctgactaggcagtagggccagctggggaggtggataccacaggggcagagaagaaagagatggtaggatttctctttcaggcatgggtttttttttagtttcttggaaccacatacttgggtcatgactacaagggttcagggattctagaaataagtctaccgagtcaaatttatagctgctaggaagcaaagaaggagagctgtgtgagtgggagaaatggccacagtttatagagagctagaaaggaaggacgatggggggcttcctttctcttcctttcctcttaatctggatcacagatttcactgtattgagccagtgttcagttctatagtagaaggttggtgtgagggaattctcattgaatgagcatgcctgtaagtaagcattgtgctaagtgctttgagtatgctgtttttatttaattctcacaatatctggagatagtaatttttaacataatgaaacagatttacagcaagtgcatggcaagtaaaaagcaaggccagaatttgaatccacattcatttgactctaagcctgtactgtctaatatagcaagcacctatagttactgaacacttgaaatgtggtgattgctgcttgttaaaatcataataatttggatatattcatgcaaataaatatattactaaaatgctacctgtttctttttcctctttttcttccagttttagtttatgagattgggtcttgctatgctgcccatgctgggcatgaactcctgggcctaagtgatcctcctgcctcagcctcctgagtggctgggactacaggcataagcagtgcatctggctgattcttcctttttaaatatgcctagtagaaaatgtaaaattacacatgtgacatacattttatttctatttgataacactacgtctaaatcttttcccattgtacactgctgtatccctggagtatgtctgaagtgaactaagataaaatcccaaagtctgagatggaaaacactaaggtagttcctatgaagcaaaggtagacttctaaagataggtaataaacacctggt

SEQ ID NO: 126993 - DNA, 3868 bp, Homo sapiens
ttttgaagtacaccgtggtgacattgtatcattggtgtaagtaactcagaagcatactatatttgtatataaaattatttatacttatgctgatttaactggtaatccactgttaatatcatattgccaattattaaattgaatacatgttaaatacaatgcatttttaaaaaatcaattttgcagtgtaacaatgctataaaaagaattttttgcatttaaaatatgttagttgactaacatatttggatttggtgaaatgtatttaatgaaatgttgattagaaattattaaaaatacatgcatttggtactactttggaatattttgaaattttgcatcttggtaagcaacttttttgttaccccaatgttttcttggtttgtatagattaaaaagtattcctagaaggtgataattatgacatgaaaatcattgacatttatgtacatcaggagtttaactgaaaaaggaagtttgaaagactagcactggatgcttctgtttgggtccaaaaggtggcactgtttcactgttataatatgatgactggtcaggatcaaaaatttcattccagtcttaatgtagaaaaggaatgtcaaagtgtgtataactgacacaatgatataatacatagtcctaggacaggcctaaatggtttggagatttttgtttgtttgctttaaaagtaaatttacactaggaagactgtagccaaacttgtctaatttcttctggtttcaaatacttataaaaatgttgtagtatgattccctgttatgccagttaggggtagcaattaaggtagcagtgttactgccatttgatttggagacagtaaaaacctgctactgggtaaatacttttcccatttgtatttctgattcttgaattggaaggatttttttcttgttggatggtaatttataattggtaaaagcaagacatcatctgcttatttgtacttacctttggctagtgctttgtggaaatagatattctataaatgtgtttctttcagactattctaccagtattcatttgaaaacatattaaccaaatctcgttagtgactaatgaaataaattcaagtggagttttgtatggcagacatccaaggagggggattaaatgcttctcaggttttgagtgcttttaaaaatattaacctgctctttgaagtgtacttttattttgtcattccgagtactatttttgcaacctcctaaacaaccttttccatgctgggttagcctgtcatatgcttattattcttttgcctttggtttgacaaggttatatcctcacttagttggtgatggaaaggatacccacccaagtgaaagaggtcacactatacgcagacaattgtgcagtattttttttttcccgtgagaaacatgctgactatctctaaccaagtggacttaaatagataattgaaaaataaaacagggctgcttgatattcagggttgcatgggtccataaaagtatcctaccatatcatggagtatattaaaaagagcacactactattttatataaatattcatagtgattgatatttattatatacattaacttcaaaaatattctattcaaattgggattgatatataaattatagctattccagttgaactgtgttttttttttttttttttttttttttttgaaacagagtctcgctctgttgcgcaggctggagtgcagtggcgggatctcggctcactgcaagccccgcctcctgggttcaggccattctcctgcttcagcctcctgagtagttgggactacaggggcccaccaccacgcccagctaattttttgtatttttagtagagacgggtttcaccgtgttagccacgatggtcttgatctcctgacctcataatctatccacctcggcctcccaaagtgctgggattacaggcgtgagccactgcgcccggcctgaactgtgtttttaatgactcagttatgtgctatatctttgtcatgtacaaataacacaaactttcatgtgcttgttcttaggaggagccatttacataaaagagtgcttagttactagtattatatatttaacaacagatgatcgtgaagcaatattgttgctttgagaaagaaacaaaaaatctgatgctaaattcttctttagcattatttaaagtatttttttaggtcagggccaggtggctcaggcctgtaatcctggcactttgggagggcaaggtgtgtggatcccttaagcccaggagtttgagaccagcctgggcaacacggtgaaaccctgtctctacaaaaaatacaaaaattagccgggtttggtgatgcgtgcctgtagttcttagctacctgggaggctgaggtaggaagatcgattgagcctgggaggtcgagactgcagtaatctgtgattgtgccactgcactccagcctgggtgacagtgagaccctgcctaataaaaagtatctttttagtcttatgatgaaacatgctttctagaccatatccatgtattttcatacaatttagaaactgcttcattttagaagattgatgttggtttgattgcagttcataatatacatttaatttatatcaaatattgaatatttgcttttcttatacaatgcatcagtttgtttttaacatagatgataatttttgttactacattggaacatcctatttatttaagaaatgtgtgacacatacagaagtgtatattaaaatgttcgatttaaagctgatgataaaatacacttcgtaattttgtttagaaattgatattaacagtatacttcattgataaataagtaatctttgaaaacaaaccagtataacctttttatattaaaaaaatcttgagacaatgtattcagaatgtgtggtaatacaccatttctactataatattatgtgtgcttttctggaaaatttgcagtttccaaattcttacttaaatcagtagggcttattcaactttataaccagagcactgatgaaaacaataacaatgtcaataaaaatactaacacagtttaaaagacatgaagtttctaataattaaactgcagtaaaagtagtgttttacttaaaacataaaaggtgaagatagcttggtggtaggtggtataaggaagggttgaggctgtctgtggatgcaagggcagaaagacattatcattacaagtcataaatagagaaaagcttgtaagctttgtacaaaatgtactgataccagagttgtatgctctcctcattgttttgtgttactttgttttatttatttagttatttataaacaaagatcagggttaactttgcagtagcacttctcagagaaaggctgaatgtataatactgattccttcctggtttgctgccattagtatacgtagccttcagttgcctgtactaataaggcaaaacattaatcatctgggaaaaaaattacataggaaccaatgtaacttctgcattacactgaaatcttttctccacttaccaattgtctatgttaattcatgttacagaaacacatatatagcaaagcagactgtcctttctattgcaaggggttttgttcagagttggttgaccagtgttgtttcctaaagcatgggagatctggcagagggaggtgggtgcatattatttttttgcatatctttcttatttttcactgtctctttctttctgtaaaaagttggtcacagtggagttattgtttaagtatgttattcagtagctacatttatttaataacattattggttgcacaaaatatgatttgctgtcatcaagtcctcactatagtatatgtaggtggcatcatactctcttagtgatttacaaa

SEQ ID NO: 126994 - DNA, 1080 bp, Homo sapiens
tagtacttaggtcagagcaaagcatacaaactaaatatatgttcattataaaaaacaatttgtgagatacaactgagccagaggaaaacaaggtgtggggaggggtaagcagtagggagggagaaaatggaaatcatttcatcaaccagagctaagaactgttagatttttaaatgcatatgtttttatatatatctgtatgtgtgtatatgttttaaaaataagaatgtaaaacataacgggtgtaaaattctttaggtattttataggtattcataactaattatgcatattaaatttttttggattaatttatagaggcagaacaattaaggccccacataaaagcatcctaactttacttgctttaaaaaagtgaggaaacaatcaacaaagaatttagaaatgaggggtagaattttctgcctgaatactttcagtttactatgtaaaatgagaaatgtgcagggcaatatttaaatgtttaatttttcttaaatcttgtggaaaggatactgtacctgatattgtttccctttattttgttattgttgccatcatcattagtgtcctatttgttgactgctactctgtttcatgactgtaatgttttgtagactgtctcatttaattcttgtagcaactccatgagatcagtgttcctgcagtcagtccccattttatagatgaggaaatgagacaggttaaataatctgtttaaagtaatatggttaataagaaatggagacaagatttgaacatagttttctgtgtttagggcaaggactattcaaaacacttctccaagtttgatttttaactttagtggtccatggtagaagcagagaaatagatgagtgtgagaatgcaagttgttgagagagacagacagagaatatttacctttcctcttccttgttgttgtttccaagctctcaactaattgtatggtgtctgcccaccttgggtgagggtgggtctttcttactcagtccagagcagatgtttggctttttttgttctttgttagtgtttttccttttgctactggaaatcactgtgactactagcaggaatatc

SEQ ID NO: 126995 - DNA, 1034 bp, Homo sapiens
tagcaatgaataggaaagccttattcagttttatgaggaagttaaagattccgcatgtatcttgctggggtttttccgtgtagctggcttattttatatatagcagtctgtcttcaggttaatatgcagatatgtttatataaattttatatttcattgactatatgtgatctatttctgatatggttaattagaactataaattagaatagctatctcaaaacatgttttattagctaggaaacacaatgcacgtatttaatggtagtattttataattagtgcattgaaacagaaactttgcagatttgaaccttgcaatctagttgtagcgacctgaattaaagagatgcttaaatactgaagagcttgtttaaagaacacaaactttaaaaatattagtaataagaggatataaaaatcagatgctttccccttcaaaaacaattcattgcttagtgcttacattaatataaaagcactgcatattgattggcaaaaaacttagaaaacatagaaaaatgtggaaaataaataattgataccacctttcagaattatttattttaaatatattattatataatactaatagtgaaaaattattgaatgatcactatgttcaagtcattacagtattgactttatatatattagtttatttaatatcacccacaactgtatgatgaagatactatgttagcccacttaacagatgaagaaatacaatcagagagatgggataacttactgaagattgcatagatttaaacccagcttctgactttgaagtttgcatttctaaaccattataagttactctctttcttttctgcacaatttccttctttactttattcttttaaggtttttcccttttttcttccgtcctgtctttcctgaaattggatcatagcagtttgttttttctatgtcgcatttttcacttattctccagacatatccaaatatatatttttccacaatgtaatttttacaatcattttttaatatccataaagtttaaccattgc

SEQ ID NO: 126996 - DNA, 1005 bp, Homo sapiens
aatggttacaggaatgagtgtgtaatatattaagagacaagattgcccttcggtaactcttacttttcatgtactgtttttatgtctttgtttttcacctttcttgagactaatttcatagttgttttctttgtatttttaggtatggcacagtcacaagggtgggtgaaaagatacatcaaggccttttgtaaaggcttctttgtggcggtgcctgtggcagtgactttcttggatcgggtcgcctgtgtggcaagagtagaaggagcatcgatgcaggtgaaaatgatataacttcgttctttaaagcacatacttcattgtttttcaagcactagaaatgagagtgctaattattattcctattctgggaactgaaaggttataaaaaggcattgaaatgaaattttactttactgaatttgttcttaaggtcttctaatacagtcgtattataatcagaggagaggttaataaaagtaactatcagttctctgggtctgtagtttaaatttttctgagaattttaaatggagattcttaagaaattatactaaatgacactgttttctgtgaatatggctctattagaatatccttttaatgccaaattattagtgtagttgcaagatgggtttgagtcacaatcagttgctctcttgttatataggtatatgatttcagtttgtagaaatgtctagaccattgatcccagatattgtattgtgttctttaagcatgttgctaattgaaaagattaagtgcagtttacagtggaagaactttggagtggagatttccaaaagttttatgcaaatagtcttctggaataacttagagaaaattatgttgtcctaaagttgatgtctagaacctagcttttttagtaagtttaagcagttaggcagaatttgcattttgttataggatttggtttcctgtattatcaatatgtattaagttcatgcgttgtggtaaatagttgtataaaacaaataactaaaa

SEQ ID NO: 126997 - DNA, 1055 bp, Homo sapiens
tttacatagtggattgaattaattgtgtattcagaacacttttccaaataagtagtatctgaatgctgcagtagcagttatgaaatcaataactcatcgtgccctgtgttttattgggagtgttgaatatttattgggagttatgaataactggaggcagtgtagcatagtgcttaaatacctagtttacagggtcaaataatctggattcagctctgctacttactgtttctttgaccttgggaagattccttaagcactctgagcatcggtttatatcttttaaaatggggataaaaataaggttaatgtagagattaaatgaggtaattaaaataacaattttcagtattactgtgtttaacatagtgatataaaattttaatcaacacaaagtgtatattctctactagactgaggtttttattttattagtttcacaataaaaatatttagcttttttcttttcccaattaatgcttcattcagagtttgtatattttttgtcataatttatggaggagtaatattgactgatttttgtgaatggctaatcactctattaaaaatgaaacaaaaccttactataccattagccaaatatttttatattttatgtttgataatctaatatttgtactgaggttaatatccaaaatatacgaaaatgttgatatgattttggctgaggaaaactaaccttttaagtatttcttggaggattctgttacctacgtctcacttttatttttaaaactcacctttcatcagggattttattatggctggttttgcttaacatgtatgaagaggtgaaattttcacttttctttttaattacttggataacagttggttagggacaggtctttttaggtgatatgcctcgtcttttttgcagaagaaagctacattaggttctgagaaactttatttttcaaaactggtagatattaatttaaattgcatcaaatctctatatggctcatatatttttatctagctcatatattccttaaaacctatcaaaattgttactgaattttctttctaag

SEQ ID NO: 126998 - DNA, 1016 bp, Homo sapiens
catgaagataaagaataatatttagtcttatccaaattgaatcagaccggcttcaaggattgtcagtacgtgagagattggtgttcagaactgctgcaccagaggcaaatatgaagtgtgtcgaaagaatgattttgtacctgagtgacttaggatttacacgctccatgtcctttgtgtgatgagctagttctagctaatgtgcaaaagacaaattagcctctacaaacacataggggcaggttgcgatccagtgcatctgtggtgctaacgatagttgctgatagaaattgagaaacgggaaaacaacccgcctccccccgcaaaatggagaaaattgaaagaagtgtgattcccttgcattgccagaatttctgacgtagaaattcgcgggtaagtgcaagtgatttgctcgttttgttctcattctgtaatgcagctgttattatgaagtacctgtgacagcattcactctggaagtcatagcctgtcacctcgatgtgatagaaaggaaagcaacatggcttttccgcacttttacatttgcccttactcacacagagctcccacacgttgctatggaattatcatctgtatttttcaacttaaattttgttgggtagtaagaaaataagtcttaagagattaattcttaaacattaaaaagaacccaagagctaaaaatgtttgaatagctataaaatagtcttagcaagctggtatatactgtctctcagcagacctgtgtacatttttactggccatatgcagttcgaagccatgtctttatatgtagggtttgaaggaagagaacatagatcgaacatttgtgttatacctcctgggttacattagggggcacactgctaccatgttactagccttgcagtgtgctgccttaactgataagagtttagtggggttttgggttttttttttaccccagccagccatcaaactgtgggtctaaccctacagcgaagactgagctgacctgccatattttgaatttcagg

SEQ ID NO: 126999 - DNA, 1082 bp, Homo sapiens
tgaagcaggagaatcgcttgaactagggaggcggaggttgcagtgagccaagatgaggccactgcgctccagcctggtgacagagtgagactccatctcaaaaaaaaaaaaaaaaaagattaaggagtaaggcttggtgctctgaaagcactcatgttctgacttttgggtagaagtaagtggatattgtcagatggttccattgatctcattcatttgtccacagtgttgggagaatggcattatcttgtgccggaagattgcagagcagtatgagagttattatgactacagaaacctgagcaagatgcgggtaaggtgcctggatgcatcctgatcaggccatagcctccctttgtgattagctttccagtgtggttctatgaaattaactttgtggtcttgcagaaaccctttttaagataaatcctctgaagcatacttagctatttatatagagaaatagcaaattgatttgtgtaatgcttttatttaatataaaaaagtgagcacttgatctgttttaaataccacatatgaaatatacaatctaatccaggattaacacttttagtttattgtggaaaatctccaccctgtttgaagagtttccacttacacataagtttctgtaacaatataccattcttagtcccataatctgcaaatctgtaggaatggctgacctatttctaaataatttagggccaaattctgtaggtgtcacctctctttagcttcagcaatgtgtttttatttgctggacttagatcaacgtttcagtacctaagagctcaaggagttgagtattctgtttctctgaaccaaatgttttatatctgctttgctcttaggttcaaacaagtcctccttgccctccaagtccttactcttgagcaacatgaacgtttgtgtcatcttgtaatacacaagatcctgctgagtgcttcagttcttcagggtttctaaaataggatcatcagtttttatacattaaaaaaaagagtacaatattgccttttaattttgaggtagccatttaagagataataccataaacctgtaacagctcataaaatccc

SEQ ID NO: 127000 - DNA, 1013 bp, Homo sapiens
agccaaggcttgatcctctctcttcatgccatgatgcactccctgcagttggtctctctgtgggcaaagcagtcaaagaaaagaactgatagaaggcactattgccactgccactgccactgcccccactgccacccctacagtgtgcagctttgtttctgagactgagtgaggccagaaatgtctacagcgcttcaccccacaggggatcttctacccagtactccgactaaagggacttttcttggagctttttctgtctgttcccatttgcagttccaggaaacagggaagtctaagccaggagatgtggaaggcaaaaaactaaaacagaattaactgtggtatggtcattctttgagtattcgtttttttcctcagtccatctgctcttacttttcagagtcctccaatagttgtgttatatagtctctccaggctgtttagttgtaatcagtgggagagatagggtggaatgcatgtactccatcttaagcagaaccctttaattagatttgggaacctcaaatcttggtcctttgccacattgttcttccaaggaactcctgaatcatggctcctccccaactttaaaagagtaagggaatcctttatgaaatggtacttctgttcccagaatttactcattcctctagctgaggttccactgtctcaattagtagcatcactatttactcagtcagaagaccctgatgtatctttgacttttctagcctccctcaaataatcattcatgaagttctattaattctgttgcctagaaatctttcaaaaccatttccttttcactgttcccacctttactgcctcagttagaccatcatttctcacctgtctgcctctgaactgtcagcagagttattctttggaacaggagtcaacaaactacaacctacaggctagctaccttattttgtaagggaagttttataacagctcacccgtgcccacttatttgtgtattgtgtattgctgcttttgcgccacagtgg

SEQ ID NO: 127001 - DNA, 1051 bp, Homo sapiens
accacttcaagtttgtattagtctgttttcacactgctgataaagacatacctgagactgggtaatttataaagaaaaagaggtttaattgacttacagttccacgtggctggggaggcctcacaatcatggtgaaaggcaaaagacacatcttacatggcggcagacaagagagagtttgtgtagggaaactctcccttataaaagcatcagatcttgtgacacttattcactattatgagagcagcatgggaaagaccctcccccatgattcaattacctcccaccttgtccctcccatgacatatgggagttgtggcagctacaattgaagatgagatttgggtggggacacagccaaaccatatcaaagttaaatgtgggaattttacaactatataggtctcattatcctccccactgtatgttgtagttgccacatgtattacatctacatacattgaaagtcgcatcagatggtgtcataatttttgcctttcaatagtcagacctattttaatgaatttaagaggataaaaatactttatttactcagatgtttaccatttctattattctttcttcattcatgaagttcccaggttccttctgttataatatttttgttgagcctgaagatcttgttttagtatttcttttaaagcagatccagtggtgaagaatcttctaagttttccttcatctaagaatgtctttatttcacctttatccctgaaggatatgtttactggatacagtattgtaggtgaacagttcttttgtgtctgtactttaaaaatataattccactgtgttctgaccttcatggtgtctagcaagaaatatgcagtcatttaaattactcaagtacaaggccagacgtggtggctcatgcctgtaatcccagcacttagggaggccaaggcaggtggatcgcttgagcccaggagttacagaccagcgtggaaaatgtggcaaaacccccgtctccaccaaaaattcaaaaaattagcccgtcatggtggcacatgtctgtagtcccagctactcg

SEQ ID NO: 127002 - DNA, 1485 bp, Homo sapiens
aataggttagatagatttcagcatgcctgattaaaaattatcttgaagcttttaagaaaattacattaaaaggaaaagccaagaagggtatagagatttcctgtggtagtggtgggtgataaaatatattctttgtactggattctgaacagtatcatttttttctgatatggtaattaaatgagaggttttcataattattcaccaagacctcattcattctagtgtacacagcttcagtcttttatggcagcttggagtttagcaagaattctgattaaaatctcatgcagtataataaattgcttttgaaaactgctctcatttcagttactagtccttggtttgaacaaagaaccaaaatgagaaagcactcagtgaaatgaatctcttgagatttgtgattaattatttataacaaattcacaagattaataaatactgacatagttctttagtgcctcttatctactttaataaaggcttgataatatgcaatttcagttgctcatgtataaatatgactttgaaatagaagatgtacctcgacatgagaatcaaaccaataattaaaatattaagcctctataatcaggactattttaaggtacctgattcattcaatagagatttttatacttttgttgatttttaggatattactagaaatgctactataaataatttcctttcatgcttttacgatcagcatattgggaataaatcaaatcaaaagtgatacttaagtgtcattactacctgagcacaagaaagaaggcgtaaatattactttatttcaggaaacaataaattgcttttttggcaacagaaatcacaatgaattagtataatcacaatgggtcactgcacacattatgaattaggaacacatgccgttatatggtacaaattctcatttgttacgtgtaattcatgtctaaaacctcttaaaatttgttctgaagctgaaaagctgtaagtagttcactgcttcctaaattgtagtgcttgccaaaatggaccccttggagtaagactttaaatttgtctagtaccttccttgctaagaactcaactcatctttccctaagcccaaacattatcttcattaatgcatactacatctttgtgaaacttatttcataaagatgtattcattttgataacactgaaattctagattatagacaccaacatgcaatatccagaatagagtatcacaactaaattctgcttcccctggctccacctgattcgctcattccgctttatctattgggcactccccagggctggggatccagcagtgactgtgctgtggaagcatacagtaggtctacctacagtcttgggggctctaaaggggctttccagaagaagtaacattcatctcaggtatttcttagtctttcgctctgccttctcctatgcagttctaaataattcaataagactccacattatttcaaagatttttagtgatca

SEQ ID NO: 127003 - DNA, 1013 bp, Homo sapiens
ctatttaaaaattgtacttaggaaagaaaaacccactttccttcccccttgtctttatctcttgattgaaatttggtttaaaggaataataattgggcttagtcttttgacaaagtcaaatattcctcccagtccctaatcgttttaactctctctggccatagagaagtttttcattttctgtctcttctgcctcagatagacatagataaagggatatttttccattcctgatattcaagttccaaaggatttacatcctggaaaatataaatgttttgactacagttttcaggaaatatgtcctttctctctcttgctgcttattgctgacttagactattgctatggatctaccatctgtacgtgggtaaggcaagttctcaacttcagcaaagatttagtgcaacctcaaactgttttgagaaagaaaatagatataaaacacatcaaagatttaaattaatgtatgtggatatgttagtttcctgatgtccttatatatagtgatgtttaaaaaaaagaaaaaagaaacaggacttgccagttttttagctcctaaaaaagaattcaaacgtttaaactgggctgcaagcatttgtgtttgaatcaacaaatagatagatgtctttggcagcagtaaacgctacccagccaggagtgtgaagtcatgtaactctatctagattagtcccttagaattccaaagggttgcctgctattaaccgtagctgataatgtcactttcacaaaatttaccatggctttttccttggcacaaagaaatacgttttaacttgcctagaaatcctacttgtgaaggggaggaaagagaataatagttgggtatgtttcaggtggaagccaagctaattgacaaactggatagcctgatgtcagaaggcaaaggtgacgaaacataccgcgagctcttcaacagtatgtgagtaatatgtttatctcaagttgattccattctgggggatttggtgtcagtactgagcctctctgca

SEQ ID NO: 127004 - DNA, 1053 bp, Homo sapiens
atgaaggttggattctctaagcatctatctgtaggccacggtcgccctgtgttttctccagatggcaagctttgatggtggtgagagctgcaggaatataggattcgattttgattatatatgctcaatatggcttctgctgcagtatacatttatagacttggaggtgttaaaatgatgtgttaaaaactttgtgaagtaacaaatagtataacatagcatattatattttacataagtacagaagcagcttttccattttgaagattgagagtgttgaaatagctctctttagaatttaacatatttagtttgatatctgtgagtagaatcaaatatctattcatttggttgtccgcatgctacagatttaggtgggagtttttgctcattcatctggccttataaccaaagagcaaacattctgggtacctaggaagggctgtgaggtaatccaaggagccagatgggaagaggtccaggctatggacatcatcatcacgcagcatcaacatttggtcattctgcctgactcatgtgcagaggaatattttggattgaattaaaatttcagtggtagaaattcaaactgaaagtaacattgacattttattccttacatatacaatttctgcttaagcttgcctaaaattgtaacaaccatgtggctttttgatattaaatactgcctctctctgccccatcgttacttcagttttaaagactttatggtcacacaaatggatagcagtctgagagtatagattctacctttgcgtaaacacacactgttcagaattttcatttacagtgttaaccaaataggaagatgattttgttagagatgagctctgtgtaatacatttaaacagaaggttactcccatagcaaacccaagaaatgtgccatcaccctttgctaaatgtggtgacttcattccattgccacccatgtgagtgctggtaggagtctggcgctgcctctccactggcaatggctggtggctgcaagtccaacctcattcatggacaggactccaggaactagagagac

SEQ ID NO: 127005 - DNA, 1019 bp, Homo sapiens
tcattatatggatgctacataatttaatcatttctgatttttgccattagaatgggtcttgcagtaaacatcttgatacacctctttctgtggacttgtacccatattgctgtagaataaattcctagacgtgtaattgttgggtcataggatgtacacattttacattttaattgatacttgatcaattatatattgagattttcaaatgaatattcatgttgttttttattcctaatgttgctttttcctttctttttaacagttcaaagaaaggtaaagtttgtcttagcatttcccagtggttctataaatcaaaatgaattttaaaagtatgtggctctcaagtatctactaagactaaaggtctttcaactccattcatgcctgaagagcctggatgcctccagggttactgctgaagtagcttctggcttcctgagcagtgtgccacttcttcccctgtgtccttaggttcttacttgtgtgtgagaggcatgagtcacagtatcagaacacaagtatgtgggagcaaagacctgagggctggtactctgtattgtttttttccttctctagaacataatattattttaaaatgaacaaaagtaaacactaggtagtgatcaagatttttttcctccttctgttgtcagtaatgttttattatacacccacctcatactggaggctacagttttgtccatatccttggcatttcatatatatacagcagtgagactcctgtgctttgttgattataacttttcatagaactgtggggatcttgctataagcacaagattatacatgagctggaagttaagtacagcacgattataactgcattgtctcctatatactgtcccactagctttcaaaaattatatctgatcaagccccaatccagctttaaaactctgagtacttcccattccttgcaggacgaagtccaatctccttatcatgttgtttctatcctcaatttaccttccaaccacattatcctccaccccctt

SEQ ID NO: 127006 - DNA, 1037 bp, Homo sapiens
aggcatagttaagagaaaggtaaaaaagtatgaaccttagttatcaactgatgaattcaagtatacttactgatattgtaattataaccaaaaacctcaggtgtattttctctatacaatcaaatagtctgagcagaaggaagatgagtcactgagtacagacttctagaaccagggatacctgggttcacatcccagtctcacaattctcaagctgtggaacctggggtaaatttctgaaccttaagagataattatcttttctttaaagtgaaattgattgtgtctacccaacaaggcccaaacaaggaatgaactcaatagcatagtcaaagtatggtaatttacacatagtgccattccataaatcatagtgttgtcatatgtcttttttattttattgaggtataattgacataaaataaatgacacctgtttgaaatgtacaattttagttttgacatatgtgtattcctatgaaacatcaccacaatcaggatagcaaatacattcatcactttcaaaagcttccttgtgcccctctcggttccctctcttttgcccctccatgctacctcatccccaagcaactactgacctgctttttgtagtaacttatctattactgtacataagtttacattttttagaatttgatatgaatggaatcatgtagtacatagctattattattaatcatatactacatagttttttggggggcataggggcaggggattctgtcttgacacaatatatttgagtttcatccttattcttttgtatatcaatagtttattccttcttattgctgaatagtattccattgtatggatatactgcagtttgtttattcattcacctcttggtagacatttgagttgttcctgggtttggctattgtgttccatttacctgtttttctgttttgacaccagtaacatactatcttgattgtcatgttttataataaatcttaaagtcagtaagtgtaagtcttccaactttacttttctttttcaaagttgttttgacta

SEQ ID NO: 127007 - DNA, 1050 bp, Homo sapiens
tatggtgatcatgcgctgtatcctttatccaagacattcataagacagaaacaaggattacagttttcaactactgacggaaactcttacccatctaggtcaagctgttaatggatccatttgactgcagtcactgaactcttgagtttgttcccaattttgtgaccttatctttatcttgtctacagtagtattttgaaaggccttcatatgtgtaaaggctccctagccagcaggcctgctaaagaggaagaaagtgtggtgcacatcaaatttttagagtaataaacttgagaggtatgaggtgttaataaacattgtcagggaaatagcttttcacacgggtgctatgactccatttcatactgacttgatggtttctctcttaattacccaagatgctttctgaacaccatttggactcatgagttttctccagagtcaacctcaagtgtattgatttaattagcacttgtttcaacttgatccttctgcatattttggcaaaacttggcaccttgcaaaattggaacataagcaagctgtaaaattcctggggagaggcacatggagaatgtcgtccaggagaagtgttcttcttgtcatgtattctcttttcaaagaaatctggttttagtctaaaagatttgcaaaagataatggggttacagggatagtgacagttaaagaatggaaaattaaagcatacgtatgaggggtttgattttgtgaacgtgttaatttccggaggttcttttgtaaggcatagaaacagcataatataacaaagtagtgttgtctctcctaccacctctcatttacccacctttaccctattctcatgttaataacaaaaacctgagacccagaggtttctaataccctgtatagactgatgtcacacaccatagcagtagcacagactagaacctgtatctccttattctgattgtcctgtgaacctaatgcctttagtgtatttgaattcagaatctcttttgtaaagaagagataggagaattcagctgtgttatgagctaaacaggcctt

SEQ ID NO: 127008 - DNA, 1135 bp, Homo sapiens
aggttattgtggcttacatttaaaatttttttgacatatcctcttgtttttacaaatcaagaaatgagtttttttaagtcatgaattttattataaaaggacctcacttgtgtttgatcttccatagaaacaaagagcttctgcccttttgtctacagatagaagatgacgaatagcatactaagtagtagtatttctgggtgctccataccccaccctccacaaccaagaaaagggaaaaacaatagaccaaataaaatactcttaaattgttgacagtatttgttttaaatgaggtcttctaaaccactgtttaaatcccatgtgtaagtgcaagcaaaggaagttgtatctgacaaggcacctggcatagctatgagacccaataatgagattgctatgaataaagacctaaaatgaccagtatcgcccattgcaccattttgtaattgcccgactgaaattccttcatgcaaggaaggctgagagaacatcctgtaagttttcctcagatgacctgacctagcttagggacccagtcagcctgagcatctcatggtactgttgtcgaaaatgactgtttatagaactgtttacttggtggcatgctattctgtggcccttgcaactgtccattatttccttcagttgctataaataactggtatttcctcttcaacaacaaaaaaaattcatcccactgggaagcaaattgatgggcaaatctaatatattaaaaaaaaaaacattttagagcagaatgcagccagctgctggaagaattcctcagcttggtctctgggcagtatcatggagaaattgaaaaatataaagcaagatgacacttcactggctgattaattgtctgggatctgctgtgctcacgcagcttttgtgtggctttaatgatgggcatgaacttctgtggaataaggctcgtttctgtccctttccggtaccaccttgtaatgcgaagtctacactgtccaggaaaattgttctttcagacatgtgtctgtagttcaggggagtacaaaagaggtttttttaaaagcacttccttctcttttttttttccctttcttcctctggctttttaatcttccataatagaaaagggagagatgtgtgtatt

SEQ ID NO: 127009 - DNA, 1102 bp, Homo sapiens
tttaaacctcccattttgatgtcagtattttttagggcaaggtgaccttcatctacttctggaataagtgttggcgcaggaacgtgctccaccagactagggttggaggagagatttgggggttggaagccaggctgcctcttagagttctgctcattttctccacttgctatgaacctccttatgaatgggaaactcagatgttgaagttggaaaagtgttattcagatatgattcatatagattctgtcgatttcgtcggaatattaacccttagtttaaaaccatgatattctaaatttgggcttgttgcaacacatcagtttctctttattctatttctattctgtttttaactcgggtatctctcatctgttttaggtttagcagtttccttacagctattgcacggagacattgaacaaatcagaagggaatattcatcagtattttctcatggagtatccataacaaggaagctgggattttcaaatattattatgcctggtaggtgacttgggacgtaccgatatgatgaaatatgggtatactatctgtttttgatgtttgagaaatttttcaaattgccagctttgaagcattcacatgggccatgctgaagaatgaaatgaggtatgtgactgtaagtaagcacatttttttctaaaatatccttttcagtttaattttaaaatatttccttttgtataaactttcttgtcagtgatttgaagctcaaaaatgtctttacattctgattattctaaagttgttaacttgtgggggccatggctacatttcattatgaccaggagaaggaggaaaactgagttactgtccagaaaatattgtactccttgatggaaaatgttggtgaagatgcttagaggatatcctaagttttgataaaaacgtactgaacactagttagccatatgtaaataagcagccatatgcaaatattatatgtacttctataccttttctagatctatttgtgtgtatgatttagatctatattagtgcccccaaaattccccaaaagtagaaaagatgtgggttaagcagttttacagtgtgacatgaatgccagattcattga

SEQ ID NO: 127010 - DNA, 1046 bp, Homo sapiens
ctacttgtgttacagattggagacttataagaccataaaatatgaagccttctaatagatagttagcactcaaaatatctttaatgttaattaagtaatgtgacataaaacatgaaaaagaaatcttagttacagacacatgaaacatgttatgtcatatttttctcttttagtgcatttatttctacctcttggaataatgatattactgatataaaattgtattcaagtctttcaaaagttaatgtctgtttgtatataggtgctttctgcttttgtagttgctgctttgccagttttaacagaagtgaagcaaatatttgttgtcttcggagctctcctaatttatataagcaatgttgatgttaaatgaacaacctaatatttagcttacctgttgtgatgaagagtagttacagagggataaatctttaactattaaataattttcaaattgttaaacattttttctcttgtagtgagagatttttcttgaggctgaatagaaacgggcttcccaaagcccctgataaaccggaacgacattgctccctctttgtggtgagtggatcttgtttcattcataaggcagattcatccagttatgattcatactatttaggagaaataaattactgtgagagaacatagtgaatttgcttttaaactttatgtaaataacacacaaattacattagtgcccagaattctgaatatcacctcccaggattactttcattcctttagtgtattactgcttctgttatactattaccaaagtataacagtgattgcggggcacggtggctcatgcctataatcccagtactttgggaggccgaggcgggtggatcacctgaggtcaggaattcaagaccagcctggccaacatggtgaaaccccgtctctactaaaaatacaaaaattagccaggcgtggtggcaggcacctataatcccagttactcgggaggctgaggcaggagaattgcttgaacctgggaggcagaggttgcagtgagctgagatcgcaccactgcactcctg

SEQ ID NO: 127011 - DNA, 1002 bp, Homo sapiens
gttgatagaaaacatgacgctctccctgtgtgatctcctctcatcctctctcttccctacttgcctcatttctccttattctttgtaaggcacttccttgattctactctgtgggctaggaaacctcaaaccatgggaagatgtacctaggaattaacaaaaccaaatagaaataaataagactcttcacataaccaggacgccaggaagctaacagaagctgaacaatcaagactatgggagaaaaaggcttgtagattacaggtttctgaggctgcagaatttctgcactcattctgcagccatgtaggtcacctgtcttcacgtatcttatcttcctcctgcatgtgactgatgtctgaatttccaagttcagattctcaaggaaggaatcttattgacagccaatgtctaatattcctgtttgggctgagcattttataccagcctctcataagctgctggccagtctttgggttatttgtccttaggtcaggtgcttacccatggtacaatcaggtgtggctcaggaaggggagatggtcagatgactaccttgtctgccaccaccactcccagcagagaaagtggatagagcagcttctcatagaaggagctatgagtaagacaagtatcacagtggttatatgccctctttcatttgctaaatgatcttcatcagcaatattgacccagtgtcagatgctgacttacactgtagtacggtggttctctttcagaagggaatggagaatggaaaacagaccctatcagaatccctggtgagatgtagcaagggggaacatggacattttgaaaacaaatcacagtgtttattgtgagttaaaaattcaactaacattaaataatgggtgtgtgaatttttttctaggtttcccaaagagaaacatcatttaggaaaattgagaaactgttttactatctgaaagacagctcctactgtcaaggaggtgacagctttctaatcttcttaagaacaaa

SEQ ID NO: 127012 - DNA, 1428 bp, Homo sapiens
ctgtgtgttgtaaactctataagtaaactcctttcctcctagtgttctgagtaactgggaaagagaaaattatctaaatgtttccctggacactggaatggtagtcagtgccattagaaacaaatattaagtttaactcagaggtattagatttttgatactaggagtgaagctaccttggccatgtcagacctttggtttctcttttcctaatgtaaatgttttgtgccaaatgttttggttcaagttcctcatgctcaagtgtgtttaggttattgtccatcgtcttttccaacagttttaaggcacctagcttctctactggaagatgtttgatgggggccataatattttataaattgttagcaatttatatgacaatgcttagcataaaagcacatggtgaatgcttgaaaagtgctagttgctctttaaataacgttgccaaggacctaaataatggtctctaaaaataccacttaataatcagtaatgtaaccacaaaaagtttaggagaaatatagcagccatcttttactgagtacttttgtcctgtccctgagctggacattttacatctctttttcctggggctctgccaggcactttttttttttttttttttttttttttggagacagagtctctctctgttgcccaggctggagtgcagtggcgcaatcttggctcactgcaagctccgccttctgggttcacgccattctcctgcctcagcctcccgagtagctgggactacagctaccaccatcacgcctggctaatttttttgtatttttagtagagacggggtttcactgtgttagccaggatggtctcgatctcctgacctcatgatccgcccacttcggcctcccaaagtgctgggattacaggcatgagccacctcgcccagcgccaggcactttttattcttgaatcttatcaatgataatttacctagggtctcatgctgaagcctgaatctaaatctaagtctgctgctgccaaaacctgtactgttttcattttaaggcaaataaaagctcatcgctttctaaaacactaaaatactctcaattaacttttgctgtttttttatgtttccagaatctcttgatattgttttattccaagtgtttaatattgtaccctaactgttttcatttagcattaaatcaaaagcatttttcatatatctgaatagccttcataactatccagtgtttaaagaatcatgattttatgaccagatgttcagttttagaactttttcttacactagtagagtaggtttgctggccaggcctgcagtatgtcagcattcttgccacacctgggttttcttcccttaatggagagctgaccaactgattttcagctttataagggatcctgcaaccttttcttattagtgttctcttaaactta

SEQ ID NO: 127013 - DNA, 1027 bp, Homo sapiens
caagtgcaatgagaggggcttgcattgggtatcatgggagttccaaggtgaagccccagggttgggggagttggctgtatgcttgtgtaggagtagccagggaaggctttatggtggaggggacactctctcagttgagtctaaaatgatcaaacagtgaatggggctgttctcagcagaaggaaacacatgagcaacctggagttaggaagcagcattgtgagtgataggaactacaaggatctggtgttgctgataaagaaaataaaagatagtgagagaagagaccccaagtgaggcaggcagtgggccaggccacagagggttagcactttatttcattggtcttgaggatccattgaagggttttatgtgagagggatatgattgacttcgtttggataggtcataccggcacctgaatggaggaggaatcagaggggctgagaggcaggagctatcattagggtggctgaaaaaggaacttatcacactgatagagttggctatcctctccttggccagtcagcactttaaactaagaccagaagggcaagaagtctcataggtctcactgctaaaatagctcagatgcacagtgagtagctactccaacccacggtataaatcggaagctgggtctgttgtattccttgtcctcatccagggaatcttggagcttgtggtgatttcccttgcatagagcctaattggaagctcagtgagagcttagagaactcaatgagaatgaggtagaaaaggcagctttttattattattattattcatcactgaatccctagcacccagcatggtgccggcgtatggtagatgctgagtgaatattgaggatttggcttatgtcagcatttggaagacatctgtactatcatcaatgtcactaaatactttaggttggtcttcaacatttctgttgattagtgctttctcaatgacccagctgtgttatgcaaactaactttcttaacttgggaatttggttattttgtgagtgtatttagtagca

SEQ ID NO: 127014 - DNA, 1058 bp, Homo sapiens
gcaatgcactgggctgaaggccatccttatttgctaggtgtctgaaccaacccctctttccacatccttggatccagtgtcatcctttcttgcttttttgtgattgctagtgtctgattctttgatctagttgttaatagatagtggtagtatgatgctcctctatttgtataatcttcctgctgtttttccctctgccctgttctggttggcagtactacatgaagaggacagataggcatagcttcactatgttacactgcaaatcacgagagaacatggaccagtgacttctgccttaaaaggcatcatccttgtcctacattgcacctcttcctgagtatttgccatagattgtggccagtgcttttacaaatgacaatcgcccaaaattcaaacttgcttttaaaaagttcatgaactgagaaatctgaggagctgacttagcctattgctgcagcacctgttgggtccacgagttcattgtatcatcagagctctctccatccctctgtgaagacttcttctagcaagctttgtccatgtggctctaggctttcgtctgtctcagagctcaaagtcccaaaagatgaaagatctttctcaccaactctggttaaagtttgaaggaagagtctgttaagacttttctcattgcccaaatgagagggtgtagaatgtgtggggcctgtaaccctcaaactacaggaaataaatataattattagaaaagatgaaaggcaagctgcaccaacaatgtgtgttcactacagccaccttgctcctgtttcatgatttttgtagtttcattgtggtttagaaatacttgaaggatgttaatccattatttagctgcattaattgaggcggcactaacacagccaagtgggttattcatagttgactttgagcaggaattttgtttgtacagttgaatgtatgtctcagatttgagcatttgctgttcaaatccaacatgaatgctcatcccagcccttttctcagtcttgaggtgtgttctccttagaaaacagattcctgtatgcttgctgttacac

SEQ ID NO: 127015 - DNA, 1035 bp, Homo sapiens
gcttgcctatcaactggagcatcttcacattggcagctgtattcccctatacgcccataggctgacactctcattccagtggggtacagcttgactgtccagaagtacgctatctgatgcaaaaggggcaggctgggtccaagcaaatatcttctctttgccatagaatcacagaattttagggttgtggggggatggggtcatggaaataatgtatgtttggtccttcattttattgatgagaaaaggaaactcataagtgggaagtatcttttccaaaatgtaagttaataacagaacaggaaccacttactaaaaagtctttttcaatcctgtgttacccccatggtgaaatggaacaagaaacagatgggtagagtagaaatggtattgggtttggaatctgaagatgtggattttatgcccaggtttattgttacacagtaattatatgatttggcataattaacttccagcatttttgaaattgttttttatccatggaatggtgagtttgtcaaagaccccaccaaccttcatctgaaatttgttgtgtattcatatacattgaattacagcatattgttatgcttaaaaatctgttaaaggttgtgatttgattaaaacgttggctaatatggaaatataccatgaccccattttcttctctcccgtattccttcaggtcagaggaaatacatttttaacttcataattgcatattcttatctactctgacagctacacctcagggtctcacctcttctgaaaagaattataataattgggcattctgtgaccttcctgtcacaatagatgggtattggagactccagaaggatttttattagtagtgttcaacagtatttccctgttaaacccaagaaaaatagttcatcagacatctcaactcagagctgcatctgagcctgagctggtatatgttatcattgtcttaccaaaaaattatatttgatcatttgtcaaaaacgtaaaaaaaaaattacctctaaatccgtcatccagagataacta

SEQ ID NO: 127016 - DNA, 1019 bp, Homo sapiens
tgaactgtcctcttcattaccatcagtgtggcaccatccaaagcagggaattgcatgtgaggctcccaatagctctctgttgcctgcagaaaacatttcttagcaccagcaaaaagtccctcctccagtcttgcctctctttccctgcaaaaattattttcatgagcaggctctgcattttatatgttgttggtactttctcctgggtgaataccttcttttaagtgcctggctcaactattaggtcttcagtgtctttccctgaccccactgttatatttttccacaatcagtgtttccacatttattatagcatagtacagatagtgtatcagtggagtccaatcagggacagaaaccacaacagttacttgaacagagatacatcaatataaagaattgttagctaggtagaaaggtgatacttaggcaactgacaaggcaggaagaggaccctaagggatcaaatgtgtttcaactgcaggaaagagattgggttatttgaacatagaaacttagaggaggagccctgtagagctgaaatagatctctgagaagagaatactgctctactagtgctgctgtagctgacttcagaagatgatccctgtgggcctgggatccaggtctttaaggagggttggccagccagctgttggtgagatctctgggtagaggctggggtcaggatgaggctggttttgcaagtgagaaaattggccaactggattgaaatgctgctagagagaactgcttctgcccagatgaagtgttgcctgggtaacacaggaaccacagacagacaagaggcaaaatggaaacatccatagacaggaaggagtatgtcccttcttccttctcagccttgcagtcccccactagtatccccatggcagatctaggagccagcaactggcaaagcagaaatgaggtttgcagaattgttagcccagcatcacagaggaggatgaatttgtagttggtagacaaaggtttaataaccgacacagaagaataaa

SEQ ID NO: 127017 - DNA, 1028 bp, Homo sapiens
agggagattttctaagaaaacaaggattttctttcgttttcattatgcatgtcttgaaatttcctgcattgctctatttgtgggaactgaaacattttctcagcccaagcatcatgtgactgtttcttattgctagtcagcagcatgaaacctcagatgaaagtatattaactgagggtctggtagaactgttcagcaaagctaagcagactttatttaaagaaaatgctcattcccttttgctggacacacaacttctaagatccatgtatcatgctgctaagtagtggctttgggatgctctctgtataaatgaaattttctagtcagctgaaattcaaacactaaacattcaaatattttagtagctgctgatataaattgtactgaaatgtaatggttttaagcggaagcaatttaaacatcttttcactttttctttatgattgcatcagtcagctgttgctccataaaaatcaattccacaactcagtggcttaaactaattttcattcattctcactctctgtgatagagattggctgggcatgttctgggccaggcctgacggcatgactctacttcatgctgcaggcctgtctgggtttaggtcctcactgtggattaagcttaggtctgttccagaaatgtttattttgagggcccagtctgaaggaagcaaaccagcgaagctattcctatggtcgtggtaggagtacaagagtgttagcccaactgtgcaagcgcacttcagctgtcaactggaatcacatctgattccattccgttggtcaaagtaagtcaatcactaagcctaacagcagagcagggaagtatacttattccatgaggtggttagggaaaagtgattatttgccaaataccaatctaatttaccgtactaaactaagcctttggtatgatcctctaacaaggttccatactatatgtagttattattcatatctttaatatccctgccatcagttctgacttttcatcttgttcattctgtgccacggaaaacc

SEQ ID NO: 127018 - DNA, 1033 bp, Homo sapiens
actttaaaaagatcatagagtctcctgtttttccaggttataaaatatggttacttacatatgcagatgactagattatttcagaaatagataagaatggtttgtctaaacagatatttttgcaatgttagaggtgaattgactttttctgtttagctttcatatagtttttacttgtgaaaatatgtttatatctcaaaattattacaggatcttaatccataactctatattgtacagaatgtctaaatgcataatttcttccccccaatctcaaaatataattagaatcaatttagctgacagagttcagattttgatatcttattttataatttatttatctttttagaacctctaatgataccatataattttcctttatagcacatatcacccatgataattatgcatttatttgtgtgattgattcatgctatctttaccttgagactaaaagctaaaatagaagttccaggggcttatccttgaaagactaacttagaatctccagaaagagggtcttaagaatattttgtgattcttcagttgacaccataaaccttgatttggaaatctcagttagcaaaaactgatgccagctttcaagatttggattagttcaatgaatgcatttaacactgtattagtcaattctcacactgctataaagaaacacctgaaactgggtaatttatttaaaaaaagaagtttaattggcccatgattctgcaggctgtacaggaagtgtggctggggagtcctcaggaaactttcatcatggcggaaggggaagcaggcacgacttacattgctggagcaggaggaagagcgagaagggggaggtgctacatgcctttaaacaaccagatctcatgagaactcactcactatcatcagaacaataaggaggaaatccatccccatgatccagtcatctcccactaggagattacagttcaacatgagatatgggcagggacacaaatccaaaccatatcaaacaccaaaccgtaatttagtatttgattca

SEQ ID NO: 127019 - DNA, 1057 bp, Homo sapiens
acacttaaattcatgaaaattgcttattcaattttcttaaggggatttactgaaatgctttcatttcatggttgtgttttaaaatttcttgcttttattttgtccttctctacatcaatgaactttatacaagtatatcaagttagtatgcatggattagaaaagataccattttttgatagagttatcaccacaacaattatgagaaagaagacttctgtgaaatgtttgctgaattctctattcataggaatcatagtcaaataactttaagaaatgtcatgggtcacttagttacatattctttctcttaatagattaaaattttgaggtttgactcctttttgtgtcctgttcaccatttctcttgatttaaaactaaatctaaactaaatatttcttatagcaattaaaatcccttaccctccccaacttcttccctcttaaggcttttattttcctttatgtaacttcaagtctttatgtgttcctcagtgatttaacattgccctctcaactcaatttcattgtctttctttgactcctccttgctcataatccatataaaataaagaagccaaatgtcagccctataccattgaaagactgatcaatggtaagtaaagtagaaggaatttttcaggattgcaaattatccttttgctgtacaaaagttcacaataaaagtcctgtattaggctgttcttacattgctataaagaaatacctgagactgggtaatttataaagaaaggaggtttaatcagctcatgattctgcaggcagtacaggaagcatggtgctggcatctgcttctggggaggcctcatggagcttccaatcatggcaaaagacgaatggaggagcaagcacatcgcatggtgaaagcaggagcaaggggtcagggaggtaccatacatttttaaacgaccatatctatcatgagaacagcaccaagccatgagggatccatccccatgacccatacaactaccaccaggccccacctccaacactggggagttacaattcaacttgagatttgggccaggacaaa

SEQ ID NO: 127020 - DNA, 1040 bp, Homo sapiens
ggttaggacttctccgggctccagttctcattcatttttcagtacttccatggctactgtcttgttagaaaaattatacccttttcttgctttgcatttgctctccaagtttggggattttgatctgagaattgaaaaaaaaacataaaagtgaattatgtgctattttcctataacttgatgagaaaatgataaacagtgattcataagtttaagaaatggaactgtttcatgtgacttgagtttatttgtagatatttgaagtgatttctgtagtatcaggtaaattcagacatgtcagacatgtggacaagtcaatataaccagagacagaggtctaggcatctgtggggttcaataagaaaactcttaaacattttttaaacttcttattttactcataactttaaaagtttattggtataaacagaatttttaaagggctaacctattgtgtaaatggtaatttttgacacaaagtgtttagaatacttaaaggcatttaaaaaaagtgtttggcatatattaactcagttatttcttatgacactcagtaaagtaggtacctgctgtagttcatttgggctgctataacaaaaatatcatagactgggcagctgaaagaacaaatattttctcactgttctggaggctgagaagttcaagattaaggcaccagtagattcagtgtctggtgagggcctgttccccagttcatagatggcaccttctcactgtgtcctcacatgttggaaagggcaagggagctctctggggtcagttttatggggtctgtttttaaagagcattcatctcattcctgacgactctactcttacagcctaatcgcctcccaaaggccccacctcataatactatctgattggaggttaggattttaacatattaattttgaggcaacataaacattcagttcatcgtggtacctttcccaaggccacacaactagaaaatggcagggctgagatttgaaccctggcatttggctccagagtttttcctcttaatgactattttct

SEQ ID NO: 127021 - DNA, 1218 bp, Homo sapiens
tgctctcaaggtggagtctaggggtccctgagacccttctggagagtctgtaagggcaaaattattttcatgataattgtaagatgttgtccgcctttttactttggatttgatgtttgtgtcaatggtgcaaaagcaatgctgggaaaacttctggctacttagtgtgaatcaagaccctggcaccaaactgtagtgattgtaatttttacctctttttgttcttgcagaaaaaataggagtttcacttaagaatgtccttgatgaagcaataaaaatctcagtccctcgggttcacatctttttaatattctgtgggacaagataggaagcacacataaattacttgtgctgtgtactagagaatgctggttgtcttgaggaaaaacacttccacaaatattagagtgaaaacaagtgaactagacagttttttcatggaatatcattttacttggtagactgacacacaatagttactcagactttggtgtttgacagacatttttttggaaatgaataacaagagcctgtcacttcaaggtaaacagttgacaacatttattgccaatgataaaatttgaactttcaagcaaaaatgcaaattttggaaaatgtgttatttctgccactgagaacataacagcataccaacacttttagactttttacttttatattgtataatgaaatgcatcaacatttggatgatctgtattacaggtgaaccaacattttccagtattagtggtggggaatgaccgtgtcatgaaggcttgaccaggatggggatagctcaaggaggcaggatggctcattgtttatgtcttcttcaggaacacaatgaagtaggttgagtttccaggatttggcccctgcattggggatggttggaagaaaagccaaaaaccatagcttcttcaagccagtggacttaaaaaacagtagtacttttaaagaaacaaggaattcaaggcaagagctgtttgtggggctaggggtaaagaaaaatgatggctttgccaaaatttgctaaatttatatcaggctgggtcctgatacacatttctaaaaatccaggcgaagcatggtggctcatgcctgtattcccagtactttgggaggacaaggcaggagggtcactaaggccagaagtttgagaacagcctaacaacacagcaagactgtctctacaaaaaaaaaaaaaaaaaaaaaaaa

SEQ ID NO: 127022 - DNA, 4225 bp, Homo sapiens
aaaacttaaatgtggaaaatattatctaatattgtttgcagcatttttttatagtcaggagtaaatgtaaatcaaatacttatagaagtgactggagaaattgattttaatatagaattctatactatatactctgtaattcaaaaagaagagagtatcatctgtgtttaataagagatcagatataattttgcaccaggaaggtcatgactttgataagagcagtttcagcgcatgagtggggtcaaaaccactggtctctcaaagaagaataaaaggaaaccagaaagggatttcatagaccctgaatatctgtatgttggtccatgagccttcctgcctagagttattttctttgctgtctgcaaatgaaatctaatttttaaaagttaaaagcattcaatttgttgctattctctctcacattagagtggggtgaagatttcctgaacaagggtgatgaaataatgtaggtgggaagcctagaagggaaggtttctgaaagttaaagaaaattgaacctaatgctaagaggtcagtgaccgagagaacataaagtggacaaaagagagaaggaaccttgcccctgtggatttgtctaaagctatgttaaacgttttgttgatggagatggacctttgtaagaagcactaggagcctgtgctccgcagaacacataggggaatgtggggaatctaataacaggatagcatcctgttactactccctagaaggaagaagacttcttggagatcagagtctttatccaaggatacagaaaatatcatatctggtagagaaataccatgagacgggaagggggcatgagatttggagtcaggctgaccaagttcagatcccagcacttccacatatgagatgataagagagttatttagttttgcagttttatcatgaggatataacatacaaaaatatctagcactgtgtctggcatatagtaggtactcagaaagtgacacctgctagttaataaatgtctcctttatgctaagatgactgagatcatggggtgaattcccttgatgccagtctcgtaggctgaatcctctgttctcaaagaatgaaaaatttaaaggtacttcccaatccccctacagtcaaatgactgcagtgacctaactttgataattatgtatttcaggccttggaatgtccaactgtttctccaaatgttgaattattctaaaattagcaaagacttgttgaagaagctcacaagatcatggaatcaggcctctgaggtcattaatattcagtagatatattgcttatgagcctggaaggaaagatttgcaattttatatagtataatatagtatttgctcttggtatcaacctaaattcataaacagatgtgtatatatctctatttatgtatattgaagtctgtattgtgagggtgaataattagaagttgactttatgtcaaaccaggtttatagaattcagatgtgtccccaaaatttgtcctcttctagatatgtccatttacttttagtatgactagtaggaacataggggttttagtgtctgattttgaggatataaacacaaaaaaagtattttttctcttttgtctagattactaatccagacaatgtaaacctcacccaaaatttgtgaaatttgagaccggatttctttttcatggcattacaacattattttaaaatagcgctactaaacagttttatcaaaaaattccaacaaatgacatgtggcccagtggatgaaaaaaaattctgcaattattaatagatgtttttactgttcagagttttagctgttatttgtttagtaatgttggtgtttgtatgtaggctttgaggcaaggggactaattaggaattctctgtaataatttaagtgaagcttaaattattaaaaagagcaatcttgtaatcccagcactttgggaggccgaggcgggcggatcactaggtcaggagatcgagaccatcctggctaacatggtgaaaccccgtctttactaaaaatacaaaagattagcctgttgtggtggtgggcacctgtagtcccagctacttgggaggctgaggcaggagaatggtgtgaacctgggaggcgaaggttgcagtgagccgagatcgcgccactgcactccagcctgggtgacagagtgagactccatctcggaaaaaaaaaaaaaagccatctacccatttattgagcactaaatatacgccaggcactgtgcttcctgcctttgtataatccttacggcagctgcatgagatgggttccattattatccccattttatagataagggaactgagactcagaagaatcagtgagttccccaaggccacagaagggtggagctgggatgtgaacccaggtttctgacttcagaactcagacttaataaccacccggttctgtttccttatgaaagggctgtgtctccaatgttcgtttagggcacagttgcttggatttggcacacatgttgccacagaacctatatttcaatcagtgttagacgtttgggccaatattaatgtgtcagaggtgtctgagtgccaacagcactgtagatctgaagccatcctgagatggtgttgggcttttaactttggcgggccagaactactctttcctcagtgttgtcttgccctggacatatttgccctttattgtaccccttcacctactgcctggactggtggggatctactgccacagtggggtgggggcagaggctaaaagcggcagggtggggtggaatggggcggaggcttctatctggcaaagcttctgggattctccatttattcagttctctgtcttcctctgcttccctcccaccctgctgttttcacttcttgtcttggagagtgagtccttctggatatctcttctgctgctctgggtccttgatggaatgacataatgacttggccattgtctatgggtgtttttactgccaacaatgattggaaacagcgagccaaagtgactagctctggtcccatccctgccccattttttcacatagatacacaatttcattagaaaaagatgaagatgcgtacgagctatatgtaggccactgaatattcagacttatagggaaaggcacatctacatttagggaaaaatgaagttttgagtcttctgggtggttattgaagaaactgggctctgactctgtatgtacaacagatggagagtttgggagcatggcaggggtgagctggagggctaacagtttctcctgcttcctctccccttgccaaacaggcttgtttgccaaactggcttgtttcattcatagattgaagacaggctcaggactggggttgaaggggttagaagagaagatgatcttagcatcttggtctatattactgaagggaaaaacgtaggaaggggagtttgaagtatggagagaagtcccagtggccactcaacggtgaggtacagaaggaaggcttttttggcaatggtttctatatagagtcattgagtattagttactctatatttatacgaaatgtgaattttattttggtgtagtatctttgggtagattgagaggccaaaatatttatcttgttttcaaattactctgaaatcttacttctttactttatcatcatcttgcctgtctcttttgaatgattttcatttgaagcagttcaattaaatcttgttaagtatgacaataaattacttagtgattcctataaattctctaaaatacaagaaggagaaaattgaatatagcccaagtaagcagcagggatttttacagaaatgatttcttcaatcttgtctccatggttctgttgttattcttttataaaaggtctcaagaggaggagaaaaaaatataggagacaaaatatatatatatatattataaataagaagtctgcaagaagatcagagatttttgtggaaaatggggacggttcaataagcaaaatgaatttccttacacaatagctctgtattttgtgtagaaaatcgtgcatggattttcctggctctggaggaggaggccattctttcttatggtgatatgagaagaaaggttttaaagagttgagtggagagaggcttttagaaagtgcagtgatgtctttggatgtccaggattgactcaaggtaaaggaagaggcatgtcatgaagcttggtcttagacctaagcttctatttggaaatcaaagc

SEQ ID NO: 127023 - DNA, 1164 bp, Homo sapiens
ccacagcgcttttaaaacaatctcaagtgctgaatggagagctgatctcatctagtgagcagcatgtatctcatgctgtgagttttagattatttcaaagaacagaagacccctcaaaaactacaagaagcaggatcacatttgttagttttaagacatatttatggcatacggccggccatttcctttatgtcacgtaggttttcactattatcagcctccgtatttctatgccaacttgaccattgtgagaaatgaccctatttattgtctaaaatactggaagtcaaatggatttatttttggtaacttttactgaggtaatgacttgacataaaataaagactctgttccagagactgtgaattactgcccacgcaaattcaactttgcaatgccattaatattttactgccacagtgaacaaagttgttaaatttaagtcaagaattattggttccttttggtaggacgcgtctgtatttttactcagcctctgtacattttatttttccccacatttactaacttaaaacatgacctacgtttattttgagagtgtagaccagcattgagaaggcacatactcagagcgtatttttttctgattcaacctgctcttgagattcctttataatttgtgtattatttagagtagtgattttgatatccatcatcactagcttaattttacttgctttacatagaatccctgctttgcttagacagaaaaaacaactgacaaaagcatcacattattatacttattgggagaaccatgacatcttgtttatgttaactagcaaaagacattcatgtgaggaagagaaatataatgtaggcatcttaaaatataaagagaagtgttaagagactccctgtcattggtgagcatagtgggtgtctatctttgagctttgagagttaccacctgtcagatggcaccagggactttttggacctggtacccacttcattccaggctcatattggctctccccaacgggtacctgtactgtcacacagcccccgtcctcatcctgtagtgctccaagactgggatgctgtccaggcctgcagcttcctggattgctctttccttccaggtttgccaggtgacctcttacccaacattcaaactcggctcaaatttccctgaatgcg

SEQ ID NO: 127024 - DNA, 1084 bp, Homo sapiens
cccaagtagaagtttaaaccaggagtaaattctgtaaggccagagagtattctgcccatcctttaataacctttttgcatgtgtcccatgttccctcctactttctgtattggatactttcaatatccaataaccaaggatattgaatggaggtgaaatagcaagaccaaaggcctttccccacctccccccgccccttttttctattaaagcatttgcttaactgccttgcttgtgtgtatgcatgcctggtctctatatagcttcctgttttaaggtcctttcagggcaggcatgccatcaatctttgtgttgtttctagatatcatctctgtgtgaatgttgttgatgctatttttaacattgcatcctttgtgtgagctgccacaaggctgggatgaccaaatgtcctgtttttatcccagatttttcctggttaatttccactcttttgtttgtgatacctagacatccttttgagatggcaaaaggattcgtttctgcttcattaactgtgatgaacctaaattcaagcagaactgtgcctttgaaacagtgtgacttaaacctcttcagcaatccctgtagttaagactaagcaaccacagagaaaatgtcctccggctctaaagtagggggccagtttacatggatttatgagatcctatcaaagtgagaagtaacctttgtggcagtccactgttttcctaatggtctaagggctgccaaactcccaccccatgctcgtttcatccttgccttcaatgcagatattaataaatctgcccgaaatgagatttttgaaagcctttcaggctcacaatgatgatgcttgtatgaagggatcccttttttcttctgtctgacttagtcttctgcctccagaccctgcatattttccctgtaggacactggcgtctttctagggatagaatttaaaagcatctcctcctccccccataccaatagttcagtttgaaaccatgaagtgtgttacaaccccactttgtgcttttcccttcctccttttttgtgtcattagtgttcatgtctgtctctcctattacatctttaagggcagaga

SEQ ID NO: 127025 - DNA, 1026 bp, Homo sapiens
agcttttgcttggagactttgaaactcctcccatgccaaccttagaaaaaggctgattcgatgaagtctttctggcaaagcatttaagacccagccacttttcaaaggtgagttcctctgtaaagtcacctcaggttcttgctacaaaaaccaatctttgtgctaagtgtttgatgaatactgccatgttgtgattttagatgttggatccttggcttcgttatgtggacttctggctttgggaggtattttatcctgttagaatattatctcttccagtgtatttctctcattttctatatcacaaacaaacatataagcacattctaatatagtacgcagtttaagcgaagttagatgatattgaataatagattgttataaatatatttttacatacttgctctcacaccctccttgacccacccagtgccccatttttttttttcttccaagtaactaagttctgtgacttggatgctgtgacttggactttagaggtgaagtcagatgacaaaagatttccatgcaaatcatgtttccagaatcatccctcatgtgcatgtatgtctagtggaatgcaaggcttactagagggaggttgaaatttggtgtgcgttaaaggaaatataaaaatcctgcttaatgatcctgttaggtttgtatacagattaactgttattacacaagaaatggtatgtccgtttggaatttctcatcctctgaatagccagctttagcactgtaaactgggaagaattctgttgtatctctgaatatataatattgcattactgcgagccccgcggcccttttcccaaacaacatatgcctgcatgtgcctcagttttatgtgagccaaaccaatcttaggcctagcatatgggagtttattagtatgtgtatgttcctatgttgtttaagagagattttagggtctggagaactgagacgtggcaagttacaacaaagctttgcttagggatgtggttcatggatctcagcctaagtctgaacacttatgcc

SEQ ID NO: 127026 - DNA, 1023 bp, Homo sapiens
ccagttgctgaaaacatgattgtcctgcatttttttcttccttagagctggcttatgtcagcctatgggctgtttgcttgagcatagaaatagtggtatattcaagtgggaagctgagaaaccataatgacgaagggatggcagcgccatcctcttccagagcctgggaagggccgcgcagttgcaccatcttttatgccataggcattaatgaatcataagtctctcttgaaaaatttccatggagagtttctatgatgtacctgccaaaaagagatgtgttaacaaagcacttcttaaaatggtattttttaaaagttcaaataattaggaacagagcaagatgaagcagtagagcttgcaggagggagcagcgtgctcagtggccagagacttcacctgagttccagaaaatcagatttcagggctattggcgcattatcgtagccacaaaacgttggggttcatgttacctcttttgtccagtggtttgtgtgttcccttctcactgaattggatttgacattcaatttgaattgacagtgaacttcggggtaattcctttcagaaacctgaatcattttaggatctgggaagcattactctgtggcaggggctcttaaccaaaaagcccatcgctagaattctagggtctctgaatttggatgggaggaaaaacaaaacaaaacaaaacaaaaccctttattttcactgtgccctagctgaaatttagcatttccttcaattatgaatatagacagcaaataatggttgtatttgaaatgtgaaattgtacttgtgaaacatgctactggcccctagattttatgctagtagtcctattattcagtgttattaatggagaagcacaaaacgactctatcagaactttgctttttaagggttagataattgtatttcactttaattgtttttcattgtaattacatgatttttatgcctttaaaaacattattctgaccaggagtccataagcttcaccagctttccaaagggggttgg

SEQ ID NO: 127027 - DNA, 1048 bp, Homo sapiens
agcaaggtattgtgtcaggccagagctcctgaagaatgctccccgctattgcatgcccgtagcctggctgaagttgcagtgcaggatcttgttctttctagagggatagtagtaatgagattgacatgatgaaaaataccttgagtaggagaagtcttgatgccatgggctgcatgaagtgtcttccctttgtcaaccccacgccagtgttcctgggagatgagagagtctttatctcatggaggaaaacatatcagtgtctgttttagtagatctgtagcagaggacagttgtcttgatatattgtagactgtaccctatgtatcagctgccatcctgattcaacaagggggaaggaagttgtctaatacttgttaagcgtggaaggacatttgtgacaaatgtaaaacatcactgtagaacttcacattaatctgtatttcagaaagcaagtgcaaagaaaaaggagtcaaacaatgtctaagtagcatggagttgtgctcttagttgtgaaagcagcagtctcttgttcagtggttattgtaattctcagacctatgctttcttcatgtatgttgtttaaagattacttattcttttcatctaaaaacagtattttaaaaaaccaactgggtacaggtgcttatgcctatagtcccagcactttgggaggccgaggtgggaggattgcttgagcccaggagtttgagaccagcttgggcaacatggggagaccttgtctctacaaaaaataaaaaaatgagctggacatggtggcaaatgctcgtggtcccagctactagggagactaaagtgggaggatcgcttgagtctgggaggtcaaggttgcagtgagcccacatcaagccactgtaccccagcctgggtaacagagtgagaccctgtctaacaacaacaacaaaaattgctacattattgtttctacaagaagtttgccactctgtcacagttgtccattttttattattgctagcttttaacttagaggctgatgttgctgaaatattgctactttctatcctccgaa

SEQ ID NO: 127028 - DNA, 1050 bp, Homo sapiens
gtatgtatctttgccatgagcattttaaagtaataggcggaattcctaatgttcttcatggcattcacagattctttaatcaagtgagtattttcatggccttttcctgtctttcacaaacatttttttttttgtaaaggtgggactgaccactatacagctgtgcattggggagtcactggtgacctcagccaagaatgaattcaggccatccggctacaggccagaagctttgccagcttagctacttgaccacctgcttctgtttttctgttccacttgcaaatggagggtgtttgttcttttcctggcatcaacatcaatttaaaaaaattccttggaggaagttggaaaggggaggcaagaagttgatcagtgttattagttttgttccccgaagaatagcatctcttaattgagatgctgggacattggtccagctataggccactggctgaatggaattttctccactaatgaattcttttgtagttgagaactgttggagatgtgtttgatggcaaccttgaaaattacaaaccatttatcttacttttccttcactatacagccccaacaaatacagtgggtttcattaaagtaatgaaaatttaagctggcacatattctcagctactctgaaggctggggcaggaggatcacttgaactcaggagttcaagtccatcctgggcaacatggcgagactctgtctcttaaaaaaaaaaagaagaatttaaaacagatatagttatcagaatttattattccatgcaactattatcacctaagagaagtgacattaaacatttaacagtttttcagtgatgccaccattatcaagtaaaaacatgttaggaatttcttacagcccaacgaggtcaggccctttttaaaaaaatactaatagttctagctgggttgttacatccaattcccttgagagaattgaggtttaaatttaaaataaatcctctatgaaatgattagatttcatagattagattagattcactgtaggctctgaaggtacctcctgtgacatgatatg

SEQ ID NO: 127029 - DNA, 3508 bp, Homo sapiens
gtttcttagtcagtatgttgtagtgtcttcccagtcatgtcttcattactctttgttttgtttggggtggtggtatgggaataaggggtgtctgttaccataaagctaagcaactgacaaaattcatagtaaatattgaagcacaggttccctgaaaccaagcaaccccactgggatgcaggggtgcaaggtggttgttggtgcagagccagggctaaagtttgggcagcctgtgatcttgaaacctctgctcggtctgcttccaatggagatcccccgaggatgtcccagtgaagttgccccctggcctagcccagcactcttgcagaactcatcagaaggtagtgtctgagactcagccaaggatggtgtgcttccagaaggcaggggcttcagccgtcagccctaagtgtgcagctgtggtggtccttccaccaaagtgactcctaccctcagctgcagccagtgatggcaggcaccttcccacctggcagtagttgccagctgatctataaaagactggattccgcttaggaaaggcagtttaagactgtgcattcattggtgtgggaaggagcaggtagtgagaatggaacacgttaagtagagacctgcctgtcctttagagatggatctgtggcagtacaagggagagctaattataacaccattgtgtcactcaaatgttgtggtcagactattgaaggtgtcttttatttcaagtgaactttttcttttctttttttttttttaactgagggtgacccatgttctgacttccttttgaagtcatcaggcctcataaacagaatcagacttgaatgcttaagtcatccctttcctgtttgtagaatactaccctattccactttttcctgtttggatgctttcttacttgtcctgtttgatccttttaactcttataaggtagacagagagagttgttcctgtattcatgatgagacagttaagacacagcaaattaagtgaccagtgctatttgtttgaagaacttagtttattcttctgtgtacttattttccacatctgcagaactgtgaccatcctccacataatttatagtccataccaagtagtggatcaaacgagctcctgccaggcagtcaccagcttctgatgagaacagcagcatgcagcctgcacttcaatgctgcactcccaagaccagctgtggcccccacactgccagtgctgtgtgtaacgggtgctctgtagttcagtattattgatttcctatagattctttattttttaaatagcccatgtcagtttctttcttttaagtgtgggaagggtcctaagctttagtttcctgttctgtaaagagggatgatactctttgccttgtttatctaccatgcaattattatgatcaagtgagattatttttgtgaagccatgtaaactataaagtgctttccaagcatgaggaattactgtggatgatcttgagtttcacatggaggtcaggagcagttaaaattgttggttgtgataccatccataatctcttctctcaacaccctctgcaagctctaagggggggggattgtaggggtcacacaggtgttattgctagaaaatgaaagagcagaaaggcttcacaagcccactgagaaggacttagctcacacttctgggaaccagtgtccaaggcgtgtgaccataggaacagagactctctgtcaggaaggagtcaccagctgactccaagggccggggtttttatgaggagagtcagtgccatcctgcttggaagcagtcaaaaggaggttagtagcttgtaccttttgctccaaaaggaaaaaaaaagaaaaatgaatgacaagttgcagaatatgcactattaaacctcagagaagttagagttagccaaaggactaaactgtaatgcccctgggtgaggccggggtggagactacagctctgcactgtgaagaagttgcccaaagcagcatctgcaagaggtgcctgcagatcatacagaggggtgcgttagggaaaacctgaccctgcccagttatattagcaagtggtgttcacctgtgtggctgtgtgtgtgcagttttcactgatgtatgagttcctcctttgtgccaggcattgtggtaggtactaggtctacgttggagtgtggaaggttttcagatctcacaaagcttagaaactcatgcatctgttaaatacaggtctgtgcattaggcacgtgcaggggctgtgggcacagagatgaagagtgaattccaaagaactcaaacctgtgtggagaagtcagagaaagggtcactgataatggtcctaggagaggcaaggtggtgtgataaaagtctgcacagaggaaggggccctcagacctgggcaggtgcgtgcatcctggagaagatgatacctgaattgagttgagaaggtactgtaggaattaactaggtgaaagaaataggagagggtattcctggataaagaaacagcaaaagcaaaggcaaggaagcctaaaggcttgcaggagtggctgggaaaccgcacatggattactcccataaatgttaccactatcgaaatactgctacctgttgctgacacatcgcctcactccaagttaaatcagtggttctcaatctgattgaactacccaaccctcacccccactcccagggtttggaaatgtgttgcttttgataaatgagtgattggacagccctcctggcatttgttggacaagactaggtatgctacatgaccatcagaaggaagaactgccctaccccacatgcccatgccatcctttttgagaaacccaggtttaaatcctggcagacataatcccgtgaggtgacaagacagtgagtgtgtttactgttttcagctaaggcatgaaagccaaggtcacatagttttcaggccatcagtaaagcctggaatgcttttctcatcaataccttttgtttgaaatttcttttgccctttcagtttccatgttttattgatgtcctgctttataaaattctagataatgccttttgttgatagtatctttgttaagagctcacagttctccccctcctattcccaaatggaggaccttccattaagaggtagttatggcctttctctgccctttctctccttcccttttctactcaattggcaattggttggtaaatttggaagatgagactgagctggccttgctcattcccttctttctatggacatcttccgtctgtagagaggctgccttctgatttgtaaggttagtggcaatgtgggaggcctacatgtttatgacctaaacttagtctaggggagtgtagctgggccctgtgtacagtgatgctgtttgtgtcctgcacgaagggagcaagtggcagctggaagccagccagaattccactgggcccagccagctgtgctggggcccaggcagttccttttgcacatttgaacaagtgcattgtccagtcctgtggccaccctgttgcacagctcc

SEQ ID NO: 127030 - DNA, 1213 bp, Homo sapiens
attggaactgtctgaagtattctgtatctgaaatgttttggtttgtgttcaagtaactgaaggtgaagtgtatgagatatttactgtttgtgctggtctcttctaccagacagtatactatgtttgcagcattatgtgttatcttgaagcccttgggcaattccctatagtacttggttctgttaattttggtaagtatttgataaatattgtataaaaccactctacttccctaagtctttctgtccttaacagggaattgccagagctattaagttatttaaataaattaactaaaccctatattcaatttttgagtcacatggtaccaattcaaagaaaacattggttaaaggggtcatatttggaaataacttattttttctgaaagtcttcttttctttttcagttgtgaaaaaaagggatgaaaatataatattgcacttagctgtcaaatggaaaataatcattttagatctcattctacatccaaattatagcactcactgaccatactgtgcaaaattggtcagattccatcgactggttgcatttactccactaattggaaaaaattatgactattaatcattgtgacacaaggcagaatgtcatcatggcatgacattcttattttccacctgagaagtggtggcttctgagcgcaaaagcacactcttctctcctactttcgcttgccatttcttttttgggtttggttatagttctctgtagtaaatcagacaaagacttgtaaaaagtggagcatggagaggcagagcaagaaagtgttccttcatttttattctccagaaacagctgtgaaaatgaaaatgggatagggagagaagaaaaacatcataagagaaggaaatgtggctgttgcacagacaaagacatttgaaattattcgcatgtagacaattgatggagataatgtctttttgggcataaggacttcaaagtgactggactctgaagttttattttttttccctcctagattaactcagaagagaaatgttttcagcaatttgccaggatttcctatgaggataataattttctagttatagaagtaattatggttgtaacacgtgagttattttgctattgagttttgtaatttcttagtgttttggtatacttaaaatttatttgggcgattgcatttcttgaggattgaaaataaaaaggtaactgataaatgcta

SEQ ID NO: 127031 - DNA, 1887 bp, Homo sapiens
caattctttctctcatacgctgtcctccatcctatggaaccactggctcctcagagatgccaggctacttgaggactgttgcctctgcaactgctgaaatgcttcctgggctgaccatccacctcctgcttctttacctggaaaacctaactgcaatgtctgttctttgagagtgtctgtctctttctactcctcctggtagagtactgctctacctctgttcctgctctgtgccctgcagctgcctctctcagggcctttgctgctgctgttttgaaactgtccgactttgctacagtgtagggaagcccttgaggccagagatgctgtgtggttcagctttgatttctctagagggtaacacagagctaacctgtagtaagttcagtaagtgttgaatcaatgaatgaatgggttccttggatgagggagaaagcccaaagctcagcgtgttgtagttatttgttacatttatatacaaggttgtccaggatgtataatccaggctttgttgagtggatgagggtatcctgactggggcctggcaaccccccgacatccacagaggaaaacaagtgtttgtgagagaagtgatagaatttgtcaaaagtatatgaaattagttacataaaatctgaaacatacattgtggttctgtttgtcctgtgactatgtaaaattgccattgaaaaaacccagaaagccgggtgtggtgactcatgcccgtaatcccagcactttgagaggctgaagcgggtggattgcttgcgcccaggagtttgagaccagtctgggcaatatagagaccctatctcaaaaaaaaaaaaaaaaaaaaacaaaacccagacagagaataaaaacaagaaggctaggctgctatgtcatgaagaaacctaccaccaaccgctgaatttcagtgaagataggactgtattatttttattgtatcctctgctcttagtataacatttgctacataataaattgtaacatatagtgaaaatgtacatgttatttgagtcagtgtgtgtaggtataaatttttaatagggtatttacacctgaagtctttacaacaccatgtgactgctagactccgtttaaatgccagaagatactcagatacatctgcttgtcatatcctctggccaccatgtaatggtcagttgtagaaaatcttcggtcagtactggatcttaggcatttttactgcttcctgcaagtttggggtgcttttccaaccttttagtgattgcattttgtaacaaaaatttcccaccacagttttttttttttccagaataagagtatcttgagatagcaaggcaagctgttatcaaaagacagaaacaaaactcctaccaaatatgcaattagccattggtgagaaacagcattttcactccacagcataaccaacacaaaatatagaaatatatggcatgctgaagaaatagactacaattgttatttatagcttcccattccaaatttttgttttcattagaataggcttattcactagaacattgtgttggcagtgatctgtcacacacttgtatggtatgctctgcatatggtggctggattttgggatgtctcagctgggaagaaggataccctctttctcatttgcagtggtgtgacatgggctaccaggaaccctcgtcattgttcttactgacttgatactgagaaaatataaattcagaaagataaaataagtttagtaggataaaatgctgcttttatatgatgagggtgtatatgagcatttatttgaacaacaacaacaccctttactgtgaaaaccaaggtttgaaaaccactgacttaaaatgaggctggagtattgcatgtaaattctgttacaacaaggtttgaagt

SEQ ID NO: 127032 - DNA, 2522 bp, Homo sapiens
tcacaaggcccctgaagccacatagagatgctgctcttcctctatgatcttgtttttttttgtttttttttttttattttagaggctgttatggtagctagtacgagggagattatacaaatttcaagaaatttaggatttcctatctctagctctattcttttccaaaaggagacaacattttctgagttatgtttgatacaatatgtctatgtttctatcacagtgacttcatgctgtgaatatatacatcagaggaacattaaactctaatgaaacccttctaaaaggctgtaaccgtaacacagtaatacaatgttttacttaaaaagtgaaattattttatctgagtctaccctttgaagttgaatggtaatttctatttaagagatgagaaaacagtttcatagagtttaagtgacttactctagattagtagcttttaatcttgtttgactattacccataagaaatatagttaatttcctgacctagtatatatataaatatcccccagtaccaccccacacacatataattaaaacagcacttgcttatactctatgtaatgttctattcttttttgttaaaaaaaatacttgtcactaaattgacttgttaatgggtcctgacccacagtttgaaaaacactgctttaaatgctacatttgtgataccagaaggactgcaactcacatcttactgggtttctgtgaagttcctttcatgacattggcaaggagttgatggtggtggtggttattgtctttgatagtcagatatgtgggtttattttaacaaagaatttaattatccttttttccttcagtctaagtcaaagtctgtcttctgtagtatttcttattaaagatggaacaaatatttaaagccatcacatgcattgcgtaagttttctcttttagtacttgtatgtcttcctaccaggacctttttgacaaggattacataatgaccaatattagactcttctgtatcatgtcctttgacaacactctctggtcactataacagaagagtaaagataatggtttactgaggtactttgccagttgtaggtttaccactcactattcttttgtacctttttttatgttgctgatcattattagaaagacaaggcaacttgtataacttgttttattaaaaaagtgaactatatgcttatttggctagagtatataagacaaaaaaataaggaattaaagttccccaagcctagcttcatttaagcaacttaaacttacttcaggaacaactcttggactctctggcatttaaaaaaaattgtgccaagatgacattgggtaactactaagtaaataaaaatcatcaaaaaagtggaatgcctttggtaacgtaactgcagtaaaactgatatgcagtaccctgaggaatgtatggtaatcatgatccttttggaaacttttatataacttttattggaaactgcaatataaaatagcatttgtggagcacttgctacatgtcaagcacagttctaagagcttgtcttatattgtcatttaatcttcatgatacctcatgaaggaggattcagttatcactcatatttcacaggaaattgagtcatacagggattaagtaacttatttaaggtcatactgtaaatggtggagctaggattggaacctaaattgtcttgcatagaaactgttctcttagccattacgccatgttacctagtatgacagtggttagcagaagtttgaatcagtaatcccaccccttaaagtttatgtgacaaaataaatcaatagcaacaaaacactttatgcacagagttgtcccttgccgtgttgtctgtgaaacaacttacatgaccatgtagtcgttaaatcagttttggttatgagcacgttggagcatcagacaatcatgaaatgaaatattttcataaacaacactatttcaaaaatatattccaggtatctagtgttaaatgacaaaagaagagtaaatatagactatgattagagctacataaaatgtgtagcctatagagaagaggcagtcgatgcacagatgagaacaatttttttgttagaatatatagattatcagtaagttcttttttaaaaaatctgtttggaaatatgagcagtattgaattttaaattacacattgttatttatgaaggaagaggtggcataaaaatgagtaaagagaggcactgcagtaactgaggtgagagataagtccatgaatcaggttagcagtcattgtcatggtgaagtgtggatagatctgagagatatttaggaaatgaaagcaacaggtttggtcatcagatatgaggagttaaagtaaggaaggagtttaggatgttgtcttagctcaggatactataacaaatatagactggatagtttaaacaaaagaaatttgtttctcacagttccgcaggctaggaagtccaagatcaaggtgttggctgagtcagttcctggtgagggccttcttcctggtttgcaggtggaca

SEQ ID NO: 127033 - DNA, 1520 bp, Homo sapiens
gagagggagacaacaacactcgggcagagagaacacccccaaaacagtagggaggcgcaaacccttccctctggctcggatcgacattcccggagtgtggaatgtggcagggtcctggagagagccgctctgacaagctgagccctctctgaccctcctccctctctgcgatcccggatttatggggtgtgtatgttgcggggcgggggcattggtaaatttcaacatctgcgccgctcggttctttggtctttggagaagaacgggtatttcagcagtgtttttacttctggccaccctctcgaccccgggtgagcgcagtgggggcggtgtggcggtacagggctgctgagtgataaatggggagggggatcggaaagcctggttcttgggggcagggagatagcttttaggaaagcataccctgacactggcgttcggagaaaaaggaacaggatagctctcgctgttctgtgtaaaggtgaacaacaaaggacattaatgttgactgatgaatacaggagtctcccttccttttcctcctcccatttcaggcgggttacagttcccgtttttgttgtttgatttcagctgggtcgccccttgacagttactccttttagggttgagactattaagaagccaggctctccgacaaggctgcagccggccaaatgcaattataacctcccagaaggtctaacagaaagcattatggattttactaacactctttatttcctataatgccctgttctgccgactggtgtactttgtgtgtgtgtgtgtgtgtgtgtgtgttttaaaattgaggacaggtctagtgatttaggtgatgtgtagatatctgcttatgttctaaattcattttcctgcaatttaaaacatctggaaagccttcccagggagtcgtagtccgaggggatttttgtttttttttttcccaactttgcctggggataggactttggggtccattgaaaggactgtaggattcaacaaaatcattcccacatttcacgttagcttccattctggattgtgactaattaccaagacaatagtttgacctgaacccacctttgggaaaggtttccagctttccctccttcaaagtgtcagaggagtctttgccagcctctttactggcaaggagtagatgttagtagttgttattttcgttctcctcactcttctcttttttgggaggtagattaacccttgctagggaaaaagatagtccctttgctggactggtgagggacccgagggcatcgcctcctaagcggctttaacactcagtgcaggaagctcagatccatccaggcaaaactgtcctgcttggagtcgatcccagatgttgctttcttccaagtgttaaattatacagattatggatgggatttattttcttgatttcttcatgtgccaggtcacagctggggtgctggtatcgattagttcctctcttgcctttctttacaagcggtgggcagaggcttaaaaaccactctgggatt

SEQ ID NO: 127034 - DNA, 1247 bp, Homo sapiens
tccagtagcgtttctactggtgccaccccgcctccgacccgccctgcggccctcccttttcttttctgccgggtaatggctgcttccaagacccagggggctgtcgcccgaatgcaggaagaccgtgatgggagctgcagcacagtcgggggtgtaggttatgggggtgagtacggtgccccggaggcgcggctgatgtgtcttcctttctctatgaccgggtgtgcaacggacctctggtctgaccctaggagcccttcagctctggggccacctgggttcgactgggccccacgggtggtggcccagcgggatgggttggagccggtggcggctacttggttggggctgcccggggatggcggagaaaatgccatgggatggcggagaaaatgccatggaatggccttcccctccgccggggaagctccctgagcgtttgtcttctggtttggagctcccagctttgagctagctgctgagtgggtttggttcagatctggttcgcgcgcgtgtgtttataattttgggattagcagctctttctcctcaccagtacactgccttggtttgcttggtttgacctcgcaggtgtgttttatttagcttccggagtatttccagtcgcagactggtggtcactgctctccactctacagatttgcccagtttgtggctgaggtgacctctgaagggaaagtgtgtgtatctcacaacctccctgtagatggttaactgctctgggtgttcttcagatttgtatgtggagcctgagagatcttcccagtctctgggtccttagagaaagaaaaggaaagtgatagataatttgcactcgtggcttcaaagaacatttgaaaagagttttgaaaaccatcacaactttggctgtacctgactttcaggttgtcctctgatccactgtaggaataaaaaaccaaattttgaaagctgcaggtggattgtgtttaggactcttttacctttagtctatccctcccccattccccccaccccatttttgtcttgatgtgtaatttagcacaagttgtctttttctgatgaacatggtttggggcttaaatatagttctcagactgttgcgactttgtttttcgatttatttgtttttgctttcacagttaaattgatatcatcttaagtatttacctcagcggcacagagttgaagtgcagttttttcccacttcccaacagtggaactccctactctgaaattattttagt

SEQ ID NO: 127035 - DNA, 1141 bp, Homo sapiens
tacatttgtttcctttttttttaaggactgtgcccatcatattccaaaatatgattgtgccattctttatccattcccttataaatgaacatatagtgtgactttagtttttcagtaatgttgcaatgaacaactttatgtacatatattcttgcccactggttgtatattttgggagaaaattgctggatcaaaggttatgcaagtttaaaattttgacagatgccagactttcctcttaaaatatattcagcatacattgccacctgtagtatatgagtgttctttcccccatattgtcacaaactttgaggaaataatccaggaccaatgtttcaatgactagtagattgaattaagtaactgatagaaagcttagtttttgattccagtttgttttcaataaaagtgttgagtagtagtgaatttgcggtatctataacataaaaaaatttctcaccctcggtgagaaatacccagtattctcattgacttgtagcagtcaacaggagaaattaatggttgattttttatgtcatttttataagataaagttgtcattaaaaattctgcttaataacctatgtatcattctgttactttttccaaaatcttttcaaagccaacaaggtgtgatataaattttaggtgtaaatatttatattaaaagtatattttttgttaggcagtcatttaggttatcaagtatgtctttccctgtaaaaatcatacacctttttggatgagttcatgtcctttgtagggacatggatgaagctgaaaaccatcattgtgagcaaactatcgcaaggacagaaaaccaaacaccacatgttctcacttataggtggaaattgaacaatgagaacacttggacacagggcagggaacatcacatacccgggcctgtcgtggggttgggggatggggaagggatagcattaggagaaatacctaatgtaaatgacgagttaatgggtgcagcaaaccaatatggcacatgtatacatatgcaacaaacctccaagttgtgcacatgtaccctggaacttaaagtataataaaaataaaatttttaaaaaacatacacctttttgacttcttgaaaactgcttcttttaagagattttcttcttgctct

SEQ ID NO: 127036 - DNA, 1357 bp, Homo sapiens
ttgtttttgttttttgttttttttttttgtttttttttttgagacagagtcctgctctgtaacccaagctggagtggagtggcacgatctcagctcactgcaacctccgcctcccgggttcaagtgattctcctgccacagcctcccgagtagctgggattacaggcgtgtgccaccatgcccagctaatttttatatttttagtagagacagagtttcgccatctaggccaggctggtctcaaactcctgaccacaggtgatccaccctcctcggcctcccaaagtgctgggattacaggcgtgagctactgcacctggcacactaggtcaagggttaaaggacactgctttacatacatctgaacagtaaccagaatttcaatttgtctcctaaaattaagaacagataataaatagattcagcatccctcacgtggtgtcattggcatttgttcttttgctgtttttaaaaatcagcaaggtagcacaattcagtaataatacatttaggaggcttttgtgactgaggctatttcttctgagtattaatctgtatctccatattgtaatattctgtcaaagtcaacttttttccctccgaatgggtgtttagtagttgatgattttgctaatgcttggattctggaccttattatctgatgattttggtaatgtttatcttccagagaacttactatctcatgtgtgatgtctctggaagaaagagggaagggtagcaggtgatgtaaactcctcattcttgtatttcctatttcaataaatggcatcaagtctaagctagaaacctaggaagcatccttgattcctaactcgccctcaggtactgaatttgatcagttagcaagccttatttttctgcgcctgtagtatattttgaacctgttccctctattcatagctacagccactgtgctaattccattactaaccctcaccattactgctgaattacctacctgcatctcccatgccccagaaagtgctcttgagaaccagttgtatgtgtgtttgtcagcctgattctgttcttggcacattgttaatgtttaataagtgtttgaccagaatggaattctagcctgaacgattgcaaaaccttcctgttgatctcactgactcttgactttacctcctttaatccacattgtaaaacaaatatattcatggatctccacttgaaatcttcagtgtaattctgctacatgtataattaggtccaaactctctgtgtggcatttaagattctaatctacttgtctagcctcatcttcagtcaccctgcttcctttcccatatctccattatccacttaccatgtcacactgtagttattt

SEQ ID NO: 127037 - DNA, 2444 bp, Homo sapiens
tacaatacacactcatacacttccatctggaaaaactgtaaagaggatgtcgatcagattcatataatagaaatcatactctcttctaaatataaatcacgagtatatagaaacaagcaatgtgcataaactgctgtctccagtgattaaatcttcaaatgtttctattagctcttcttagagaactttgccacaaaattagggttcagttttgacttatttgataaacttatcagactctgaatgagttggcttttcattgacagtaccttaaagacttgccacctcatgctgaaacaagtatgttctactgacctacttgacccaaaggtgagcagggcagcttttttcagaagtggtgatagatttgactgatcagtcttctgtttttctttacttctcactgatcatctttgtaactagtggcatttatttgcaacataggcagctggggttgaatgatatctttggctataggaaccaagtaaagttttctagagctaaacaggatttaaacctttgcttcatggggtgaagggaggttgggaaagagggagtcaacaattgacaagtggtaaaatatttaaaattttataggataatgtgggatagtattaagctttctccatgagtagcatatttaaaataatcaatgtacagtattgaatcagtaaaatatgtagaaggaaaaactggaataggagtcagaagacctggattctgaatctgaatttgtagctttttagcagtgtgaacttggggaaaatcgtttaacctctctgagcctcagtttcatcaggaaaaaaaaaatgatgttgatattattgggaggtgtggtgagggcagagtatgttaaagcactctatgaatcttgaggcactatgaaaatatagggacaaatgatgctactgataaaagtctgtctcaagaggcagtagcgagtacaagcccaagctttagacttggataaactggaatcaaaaggagctgtcagctaaaagctgtatgaccttcagcaagtaataggacctcattattactattatggctgctgctgctgctactgctactactactacaaaagcttggatgtaactttaaaatgattacaaactaatcaaagaacattaaagctggaatcaagacaaatcccacattatacaatatataaactctgtaaggacaggaactgttaaatatacctttaacctcatcctctgggacagtgtcatgttgtgatggcatttggtggtgtttggcaactgtgaatcagcgccatgctgggctctatatgggatacaaatgaagaacccctagccttatccatgtggacatctcagtgtagttggtgggctctgcatccctgtctcaccggagctaataagagagtctcttctagttccatatagcactgtgggatgaagtggatacatttgattctgtgatatgcatgccttgccagaggcgctgagcatactaaagcttttacatgtgtttatttttaaaagaaaggaaattcttgttttgcctccttgtttctctaatactgtcctcatttcatgtttttttcttaactgaaagaactctcccctccctgcaagtaatcacagaggccctgcctttaaaaaactttttttagtgtttttatccaaatagagaggtttgtttttttactagtaaagatctcagaattgtaatcgtggttatttaacacagtcttctgttatgtaataagctgctattcaccagtaatagccaattagaaaagaaaatatcctgtacccgctaatcgtaattaccattataaagcaattaatagcagaaactgttgctgaactgtaacataacatcaatcaagctgtctttgccaaggcactgtacaactaattttctcaaatgaaggaggagaagggaaggaaaggaaggtgagagtctgcgggcttatttgaatttctttcaaaccagtttatgaatgacttttgaatgctctttaaatatgcatccactcacaaaggtaagtaatgctaataatgtactgcgacattgagttatttttccagcagcagtgatcatagacagtacagctttgcaaaaagctcactggacaaggaatcagaagaactaggttttttttggttttgtttgtttttgtttgttttttgttttttagacagggtctcactcttttgcccaggctggagtgcagtggcatgatctcagctcactgcaacctctgcttcctgggctcaagccatcctcccacctcagcctcctgagtagctgatactacaggtgtgtgccaccatgcgcagctaaattttgtattttttgtatagatgaggtttcgccatgttgccaaggctggtctcgaatttctgagctcagtgatccgcccacctcagcctcataaagcgctaggattttaatcccacttctccttccga

SEQ ID NO: 127038 - DNA, 1324 bp, Homo sapiens
ttgaaagctagattacaaatgaagtactaagaattgaggccacttctctgaggttactagaagtgcaagcatatgtctatacccaaacaataacacacattacagttgatgataatctaggcattgaaaggtattatagcaaggattgaaacggtctgctccctgggatgcactttcctcaagatccccttgagttgtatatctggatggcaatttaatatcagttttgtgttagcgcagttgtgtatcaaatgttttttgcagtgtctaagtcaaaaatatggtggtgcacgtcctatcccattgacctcacttcactatgctgaagttttatctatggtcagtggagtactttgtactcttcagagtgatggccagtaattccaaaagcctaaggttttctgaatgatctactctcattatctctgcatattttgaaaaagtttatatttattatcttctgacctatctaaccctaattcatatattctctctgcctaaaatcatctcttccctgcctgcctacctcaccaactcctgctcattccttaagatttcatttagatttcaccttcaacttttctgtgaaatgttcttgctgactactttcctccacccaaaaggtaaacttctatccagaattttcttgttttatcttgttaatgcttcgttttcattatcagtttctgatttcagctcagaaatagggatttcacaatcctatcgggattgtgattgtgatgcactttgctcttgtattttacattcagatgcccagtaaatgtcagtgttacttctttggcacttggatgagattagacatgtgcctgctatgtgtccagtgcagaagctaagtcacctctggttccgtcttattcttctgtgcctgttaaccattgcaagatactgtccttgcagggccagtgctacattggctttcctccacagtcctacctacactgttagcaagtcatattttttggagcatcattccatgcttgatctcattttatcatctcaactacttttagcatataagtgaattagaaagcaaaagccagaggtcatacaactagtttctaccagcagcactgtcatgggaactcctagatctatttactcttagcatgtcatcattatgcaatgatattactcccttaccagcaatattggcagtgctcttttttcaaagcagaggcacttaaaatggttagaatagttggttttggttttcaaattgactacagggttattatattttgttgaacagttttctgcacagaatattctgagacttcacctctaaatattaaatcacaggttc

SEQ ID NO: 127039 - DNA, 1508 bp, Homo sapiens
gaggtcgaggctgcagtgagccgtgatcatgccactgcactccagcctcgcgacagagcaagaccctatctcaaaaacaaacaaacaaaacaaaacccaaccaaggtaagtatatggcaatatttgtccacaaagagcttaataggaaatttgatattataactgagtactaaggggagcagtccaaaagtaaatggaagatgagaagaaaagcctttgaggacctaagagagccagttctagaggacctaggatttggacctcatttgagattggatgatgcatagtaaagaaaggcattgcaaatgaggaggaagcatggtgagtttggagtctgtgtggagcatcagtttgtatggaagacatagccagtgaagacactgactggagcagatttatgtggaagcaggacttttctgtcttgttctccttggtaccttcagtgtccatccaaatgcttggcatacagtaagcactgaataaatgctgatttaatgaatgactattagaaaggcagagcaaactattttggttagtgaggaaagaaaaagaacatttatcttaggaatgcaagtcgttttaattattaggccccagagagacatttaaatgagactgcagtcatgccctgctacctgctttgagttatgtattcatctcttgaaactgcttgctcttgccacaagtacctacaaattaacctaataatgccacattgcacactgtaacccataccctatagtttagcaatgtataaccaatcactaatcaatgtttttgtataagccagtgagaattcctgacaaacaactttgtatcagtccactccctgtcccccttttttgcctttaaaaatccacttgtaattgccgctaagtggagggtatattcagggcaacttaaatctgtgctcctgggttgcagtcttcaagtttggcccaaatgagctctctacttgtattcatttttgtctccgtttcttccttttggtcaacattagctagggtagattaaaataggtgcagaaaagttcaaacatgatggaatacggtgcagctataaaattttgagatagcagattgacatgagcaaattgtattaggaagattagtctgagagtaacataaaggcaggatgaattcaagcttagagtgttggaattctcagaaatgaataataagctagaatgttttggaaataatattggtgtgaggcaaagaagatgtgaagttggaaatagaagacagacaaatctaagagatacatgttgaatcattgagcacctatcatgttatatgactaaatgtttttttaatttattataatttagaattagagagtctttgagattgtaacataataggcatccaggcacggatgctcatgcctgtaatcccaccactttgggaagtggaggtgggtggatcacctgaggtcaggagttcgagaccagcctggccaatgtggtgagaccctgtctctactaaaaatacaaaaattagccaggc

SEQ ID NO: 127040 - DNA, 1174 bp, Homo sapiens
tatacatatatacccgtgatgtcgctaggataaaaataactttgcccaattcctgaaaaggaattctactgggtagaatcaacaaacctggaatctgggggcatacaatataatttaccagtgatatccttgggcctgaaactaaacatctgatagctccctgcttctgtttccttatctgaaaagtagtaatgaagtaccctcatcagatgaaagtgattagacctttatattgaagtgcggtgacaacatatggtgaaatcctgaccatgagatccagtaaaagaaacaaaagatactcagcatttcaggctttgtatagtcagtgagtaaataaacaaagaaacaaaccaaagagtattccctaagaacctagatgtagtgtcttaggaactgggccacctactgaggatagaacgatgaataaaccaaggcttttgtccttgagaaagtcacagagaggaagcaggcctataaacaggcaaatcacaatatggtttgataagtagtgtctgtgaatggatttgataagcaggtatgtttaacaaggaatgcgcagggaaaaggtaaataggattttgacatcttcaaagaggaggttgtaatggaaaaggcttcaaaagggagttattttgaagactgtattgctaggcattcaacatcaaatatcgggtgtggtaaatcttggtcctctgttgtctaaatataataatttaagaattttcctgttagattttcttctaaaatcaaagaactgaaatttgaaatgggaaatttggagaaacttccatggagatggcattttcatttgctaacgttgagtctaaaattctaatataagtatcgttacaaaccataagcaaactgatgcatacaaccacgtgtcactaaaagcaatttctaacgatacttgctacccaacctgttgaaatctacctctcatgttatttttctctctctctgactcttcttaatttcattatttgaaaaactgagagcaggccattcacctacctttctccattcctcatctcctgaactatatttttttacctacttgagccctctgtcccccatatccagttgggcaaatagctcatccttcccatgtagcccccagcctcagggccatcatgccttattgtacataataaaatcctgcaatgttatttct

SEQ ID NO: 127041 - DNA, 1022 bp, Homo sapiens
ttttgaagttctcttttcttcccttactgatattaaccatctgtattaatgaggtaataaaccaggcttgttgctaatgaattgattcattcagtgctggatttaattagaaagatatttaacatgccagcagatgttctgattttgtttcattacccccaaatataataaaataaaatacaataaatttttatatttttgcataaattaaacagagtcaagatgtattactctgttgtatattgtaaaagcctaactgatggagattttgttactagtatattccaaatattagaaggaaagtcagttttctctttaaaacactcacctaactaattagcataagagtaaaatctaggaataaaaattacgtagtagtagagtgccacgacccccaaatctatagaaaagaacctaagccgcagatacttcccgaagatttctttttattactttaatagaggatgccttttctaaattaaccactaaacaggttacttaagagcgcttaatttcagagacacgtccagtgactttgttttattaactctttgcttttcgtagttttgtttgcagtgtccaaaagacttatttaaaaagaaagaaagaaagaaagaaaaaggcagctttaggagagatttttaatgttcaaggctttatgagagaaattaggatgaaaagttataaatgtgttaatgcatgcacaaaagtaacagctcatacaaactgagtagtccttattttggactttcagcctctagcatgctctttctagaaaggaataaaaggattttgtgcagtgtcccaggtaccatatcaacagatacgtgaattaagcaatcactgacatacaaatacattaggagagaaaaactgttataagatttaacaagtagataagttcatctatcaggtaaacatcctgagatataagtataaaagctacaggcagcacagtggctcacgcctgtaatctcagcacttttagaggtcaacgcgggtgaattgcttgagtccaggag

SEQ ID NO: 127042 - DNA, 1040 bp, Homo sapiens
aaatccatcaggaaaatacctcttagtaagtcacagcttttcaactagtgtccagagaaagtgaccatgtatgaaagtacaaaaatggaaaggaagcagagttgaccttcaggaaagaaaagctcattttagatttagggggaaagtataccatatgcctgcatgcacacacacgcacacacaaacacacacacacacacaaaacacagcttagtgactgagtattttgaatcagtttttgaactggaaagctgtagggcttaatttttttttttttaatttgtttaatttgaataggacttaccatgaggtaaagaacagtttttctcaggagcttggaattcctaattagtattatctatatcttccttgaggacttacaatgtgttgctttttgtctttttctgtttgcatatgagatcatttggtaaacactagatcattagcccacataggatcatttggtaaacactagaaatttggagtgattttataacacaagaagtacaaaaaaagtgtatagattattgttcctgaaacttttttgcatatttaaaattaaaagcacaaagtagaaaatattttagaatcatgataactacctaccttcagatcagagtaaaatgtaccaaaaccatggtgtattttaatgcatataattgttccttggcttgcttattttgatttactctcaatttttttaagattactgattatctgttttatgtggtttgtataaacatctggtttggtttcattgattgccacttaataactttagataaacagtcagttgggcattttgttttaatctagatttttgaggagtttcttcacttttaagattctacatctctacaccatgcagtcaacccacagaagtgtaagctaaacaactacttactgtcttaagcttctgtgtgttgggacagtttgttatctggcattaatatgataatacctgactgatacaccttgatttgtcagtattcaaatataattgcctcttgttagtcattagtatagaaccatatggacaa

SEQ ID NO: 127043 - DNA, 1031 bp, Homo sapiens
aacccaggaagaaatgcctttgagggatcttcatcctcattcttggctttcttgaaaatgtccctatttgctataaggaaggacttagaattttcaggagttgtgttaaagatctgtatgtattgctgaggcttgcttttaataatgagaaagctcggccctgattgattcaaaccactgttgtgctggcaaaaatacatatgaaccaatacaacttatattgtattctgacattattctttaatttatcaaatatatatgagcagactcaaaggaacatatattaataaagactgtagtctaattatgtttcataaataatcatttctttttttatcaggtatctacaaaatataatatctatcacaaaatatttcttcttccaaaacctatagaaaaggtaatatgttttcctaaaaacagaaaccattttttaactcttactctacatagtgtctatcttcttatactaacttataaagttataaaattgatcatatcaagttttcattagaacagtggtttgtgctttcacataaagcatatctctgtctaagcagctgggagtagcaaaaaataaaataaaaataaaaataaaataaaatacaaaacatatcccagccatacattagaatctctgtgtaaaaaaatcagcatattttcaaagctcccaagttgattcatacatactgttaggattgagaattgttgcctgaaagtaaaaataatggtattcattaggatgtcattttcagtaaagttccatttagacattccattgaagctagtgctaatcagattaactgctggcagaattcattgttaattgttatgagtaatttgcaacatgtaccatttatgtaaactagacaacctattctttcagagatacgagatttctatcaccttttggatttatttttgttatgtaaaacaggaaatttaataccgtatccaaaatgctaggaataaaatctgttgtgtcttgttttattgtccagcatcattttattccctcatccttcctcttt

SEQ ID NO: 127044 - DNA, 1043 bp, Homo sapiens
aaacaggaaagagtttgcagatgcgacaggaagcaacttaacagacaggcctggcatcatctgtcgccttaatgtataccatttattcccttggtgtgatgattcttagccataggtcacaattgagccttagaaccttaacccagagtgttgcagccttcccccttgcaagtaccccgggaattgctgccattggccagtgtccaagaagaaggcttgaacagctgccctgacaaatgggtttcccccattcaagcaagcaaatgaggggtttgagctgctttgcaatactccctgcctctgggctacaaacactgtttaaaatgataataaagtatcctactctccagcactatgtatttttctttttggagacatgtaaatatctttaggatctttttaatgcaggaggtgggaaatcatccatatgaagagttggtttcagcttttctttctttctttttttttttttttttttggtctattccagacagtaaggattgtatcctggagccgctttccctgccagaaagtccaggtggcaccaccactttagaaggttctccatctgtgccttgtattttctgtgaagaacattttcctgtggctgaacaagacaaacttctgaagcacatgattattgagcataagattgtcatagctgatgtcaagttggttgctgatttccaaaggtaagttctgtttttgtccttaaaagaattaaatttgaccatgtgtggtggctcatgtctgtaatcctagtactttgggaggccaaagtgggaggatcacccgaggccagtagtagttcaagatgccagctctaaaaacaaaatttaaaaattatctaggatcaatggcatgcacctgtagttccagctacttgggaggttgaggcaggagggctgcttgcacccatgagttcgaggctgcagtgagttatggttataccattgcactccagcctgggtgacagaatgagaccctgtctcttaagaaagagaattaaatgtattgtttgttaaaggagtgacataatctat

SEQ ID NO: 127045 - DNA, 1054 bp, Homo sapiens
gtgaatgtgcttatagattcctgtcattctaaagcaaatagtatattgaatcttctcatcgttccttattttatgttgttctaaggtacattttatattggaggaaaaggttcactgaacagcccatcacagatttttgtagtgtaataagaattaattccactgctccatttggtaagtgtacatcttggctaccatcttttccctacagtataaaaattcaaaggaataatcttactgtcttatattagaattacttttactttcatgatagataaaattaaattgatgtgtttattttgcctaacttgaataaagctaaaacagttctatgccaaagagatcctaatagacacacacatctgtattttttaagaaataagtccttctggggaaaaaatggttaatatctgttttcttatttgttttcctaatctctcaacagaagaacaagagaattattttttgttatgtgacgttttaccagaagatagaattcttagagaagagcttcagaaacagagactggtaagaattgtttttaaagggtgaatagtgtcttgaaaatacatataaatacatataaaatcatattggttttttttttttttactttttgttatggaaactttcaaacatatgtaaaagaggagacaatacaaaaaggtcttaaaacaaaaaaaaagtatacacttgactgaaaattaaagcgttttatgttaaaaatgcagagagaatttttggctttgttttgcttcctggattatctctaaaataacaacagaacttacacattttagtgtaattttagctgcctgacacatgctagggttcagtagtcatggaaaaatgccctcagctaaaattgagttgaattgattaacctttttttctcccctttactggaatgtgctatgcactagcattttttttatttccctttatgaattaagcatatggtttaatctacatagtagcctttctggttttcaggcttaaccataagcaagctaatttgaaaacctcagcatctttagcctttaaaaaagataac

SEQ ID NO: 127046 - DNA, 1050 bp, Homo sapiens
tatacaggaaaatacttcttcaggctggtaatcctataccgagtcatgccatgctgatagctttctttttcctttttcttctaaaagatgggtattttgcaatctcccatgcccacctattgaattttttaaagtccttctcttcctacctaagctaaattctcttgtacctttaatataaataggaatttagcttttctagtttcttgtgtgtttaactcctgcatttacattttattttgtacgtctaccttttttcattgtgctgatattttccatgtgaatgtttaaattcgtctcatttttttatctcctagtttattttttttggatattctgtcctgttttgaagacactcttaaaaagctatctcagtgagactcaaaagtagaagaaaaatactatatttctatcctgtatagcaagcagatggctgttgcctttatcattgcagtttcagaaacggtgggaggtactgatatctttcaagaaggtgaaatactagtcagatcaactctcatggatttgggggtgtatatcatcatccagttaagaaatgtatctctgttttttatgtttcactatcttattttagtcattgatatggatggcttttccttgtttatttaagattctaatgtcacaaggttaactttctatcatctctcataaaatgctgagaaaggtggattttattgattgtttttaaagaaactgtattttgccattaatagtttttgttttagtacagttatccctgccttatacatgcagagctgtgtgtttaagtatattaagtattatttagtatattatttgagtatattgctaacataaattcaaatgctctagtgatcagactctggcaaacagatcagtcattcccaatgctgttcagtgacccttttgacacttaaaagagaattttgggggtggggaaaagtagctttttatttgacccctggtgtgagggcttccaaaatatttaactcagttataggcagattccattctgaaagttgttgaagctatacatcattatctgtacaa

SEQ ID NO: 127047 - DNA, 1219 bp, Homo sapiens
ctcaggaaattctcagggttaataagttatctcctaggaacagacaacaagggccatccgaattctccacacaaaccctttacctggtgtgtttcccttgtctgccaaagctgagagccacatttagggcctacctttaggttaggtttgagagagagagagagagagagagagtgtgtgtgtgtgtatgtattttattttttatttgcaatgtaggtgccaccctacttttttctttcttcttttactcccatttctatgctacattgttctgtagcagcttgaaacatttattagaacaaagtggaggtataagtgaaataatcccagatacctcagagttaatccatggttcttaaaataaaaagcaggagaaataggaaattctgctgcctttctgtggagactttgggccactgctataattttcatgaggagatttgttgtgttctatattggaggagtgccactggactcctaggctgagaatgcctagctggttctgccatgctgctgcctttaagctggtttgggaaggaacctgaggagtgtgcctttttctctcatagccactcatatatccatttagccaagaaactctattgtaaatctattacttgtcagtatccataaaatgtttttgatagccatagctaataacatccatcttggttttactttcgtctgttaatccaggttatttccattggatttgtccctttaagcatcagttttttactttcctgtgtataaattcttacctaaataaacattttttaaattgctctttcataaattgactggtttttataattttcaacctaactcacattttcattttctacctatgtgtcaatcccctatgactatgttgagtgccatctgctatatctgctgttttattaattttttctctgcttttagcttatgaataaagatgaaagactaggcattgacccctttgctgtcacacttgacattttacactaattagaaaaacatatatagcttattattatgactctgcctaacacataagttgatcttatattcttacaactatggttttatctaagtgtatttgtaatgaaaatattaactgatttttatcagcttctttgagaggctcaaatgtataatgtctgagccatgctcttcatctccctattcctagtatatagccaagaataaacttaaatgaataaaacctgatatatag

SEQ ID NO: 127048 - DNA, 1035 bp, Homo sapiens
ggtaattgaataaatctaagtattatctggacactacaagctattttaaatttactgttgattttcttacttgtgatgataatggttttgtggttatacataggggaatgtccttactcttaggagaggcatgctgaagtatttaggagtaaagcatcatcgtatctgcaacttattttcaaatagtacagccaaaacaaagtatataatatacaaatgtacgcgtgcatgtgaagagagagaaagaaacaggcaaaatgttcacagttaccgaatgtaaatattgagtataggaatgttaattgtactgttgatttaacttttctgtgttggtgaaatttttcataataaaaagttttaaaaaatagaagagtagcaaagtttagggatagctacctgtcttatttagcttcctggtttaccaattcatttagaatgtcatgacatagctatgtcagcaaaggcaatttcaacaaataaaggagagctttcttctccttactgaattgattacaatacaataatgaaaactgttccagacataatagttacatatttaaaatatttttttcatattttatgtataagtgaaaaatggtcaaaagtatatgttatatctttgttgttattttaagaaatttacaaggcaaaagtactttgtagactaaactttattagagtggaaaggaggaaaaccttgatctcatatttcaattcttaatattttttaaaaaatgaaacaaaagtaattgtgttctataccaatgtacttcattttccttagctgttgggctttataattatcactaattcgtttccttattatgacttgcatcttctattttgctcaaaacgtcatgttagtaacaaactgtatttgtgcccttaaaaagtatgttttaaaatttttttttttttttcagactgggcctcgctgtcttgcccaggctggagtgcagtggtgtgatcacagctcactgcagcctcaagcttctgggctcaagcgatcgtcccacctcagtcagcctcctggat

SEQ ID NO: 127049 - DNA, 1075 bp, Homo sapiens
ctttatttatggtaacccacaatgactaaaaactgaactcagaggggtgaccttgggaatggtagagaaaagttatatggaagatagttcaaatgaaaaattgatcagaacttgattacaaatcaaactgagaattagggaaaagagcaagtcaaagatcccagcacaattttggttttggaagaggatagggatgggaaaacactggaaaagacagggtagcaaaggacggtaaaaccttgttgattttaattcccacatagctgttaaagtggagtgttctgtaagcattttatgggacagacttggagtttaatgcaaaaacaggaatggagaaatttgaaatgttggcaacttttatatactccctttatgcttccagcccagtttcctcccatccagactttgacattttttattagccaattgtgcattaagataataccataaatctgtttctactttccagagagaaattctggaacaacagcagcaagaacgaaatgataccaattttcatggcgtttgtatgttttgcaatgaagaattccttggaaacaggtttgccattttgcatctttaaatgttactgtttttaatctgaaaactcatcagaacatccctaactgttggttatataaattaagttctatgtgttggctcaggaccctttcgtatataagcagtcctttttaaaaatatacccaacgtccaagatgaactgtaggtgctctaagcagcagaggggtataaattcttaaaatgacagaagcagatttatgtttaatattacaggacttttaaaattggctgacctgcaagaccatatgcagcaaactactgcagatgcacctctgtatactaactcttttcttctaaatcattggtaacttttcacttttggttattaaaaataaagacataaaaaagaagtgggggcactggtgattctatcaccaaccccagctggtccaaaaccagctggtgcagtacaattcaattctggcactaatcacctgggattagcataaggttttacatatttaagggcacaggctcaaacaagactgccttc

SEQ ID NO: 127050 - DNA, 1050 bp, Homo sapiens
aacactgactttgccttcactcagtctccttccagctcttagatgtcagtcatagaacccttggcaaacctggctcaattttggcccactgtggtagaactgtccttgatccagaaggcattagggatggtagcaattaagtatgtggccagggtagcctcccaacactcatatctgctttgagacagctgcttgttagccctcgttccctcactttcaatatctgtattcctgtctggcaggccccaaaaaagttcagagcaagcctaggctcacacatgggcttgttctctggggcaacattgcctgagatcatggggaccttcctagtacacctatacctcctgagccagctcttggtccattccaaggcttgggtgtcaggcctgaaagccctgggtagacctgacatgcttggttactgttgggggaacactttggagtcaggaaggtctggcctataagcctggaaacaagttctaaggactgtcagtctgttccacccacatccctcccagcaagctgctggctgcggccaaaatccttgctgaaccaatcctcttaggtcccagaagccactgtggcctacctgaacagagtcttcgagactggccaagcctccaaactcatttaccccaggagccaaccactggcctctcatctcgtaactcagactctagatgccagattcttgagccccagagaggttgagagccggattcagctcccctgagtacattcagtgtgactcttaatggcaagatattttgatcctagatagactgagggtgagggaaacctcccaacccacccataccccttgagtcagataccatttctgacagcacccaggcacaatctaggctctagatcttcatcctggaagttctaggcagatgttaactatggctcggccactctaggagaacctccctgaatccagaggcactgtactttaccccaacatggcctcggggatagggggaactttcttaccctctgcctgacacccttcccccaccccaaaacacacacacacacctaccacac

SEQ ID NO: 127051 - DNA, 1024 bp, Homo sapiens
gtttcagaatgaaactgttttatctcagatcatcaggcattagattctcataagaagtacacaacctagatccctcgcatgcacagtttacaaaagggttcgcgctcctatgagaatctaatgccaccactgatctgacaggaggcggagcgcaggtggtaatgctcactttcccgcctctcacctctttctgtgcagcctgcttcctaacaggccatggaccgatacccctggtttaaaggacagaacctgattcttctatagagtgtagccaagcagcagatagtagaacaaactttggtatccctttacagaactgatgtgactgtgtacacttacatactttataatgtcactctttaatagctgaaatctttgtgttagtgcttagcacttgcttatacctctaattagtgtttttattatgtgaatgctattccaacccaaatgtgttcttagatgatttgtgaataatcctaattgctcaaatttcttcctagatctgttattttgaaccacatggccagagaacatgctttcaacattggattgccagacaacattgtaaactgcaatgaatttttgtgtacattacagaaaaagcttgacaagtaagtactgatttatgaaacactgcctaaagctgttttaatcttggactctgttgtgaatatttttaaattaatttaatagagtaattaaagaagtgggaatttcccatgttggaggagttcacattttgtacgacagtccttattttgtctagatcatattgccctttggtgttttttaaatttttcaaatacactatgtcatatataccaaacaatatacatatcatacaatgtatgccgtataggatatgaagaatatactcactgtctagcctaagaaatagaacattgttaattcctttgaatctccctgtgtgtctttcctcattagtatttccccagaaaccactattcttaattttgtaattgtaattcctttacttttcactgtaacttgtctacatattcaa

SEQ ID NO: 127052 - DNA, 1037 bp, Homo sapiens
tgactggggaactgggcctgccttcaatctactgatttttaaaaaatatatatgacaaaggagggaaactactcatataaaagaagaggttatgtaactctccagaggaattggaagaaaaacagagagttctgttttgaatgggcatttttcttaagcaaatggaatttttttctctctcaatgtaaatgaattaaaacccaaacccactggtcacaaaaggctaattgaatataatcagccattttatctattggatagaaacaagcatatcctgaattatgttggaaatctctgctttagggtggaattttgtctgttctaactattccttgtagtgttaaaattccccttgagaagcaagtttaacatgtgtttgaagattgactctaagaggttgccatggttttctacaaatgttttacaaccagctaaaggcaaacgtaccctttgagcttttcaatcttttcttgaaatcactcagtcattacttcctagagcaaatgctgcttcaggacccagcccagtctaatagggagtggacttcagtgctagctctaagaaatattcagctactgcatctagctataggagcaatttaatagttcttccttctggggctcttttaaaactaatattcaagatcttgagactagcagaacattatatagctggaggttttcaccttttagaggagacttcaagggatttgctcactcttattctgccagcacttttagaaaagtatgatacttcatttcctgggcatcaagtagggtagctgtcaaaactgaaatcatctgccagggccagccatctctggatgagcatggcagattgtgctgctcatacagggcacggatttgatgtggcgtggactacacattaagagaagtgtttcaaaagaaagtaagggctttaacaacgtacaaaatgaaaattaaattacaactttagagtcatattgatagaagtcttttttttagctagcagctatttgagtacttataatctgcaggcactatcctaggtattta

SEQ ID NO: 127053 - DNA, 1387 bp, Homo sapiens
cctatcctgtgtaaggattaccttttcggcatccttgacaggtgtccttaacctctgctgggtcactttcagtgataacatcacgaattcctaatcatccttcatatggtgctacactaaatgccatcccagtgagttaaatggtctttatcatctgtgagattgtaggttaaaacatttacacagacaattgcaggtgtcaaacaaacacgcaaaaaataagtgcattgtaaaaatcaaaagaaagcgtgatttataggaaggtgtgagtgaagagaagctttgaggtttaaacagtgtatttgacagcataaaatgaaaagcagaatttgtaaaaattacctatgtggggcaaagaacctatatccataattctagtccaaatgcacagtacaatagaaacatatcttacctacacttttatcacactgcagaatgcatacatagacttctacatttttagaaggctacaaaatggataacattgtaaattataaaaactatagatataagctatgagcaattataatgttgttgctgttctttgatatggagtctcgctgtgtcacccaggctggagtgcagtgtcacgatctcagctcactgcaacctctgcctgctaggttcaagcgattctcgtgcctcagccttctgagtagctgggattacaggcacccaccaccacacccagccaatttttgtatttttagtagagacggggttttgccatgttggccaggctggtctcaaactcctgacctcgggtgatccgcccacctcggtctcccaaagtgctgggattataggcgtgagccaccgcgcccggcccaattataatggtttaactgattgacatgacttgtttggactatgctgtaaaaaagttgggtatggagggaagtagttagacttggaagacttcaaaagcagaagataccgaactcagactgagtttctaaactactcaaactcctgtgaataagttgtttataacttcagcctgaaagattaaataattcatatgcttacagatgtattcattccttttttaggatgcacacgaatttgatcttctcaaaataaagtcagaacttggtaagtttgattcagaggtttttttctgtgatgcttcattttttataaaccatcctgtaagctatgcctatgttcagtagctatgattggagagtgcaccaccaaaacatgtctctctatagatggtcttgacagaactctctgtgaagcagtgatgctcaaccataatagtcaaatatggtttttggtttcatatactccttctttctctttcctacatatatgagtgcttcaagtgaaatataagttagtggttaataatatatcataaattggagggggctagtggaat

SEQ ID NO: 127054 - DNA, 1043 bp, Homo sapiens
gatgtgttactttgctgcttttatagacatatatatacattgtttatataattagcttagtagtcaagcatgggctttgcagctgacagctatctatgcgatgctaggcagtttcctaatatgtaatgtaggtatgatactacctatctgatagggttttatgaagattaaatgtattaatacatggaaaattattagaatagtgcctagctcataagccctgtgtaaatatgtgctgttattatttggtatctattattatgctttataattgtactgcctcttcaggttgattaataaaaataagtggctcctttaagaaattataatagtgcaaaaaatgggtctgaacagttgtctaatgattctgtattttgtcattttcaggattaaatttctatcagcaagtgaaactggtcaattttattcggaggcaagttcaccaatgcagatgttatggctgccatgtgaagttcaaatccaaagcagacttaagaactcacatggaagaaactaaacacacttcgctgctccccgatagaaagacgtgggatcaactggagtacgtactgcaaaaccaaatgtgcacttcttactccaactctttgattttgtccctttatttaatttctttaagcctacagaaaaaaaaggaatacatatttattataaaaagtatacatcagtacagtgtggggaaaaatgtaaaaatattcaaaatgcttatttttaaaataatccccctcttacaaatgaaaccaagtatttttcagtatttgtgatatggagatagatacatatgtagagagatgaagtagatacagattttttaaattatattttattaacaaaatattgtaaatatctttcaatagccagtatccatctgttgcatcctttctaatggttgctaaatatccattgtatggatataatctattctgcgagatacttaggttgtttcttactttttgctattataatgatacagtgaatctatatgcctacattttagcacacttatctaattatttaattaagct

SEQ ID NO: 127055 - DNA, 1055 bp, Homo sapiens
aaggaagaactaggacctttgagtagaaatgagaaagatgtcatttttagcttcacaggaggtgtatcaaacaactagatctacccactactggggtcagctaccttcgaagatagtgtgttttgttatcatgatagatgatcaagcagaggctaagtggccagcggacaactccagaggcaactctggagggtgggaggtccacgatcttggtttaccaaatctggatagtagatttggtaaggttgatgtcagccagtaaaagtcaaagtgaaagcaatcagaagttgtctccagtatagcctttgcaaaatgctatgaaattgttggcaaggatacctgacaaaattatagtaaatgtgtacattcagctacctggacactgtattagcttggtaatttaatactatgtatctgtggttgttttcaggtattattttccaacctatgaaaatgacactctcctgtgtacactatctgacagtgaaagtgacctgacagctcaggaacaaaatgaaaatgttcccatcatcagtgaagatacatctaaactgtatgctttgaaacaaagcagtattttgaaccagttgctactataagagtacttgaaaacctagaagaaactaccacagaagcaatttttcatgtttttctcctatgagacagatatgaaagaacaatttaaatttgaacatcaacaaaagattggtccttggtgaaataaacttttcaaaaatgaatgttcttttcaaaaaataaagtagaaaaatgcacttactaagaacatgaaaaaaaatgaagtaggaaaataagatgaagactttgtattttggctgtaaagttttattgtgtgatcatcttaaattatctcacttcattaaactcataattatatatagaagtatatgtcaattacaaagaaatgaaatgttcaaattatttataaacctgatttttcaatcagtagtttcagtctcctccccaaggaccttcttcatccaacaagttgcaaaatttgaatatcccttctgtactatattgggtgagctgtaaat

SEQ ID NO: 127056 - DNA, 1049 bp, Homo sapiens
tggttttcaattattaatgctagtctgtgtaggtaatgccccaaaactcatcttggagtcgtattgcctgtccagagactcaagagtcaacctcctcccaccatgcggtcctaactcaactgtatttgttaattacataggctctggccacagctctagatttctaaccctcccactctgcagacaccatgaaaggcttttattgaaaactaagcaaacaaagatataggagcctgtattataatgaaaaatgcctaagttaaagatgcaattaagttaaatattttaaaaccaaagattaaagaggcagtctagacaattagactgtgcctacaacagtctgtctctaggaatcaggttcattcaggacatcaaggaatgtctgaagaggtttttagagcatgcttcagtgttaggacaggagcaatggaagaatgagacaataaactaagtaattgggaaggagaaagcttttttggagaaaaagttgatagagaacaagtcaaatagatataaaaggaaaaatgaaattgaagaacagaccaacacataaaagggaaaagatgttgtacttagggtttaattcatattagcagttgtttttttaagtggctaaacgttttcaagtttatttggggacagaaatggcaacttggacccaaagaaatctaacaagaatagaaggaaaatctcagcaaactgtactgactcctagatggagcaagagcataggccactattggcgaaggactctatgtagctctaagctacatagagactccttgataaaaaccactgggaactgctcttcaaagactgggacagtgatacgaagtgtaccctgaaagtcaggacaatttgagaggaaatatcagatgaaagcaaaacattcaaggaattattggatgaatttccagttgttactataattatagataggcatacaagagcttcttgtgtcccaaaggaaatgtgcctgagaaatttttagaattaagacagaattaaggcaacaagatggaagataacagaagagagccaggcaggac

SEQ ID NO: 127057 - DNA, 1042 bp, Homo sapiens
tccactctccattctaaggtcgcatcctcaccccacctaccaccagcacctccaccctgcttatattctcccaaagtacatcgcactacttaatattttttggcccaattattttttgtctcttctactagaatgttagaattacaagaaagagatcctgtctgttttattcactattgtatcttcagtactggaacagtacgtggcacttagatattcaattattttttactgaatgtttacaccactcctgagaagaataagcgtaagcgaaagaaggtgaagctggctgtcctgaaatactgtaaggtggatgagaatggcaaaataagtcgccttcatctagagtgctcttcagatgaatgtggtactggagcgtttatggccagccactttgacagacattattgtgacaaatgtctcattgcttcagcaaaccagaagacaattaattgtgtatgagttaataaaagacatgaactaacaaaacacatttactgaatgaataaatgtattaataattaaatgtcactcctctgcctagaacatccttccccacgatctccccatcatcctttaagttactgatcctcggtcactaatcctgggccccccaaattgtctgatttaaatgtctttcttttttgttcttgcagtgccttctttagactagcattaattatatgtattgtagggtttttttacttctttttttttaatatgtattgtagttcttgattacttgtctgttttcccctcagacatgagatacaagctacatgctacttgtgggcaaagcccagttttgtcacttctgaaacacacatgtagcacctttgtgcaaattagaaacagaacaccaagtctgatgagtgtttatgggctggaatccagtcaccaatctctcttcagcagggaacaacctatacatctgtacatagtggcccagtagacaataactgtgtttttaattgaatgagggagtcaatttcctctgtattttagcagttttcttaaaagcaaaggaactaatgtggggaaa

SEQ ID NO: 127058 - DNA, 2593 bp, Homo sapiens
cgcttctcgactctgttgttagccgaagactcgcctctcagccgcccgccgcacagacgcacgagtaaaaagtgcagctccatcggctgatcctcgctaagctccgactctgggcggcaccgggcgtcccacgatgccgaagaacaagaagcggaacactccccaccgcggtagcagtgctggcggcggcgggtcaggagcagccgcagcgacggcggcgacagcaggtaaggggtatccccgccgccggcatcccagttgccggccaggctggcgagtcttccatgcttcggcacggtgggagttgtagttctttctctgatgtacacatttgcatttccagggtgcgtggtttggctactgaactacaattcccagcgtgccctgggcgctgctcctcgcgcgatttagatctggcgtgcgaaccggactcttgggcaccggccgtgggggcagggaggaacgggtccttgggcctgagagtgtgtcgggacaggggctgaccgggagctgggcgggaaaggaaccattgtcagagttcctttctcggcggcgatctcgcccgatctctccccgaccacgggtggggaagaacggggagttgagcccgtgccgtcactggccgcctttgacaccctggctccaacatggagctcctgggatgccagacgtccggcgggtttggacgggctcttgcgtcacgcggcctgggccttgcgcggtgggcccggggtgacgcagaggcgctggggaagctttccgtctcgcaggtccacctggccaggcgaaggcgtcggaggcggggggaccactttctcccccctaggctgtgctccttcccctaactggcacctgcagaagccctgaacctctagcacctctgcgaccacccgaggcgacctcctgctcacggggggaagaaacgcgttctcctttgtgctgcattctatatgttctctgcagtgagccccagagaggcagggtggtgaggagcttaggttgcagttggctaaaagttgaggttattgtgccctcgctacgaagttgaaacttttcctgggtgggatgagtaggtgcttaactgaacttatggttttctacttattatatggttaagaaaaaggattccaattggaattggaaggcccttctaggagagaccccaataaactcaaatcgagtattaaataacctgggtaatattttatttagaaatttaaacaggagttaaatattggagtattctccgacgttatcacactggaactattagccatcaggtatttttggacacagttgcccctctgccacggctgccactcagaatgatatgcctttgttcacaagaaaagtaaatatggggttatgttgttaaaggttattggaaactggcatttaaaaaagctcaaaaactcgtgatcatgtattaaacatttaataattgaccatagggagggattcttaaaacagcaattttttacattttttaggtgcctctttattttgaatgctctccatgttgatgaaattcattctttatcaagatgtaaaatatgtaatttattgtggcctctggttgctctatgtgaattgaggatactttttttttttttgttaagggaaagagggagtctggctctgtcgcccaggctggagtgcggtgtggtgtgatcatagctcactgcaacctcttaactcctgggctcaagcagctctccctcctcagcctcctgtagctaggactacaggcatgtgacaccattcctggctattttttacattttttgtggagacaaggtctatgttggccaggctggtcacgagtccctcgtccccagggatcttcctgcctaagcctcccacaatgctgggacggtgcctggtctgaggatatttcttaccactgtgtttcagcttttcctcatctgaatcaaacatttgaattctttctagaaggtatttattttattctattacccttttgttgatgaaatggaaaagtttgaaagctaaagtttgaaagttataatgatgttagtaatggcctagatcacgcacaaacctttaatcccgtctaaagtttctgggcaagcctccttccctctttgtgcttatagtacctatacaggcctctggtggctgtatggggattgccttttaaattttgcttcagggctcatttgtgacctttcatcagctttattgctgctaccttttcactattttagtagaaaagatccatttcatcactgaattttagcatatgtaaacaagtggaaaataattctttgattaatttataacacaatacatgctttgaatatctttggaagtgtgtgctagaacttgttaactgtggttacctcagaagtggagctggggaaaggtatgggggtgagatttactttttaaaactttaacttggtcctatgtgaatgttttacttgtttaataaacaatgaataaataatagttgagtagaagagatggaaaattacacaaacttttgcttacttaacaagccacttacctaactagtatttttaaatgacatctaaaagaaatgggattcaaatgaggtctccactatgta

SEQ ID NO: 127059 - DNA, 1028 bp, Homo sapiens
tagaaataggctatgaaaaagaaaaactgtgaattgacttgtgaataaatgttaataaaattaatcagatgacactcatctgttgccattacttcagtcataaaaacgaggaagatagatccagaaatagagtgtgatgtcataggtctttgtttattcctgtcctaagcactccaagaaattttgagattttggcttcattgcttaatctttatgctttactactttggcaccacgcaagcaaatctgaaggccacttgcttgctgtgttaatttaaaaatctgctaaattctctgttttgattttaaaaaagacaactccgttaaaaaaaaaaatccagcccaacagtaacaggcttaaatttggagcattaaaaaaaaaccgttaaggtggtgacgtttgaacatacgaactttgattttactgaaagggaattaggttcagaggttaatcaggtgactcacggtcacttttggggcagaatttgggacttaatttaactcagtgctgaattgtagtttatgacttggcagtccttttattaatacaaaatccctaagtgactgtatatttattcctgaagttaatgaagtttaaagaaagattctagtttttaaaaagaagattttatttttttagtaacagcattggtacttttttttttttgagacagaattttactcttgtccacaggcaggcagtgcaatggtgctatctcggctcactgcagtctgtgccacctgggttcaagtgattctgtgcctcagcctcccaattagctgggattacaagcgcctgccaccagggccagctaatttttgtatttttagtagagactgggtttcgccatgttggccaggctggtctccaactcctgacctcaggtgatctgccggcctcagcctcccaaagtgctgggattataagtgtgagccaccgcacccggccagcattggtacttttaaactcttgcacattgtagaaactttcccttaaaggtagtttatctgataggcttttatactat

SEQ ID NO: 127060 - DNA, 3586 bp, Homo sapiens
cttttacctaataggtggccagcatcgaaatgttcagccttttagtgatgaagatgcatcaattgaaacaatgagccattgcagtggttatagcgatccttccagttttgctgaagatggtatgagttttaaatttaaatttgcaactttagataaaatgtttcaggtggaggaattcttgtagctaaagtatactattattccctgttttttttcttttaaattacgatggctgttttatattatttcttaggaccagaagtccttgatgaggaaggaactcaagaagacctagagtacaagttgaagggattaattgacctaaccctggataagaggtaggcaatactggaaactccattctgtgtgagtctatgcttgatcttagtcaaaagctaagagaaatgattattctgtgtgattctaatcagttaccttacatgtatataatttgtgcagctctcagataatagcaatatatttttcctaaaggttaatttgtttactttggatgtttcttattccgttggactttaatgtgggtagtaacatgccattagaatttagattgagtcagattagtcattattctagcataatagcacatacatagctgtatttgattataatagaaatgaatttgttgaattaaaagttaatcttcaactagaaatgataacgaaaccttgctttaagctgcttgtccactaatgttatgatatgaaaaaatgtcaaagctagattgtttcttttcactatagcttcagaactgaccttaatagaattaaaaagccctgaagatgcaattctagacttttatagttttaaaaaaagtgtaaatttacttaaatatgtaatataggaaaacaatacattaaaactatacttgtacattgaaacgataaaatattatgtaagcatttaaagttgtggctatcaaactaagaaaaatgccatgatataaagcagccttaagtgttttgtgtaacaaggtgagtcatagatggaaattaaattatattattgacaaatggttagagcttgatgagaattagatttaaaaaatctatacataggtaaagtttagaaggaaataagattttaaaaagttatttattgtatactccaactggatcttctttctcttacattgggtgttaaatagtgcgaagacaaggcaagcagctcttgaaggtattaaaaatgcactggcttcaaaaatgctgtatgaatttattctggaaaggagaatgactttaactgatagcattgaacgctgcctgaaaaaaggtaatgcccttatttttgagtcacagacgtacaactaataaggagtgtgttatcttcttttcagtaacatttagtaatagcactggaacactggcccactcttaaaattttctaatagtcaaggagtgcaccatcttgttatggctcaaaatgagacttgttagaactttgtttttgtattacgtaaaccaaaaaaaaatagcttgaaactaagaaggattagggtagattgtcatcaaccttttttgtatcagaagaggtgatggtcattctcttgttataccagaaaagcttgaaagtgtgtgtcagacatctagctcattttcccttgcacttatataaaacattgattgtacctgtaaattacatcattttcaggatatcccttggaatacttgaattctagaactttgtaatagaaattctggaattcaaattgttacagtgatagaacttttaagaccaaagagaaatcttaaagataattttatcagaccttaaagtccagtgttagtaggcttactagatttaggaaccaccaaatttaaaaagacttgtgactcggcatggtggttcacatctgtaattgtggcactttgggagaccgaggtgggaggattgctggaagccaggagttggagaccacctgggcaacaaagcgatacttggtttctattataacaaacaaaacaaaacgagatttggtgtctgccaacttattcagccaagtaagaacattatgaaaataattatcctccactatcattattttattagcaaaatattatagcaccaaaaatgtagaaatgcacttttaaaaaattgaatgaactaataagctttatatccttatttttctcattttacctgagagtaaaaattttgttgtaagtgaaacctttgatcaaattcactcttccattgaatagaataaagaaaggcctaggaaaactgaggtgggtctaagctgatatatcttgttattggtatagttgatagcagacccaactttttaaagataacacaatggcgctattaaaggtgttttacattcaaactatatgctataatggttgttggactagatgacctttaaaaattccattttagtttgcgtattttttacatttttaatttatcaggtaataatttaagctcagtatttgccccacacttgtggtgtatacagttctcaagagttaatttatatgtacctttatataaatgtattttttgtaccactgcattccagcttgggcgacagagtgagaccctgtctcaaaaaaaaaaaaaaataaataaagttaataaatgtattttttacggttttaaagagttatttttaatcccgtatttatttttaaaaatgttggtagggaaaccctgaaggtttacctaatggactgtgtacatccgaaatgcttaggagattaattcaagggcaatttgagcactgtttatatgagtacattaaggagtttgaagatagaaattggcttgaaacacatttagttgaactgttaaaataatcccttaagatagatactaatctccattttacagatgaggaattctatttagagaataagagtaactaatcgatgatcatttggctaataagtgggatctaggatttgagtgaggtctgtttctatagtttgagctctttagcctaagtttgtaacttacatcaaagcctggagcatggggtttcaaaaatggtaaatgctattttgtcattgatcaaatttgggaaataactgtcttagtaagttagtctactgaaaagactatcgtgattgcatcttggctgcttttataggtaagagtgatgagcaacgtgcagctgcagcgttagcatctgttctttgtattcagctgggccctggaattgaaagtgaagagattttgaaaactcttggaccaatcctaaagaaaatcatttgtgatgggtcagctagtatgcaggctaggcaaactgtaagtataagatatttacatttatagatctgtctattcatgacacccagacgtggtgcgcctatagtactgtaccagctactcaagaggctgaggcaagagagaggatcttgtaagtccaggagtttgaggcagcggtgagctataatcatgccactgaactgtagcctgggagacaaagctacacactgtattttaacaacaacaacaaaaaagataattctatatttatggatttgggtagacataggaaactgaaattctgatttgtgaaagtcttctaattttggggtttgagaaagctttcattctctaa

SEQ ID NO: 127061 - DNA, 3407 bp, Homo sapiens
aaaaatgattcaataatttaaattatagattatggagctgcaattgtttcagaaattatgtaattcttttgcatgcttttgattttatggatcaataaaagaagactgaagaggaacagaatcactttgttaaagtcatgctgtgaatttagtagcagagcttgagctgaaacgcacttcctttgatcttagttcaatattctttctctcctcacctcttttatgtataatgtttgggacctaatatattatgctgctgagaacattttcacgttgaattataaaagcaggaagatgtagaattaataagaaataaaatcattaatgtctatatatatatatttttttttttagtgtgcaacttgctttggtgtttgctgttttattgccacagatgacattactgtaagtaaaaaacctttgattctagttatctgcagttatttctaatttaagatggttatcttacttcatattcttatgcattaggaactatactcaactctggaatgtttggaaaatatcttcactaaatcctatctcaaagagaaagacactactgttatttgcagcactcctaatacagtgcttcatatcagctctcttcttgcatggacactactgctgaccatatgcccaatcaatgaagtgaagaaaaagcttgagatgtatgtatttttagtttcatattttataaaagcaacatttagtggacataattggttgtattcacatagtaatgactaactattttttaggcatttccataagcttccaagcctcctctcttgtgatgatgtaaacatgagaatagctgctggtgaatctttggcacttctctttgaattggccagaggaatagagagtgtaagtatctaactggcagaggaaaaagcttgtgtcacaaggcccattgttccatcattaccttgcaattgagaattgggcaataactttggaacatggccagcttgagaacccagtgatttatttccctacttcttggcagtggtggtgtaatactttagagagcagaaaccagtaggggttggtacagcagtgtttgactgtggttcattatacttaatttttgctatctatagaactgaagtttagggatcctcatggagagagttttgtctaatataatctttatgaaactgcttgaatttctcagatacccaatacatcaagctaatgaaggcatgtgatgcttcataattaatatcaaacaaatgaataaaatattaagtcagcataggtttgggatgagatgggttcagtaacttctctaagccaaagatggaaataaacactgctcattaagactgggacatgtgctttgcagttacccattcacttgtccactcacagatgttagttaccatggcttggctctcgaagggatttgagtttgtgatagtttgatcagtcgacccaatttgctttgtacctgtttttggtttagcacttaccatcttatgttccaggaaatcctttatctcgggcaaactgggtcatttggtaaccctaatttgtcatctctattttaaggattgctaagagaaaggaatgcctcaaatcttaccattggaagggagaatgtattcttaagatatgtgattcagatactgtgctgatatttagaaatgaggagcaggtttgactgtcttcacactgaatctgtgaaggatccaataagaaaactcaaatatatgggaaatgggtaactaaatagtagatattattgccaaccttgaattacttactagatgctttttaatttaaggagaaagaatatattttcattctgaaacttttttgcatttaaagaagttatttaacagtgaacggttccaaacaggattaatacagttctgccatgtatagtcattcatattccattctaggcctgtattgaaggaagtttacagtcttaaaatttttatgtgtaaagtggctctctccaactcccctacactccttttgtttgagggatagtaggtaggaatggaaagtaagttaatgttgtcagtagctaataattctccttatgtgagaaattggactcaaatttagcaatcaatttaattttattgagctagttaatagcttcttaacctcaacgcatggaaaccagatgtcccaatttttaatcttacattcctctactggccagaaatggcagtttcttttcttttttttccttggaaatgcatttttaaaatgaagtcataatgcagtttaaattatacatgttgaatttgtttaagtttgtataaacatatatatagacacatacatacatgtatatacatatacatatatatacacatttatatacacacacacacacacacacacacacacacacacacacacaccccacgtatcttttctccaacttaataaattacacaggataaccaggagaactcatccagacatatttcatttgacttgaatttttatccaaggacaaaaatgaactgggttacaaaacagaacctagtgtttttatttgctttttttttttttttttaaaataagctttttatatgtgggtgctggttgggggatagttatagggtgttcaaaaattaaatccagggcgttagtgaaatacatagacagatttaaaatagggttcatacagcaaatgagttttgaattattcaaggctttttgctaactgactttctgatgttactaactttgaaatctagtgatgtcatgaattctgcctgagagacttagaaaaaaaacttttgaagagctaacttttaggttggattttaatgaatgagttggttaaataataataataaactgtgttcaaagttgaaattagtaattattactcctttatgagagttctaggttaatggatgtttgccatataaccaattagataatagtagactctggagctgttctgcctaccttcggatctctttctctcttactagttggataatattgggcaacttctctatgcctcggtgtccttatcattaaaatggataaattattagtcacaacctcatagagtttttgagaacacatgataggtacagtgtaagtgttagctgttacttggaatgttggttgaattgagtattgcatttggcagtagtctactagtggccttttaggaactgtagagtaacttaatataagagacattatttggtgggcagaattaagatcttgggagccattgctggtgcaatcctcacttgggaaaatttaacaaaatatagttagaccttttccaggtctcacccattccattccccagctgagcggacaggggaagtgctacagcacagcgagaaaaaagataatcaaagaccaaatatactccttggagccaaatctgaaatcacctagattttatacttcag

SEQ ID NO: 127062 - DNA, 1330 bp, Homo sapiens
tataagaggagcctgagacagattgctaatgtagtgctgcctgaggttgtatagatctacatggtggatgcttgtgattcaaacctagatgttctgactgcaaaacctatgtcttaaatatggtattaaactgcctcgtatggttgtgatggctacacagattttttttaaaaaggtgagttctatatacctccaagtctagaatattgataaaatagttaatgcttcagaatttattggggaatttattgtctttttaatgcttacaaccattgtttgaaaggttgggtattttcttttttttcagatgataaaatagatttataatttataaaacttggtatggagagcagtagattgatgattctgatctaggacttttgaccctgttgtgtagtaatgactgctggttttttttattattataagagtatattaagatatttatttctctgggagctcatttcttatttgtcccagagtggtacagctctattatataattatcgtaaagtcctattaataggcttttggaagctgtttatggacttttttattacgtgttacattttattttcttccttcctttttttgtgtttttaatgcccaagtatatagagtcttttttctaaactacttagcatttaatttttcaagttttaataggatattgaacttggtgattcacaaactaaacttgattgggttttatccattgctaagattatattaccgtgaagtttttcaatctcagcacgcactgttgatattttgggctggattatattttgtcattgtaggggtgggggctgtcttgtgcattgaaagatactttgcagcatccttggcttctccccactaggtgccgatagcacccccttctcctagttgtgacaaccaaaaatgtctcagacatagtcagatgttcaatgggaggtaagatcatccccagttgataatcactggcagtgattctcacttcttagaacaaattaaaataatgtatagaattttcttaaattttgatttattcttctatacaaattaaaaaaccctttacatatacatatatacacacatatatatgtttaaaatactgtaaaagaacaagtagccaataaaatgagtaggagactgctagtccctgaaatgtacttgttttttataaataaaattattcccatcttgttatgatgcaatctgattctttggaatttaaacacagtttggtctattttaatacccactttgcatcttattaatgggtgttgtctctaacttagatataggaggttgaattggaacatttgaagaaaacatttgttggaat

SEQ ID NO: 127063 - DNA, 1461 bp, Homo sapiens
gcttattttccaccagtgtaataatccttttcattttagacattaaaagaaaccaagaaggcctagaagagctgttatattaatataataagttaaatgattcttaacctctaatgcaataaatgttaaacatgtatgaataaactagaactggagattgcccatctcctggcttcttagtaagaagtgtctgttctagttttgatcagctaaataagtttgactcattttttagtttttagtgtggttgtaaaatggagttaggaaataaaaacacctcaaataaagagacttcttaaatgcatagccacgttaactgtgacaaggaagcccataatctgcttaaggtcacagcaaatttcaatacattttgcagctgtcccccaaaagggattaaaacttgttcttaccttaaataatttaatcacctgaattatgtgctttattgcttatttgaaatatggcagtaaattagaaagtagatgctttaattgtagctttatgcctttgggataagaataattggaagtctgtgaatgtttggtttggggactggggagccaagggtagaagctatattggtatatctgtctctcactgaactttgaaatcccagtaatgtcttatatatggtgggaacacaagaaatatttgttggatgcatttacttggaagggaaatgttaattgttttgctgtagtacatcatcttgtagtcagcatttctgggttcgatttttgcatgaaaacatgtgtttatgtgtgcctagtccctaaataccatgaagatttacattgccttatgcaactggatattttccaaatgtagactgttctttgttagctctatatgaggtcagaaaagaaaaataataataaaggaaacaaaattgcttttcttgtccaggactttttttatgaagacatggagtccttgacgcagatgcttagggccttggcaacagatggaaataaacaccgggccaaagtggacaagagaaagcagcggtcagttttcagagatgtcctgagggcagtggaggtaggcttcttaaatgctgtaatagcttctcattttgaaattggattgtttcaggctgaacttgacaattgtaccattttgttgattgaatttcacctttgaaaataatttctcattttacgacctagcaggtttttaacaatataagtgaagactttttttttttcaaaacaaaagaaaattaatgctggtgtataaagatactttattttagttttttttcttttaaataaaaagacccatagtgatagaaatgtatttgaccttggtgtatttgtcatcatttaaaccatggtgcttagcatatacattcttagtgtacagtgttttttgtgaatttaataagttattgcctaccccttagactccaacccagcttgattgtcatttatttatttatttgagatggagtctcgctgt

SEQ ID NO: 127064 - DNA, 1871 bp, Homo sapiens
tttcagtccatggttggttgaatccgtgatgcagaaccaaccagatatggaggattgactatatatgtaaaagattgagattaaccttgaattgtggagggacagaggtttgtctgttaccaacaggaaagaggataataggtaaggatgctgatgactttatagagggttggtgggaaacagttctttcttggtgccttaatgttttctgaattaaagaagattgaaataagataactctactgttatttatttatttatttttgagctgctgttacgcaccagacggtcactgtgtttgcctcacatgcatgtcctcttttacacctctaataaccctcatgcagtataggtaaagatggccccattttacgggcaagggaacagactcagcaaggttaagttacttgatgaaatcacaagcccgcaagttgcatgtctgtattaagtctagggttgacggtcttttctattacattatatactttgtctgctgagtgagaaggggctgaggtagatgtctggaaggcaggtggagtggttttgtcattcaagttccatctcctttctcctctccctgtggcagtcagctcctcccttcctggttactctgacatactcatgatttaccaaagaattaagtagccagttttcttcttaacaagttctgccactattccagctgactttttttttaatccatctgacttctgtttctgtgtcatttgggctgcactcccatggttacaccttcgaaatggtcttctgacagaattgtttcatcactaaaatcttagattctagtgttacttcttattttcttagaaacctagcctgagacctcttggagcccttctggttgctggacctttcctttttgcttggtcagttaaccctatttaccctcacttccttccctggatccctactgcccatcatttcaccccctgcttgtggtgccattttgttttcctgactgttctgcaactttcttccctctcccatcctaggccattaaaaacacctgactttttttaagtttgttgagagctgttgaaatttaaaggtattctcaacaatgtggtttttgccttaattgttactgaaactcagttgtgccttcaagtttatcaaaactagaccaattctacacccttacatacaggatagcaacagtttgtccacatctcaggtatggcagtatcagtttaagccatattgttcatttatctcagcatgtatatgactgtttagaaattgtgtttacataagatccctctgagccattttagtgcctgtggtaattttggttcttccattggttaggaacgggattttccaacagaaaccattaaatttggtcctgaacgcatgtatattgattgctgggtaaaaaaacacacctatgacacctttaaggaggttcttggatcagggatgcagtaccacttgcaggtaagtgtcatcctttctacatatttgcttttaaagtagggagcagtcttgaatatagctcacttaattggcttttgaaattaattaggtatccagagtgcttccacatgttagaaaacagtaaacttgtttttgaaagtagacttgaataaatctgaagctgttcctttttttttctttgtattgttaaagttgggtggacggttactgatgtctgtatgaaagcaaatagcttgacatagctgtcttggattcaaggcattgaaaacaatttgctttctattgagaaacagaaaataagtgatctaagtttatctgtgggttccacataacttctgttaatcagagtcactctgtctagtgaaaaagagctataatgtttaatactgagccataccacctttttctttcacata

SEQ ID NO: 127065 - DNA, 1253 bp, Homo sapiens
acttttcttaatatggaatagccattaactctttatttatttattttttttgagacggagtctcgttctgttgcccaggctggagtgcagtggcgtgatctcggctcactgcaacctctgcctctcgggttcaaacgattctcctgcctcagcctcccgagtagctgggactacaggcatgtgccaccatgcctggctaattttttgtatttttagtagagacgggatttcaccgtgttagccaggatggtctcaatctcctgacctcgtgattcgcccacctcggcctcccagagtgctgggattacaggtgtgagccaccttgcatggcccctgttaactctttgtttttctccttcattctttgtgtgtgttttataaacatttaaatgtttatagggtcaaattagttcatttcttttctttgtgacttttaccctttttctgttttgtaagaatatcttaagtcttactgatgcacgtttttcctttttttcattttagcatttatataactctgcagccttcaaagctcgaaccaaagctagaagcaaatgtcgagataagagagcagatgttggagaattcttctagattttcagaacttgaagactattttctaatttctatttttttttctatttcaatgtatttaaactctagacacagtttttatcctggattaacttagataacttttgtagcagtggttatattgcttataatttaatgtacaatactattgaaactggtgagttctgattattaaatattctctgtaaatcagtaaacatgtataaagtatttgtaatgtttggtcataatttatttatgaagacagcaaaagactgatttcatgatggggaaaacaattagccaaagtttaatttcttacactgtggttgtcaagaatactgatttactataatgatatatacatgcaagatatttaacttaatatcttagacaagagttctgggtacaattttgggatctagttcccctggaaaagctgctgtatttttaatttttaatggaatgtagcttttaaaatcctgtcactggcatcaacaaaaggaattataccatgagaccttatagctgtacttaaaagccattcagttcagctattgggagttcatgatgaattagcatatgccagaaaggttgctaaccttaacatctgagagcagtaacactgattttatctgctgtatgagactttgtgcattttactttgaaataaagatttt

SEQ ID NO: 127066 - DNA, 1065 bp, Homo sapiens
gaactacagaatttgtagaaaagttttgttgtagttgcttctgaacaattagtttttgtttgtttgttttgttttgttttgtttttctggtaacctagcagtcaaagctcacatttttgtaagtaatttgcatgctattactctactgagactgaattatgattctcgagtctgggaagtttttgttgcatgtgctctgtgtttttcatttttgatagaaatgatttagacttgattttaaaaattacttcctgaatgtgaagaggcattgactgggaaatgaaattaaagaacaaattaccatgactcattcaataacactgcttattagctttgaattatgccctattataacaattctgattttgtggcaagcaatactggtgtgagttatttctgtggtttgataccaagcacctgcctggttaaaaaataaagcaccaggcaatttttcatagacaattatctttatttgttggaatatttatttgtaaatagtcaaagaattcttaaatgacaaaaaatcaactgttagcagtgatctaaaccagaggaaaatgaaattacttacatgtttccagtcaaggtataagaaagggttctgttaaagggatgctgctttagccaatcttggtgaataagcaaatttgcacactggagttgaaaggagggtcaagttagtgtgatgaagaattgctagtaacactggcttctccagccttgctggttgttcctagatgccctcatttggagatgccaaagatagcaactactgggtgtcaaacagccgtggggcctggttttaaggccatgtgatcttgtatccctttactagcagcctcatgagtcatttgcaagtcatttgcaggctcttggagccctggaacagcacccaactcagttttctctgctagttctttatttttccatttgcgtgttgcagctcattaaaaaaatattggaatagcatatatttacattgtgacttcactctaaagaagacattttctttcaaagcacgtcatggctcactaggttgttgtcttagttttttttggagtcacc

SEQ ID NO: 127067 - DNA, 1064 bp, Homo sapiens
ctttgcagtggctgaactaatttacatgcctaccaacagtgtgtaagtgttctcttctatccacaaccttgccaacatctgttactttttgactttttaaaaatagccattctgactggtgtgagatggtatttcattgagctttgattggcatttctctaatgatgaataatgttgagcatttttttcatatggttttcagctgtgtgtatgtcttcttttgagatgtgtctgtttatgtttaaaggcatatttaggataacaaccaaatcataagattttgctaagtatcaatatatagtcatgtattgcttaacaatggggatacattctgagaaatgcatcgttaggtgatttccttgttgtgtgaatatcaaagtgtgcttacataaatctagatggtattgcctgctaaacacctaagctatatgatgtagccaccatcattgatgtgctccacccttgaccaaaatgttgttatgctgcacacgactgcataaaaaacctgaagccatttttcaaatccagggaccctggtgtcccccttgtggagcattatagagtcacagaggataaaacctccaaaagagaatgaacgcagaactttcctcacatgaaaccattctctctacttattgtcagaggatgatgtttcaactgagtgtctactctgactctagaaagtgattttcatccttggatacagtcactgaagtatcttgcctgactgtgaccatttactgtggagatacagcttagcttattctgacacttcaaaattagacattcctaccataggctggttttgacaactttgccctggatacgataaaagtcttcccttatagaacttcatcaaagtctgtgactgcctgtgagtatttcctgaacacctgtagttctctctcaattgtttttatctggcttatgcaaatcgttgcctagaatcccaaacaggaatcctgtgtagtacacatattcacttaatcctgtatcatacttgcctgctctttaattggtcatacttgctataatagattgtgaaacccattctcaagcccaac

SEQ ID NO: 127068 - DNA, 1101 bp, Homo sapiens
gtaatctacatccatgtgtattgatacacgttctctcctatttctctcctacctaattagaagaggtattctttacaacacctaccctttggattcctctctttccttcctcatgaaacaacttaataaaaatgacaatggctattacttattgttcgctaggttctaacactgtggtaagtacttctgtatactgatttcattgccttgtgattagcctgtttccaaaatctctagctgttcctcatctcaatcaccttcctgtcatttagaactgtttgtaaatctctgaaaatgttatgtgtttttttaaaaccagttctacgtgggttcaaaatacatgctggtctcaaaacatgttagtcacaagtgaagcaaggctcagcagggagaatagatcgtgctggtggcataaatctggcatgaaaaatgttttcccatgttatttatgaatcacaggtttgcattcaggagagatactcgagagtagagaatcatggacagtgactaatgaatataacagcttaactgactttttatgttattgatccctaccacaacatgttggagatgggaggatcatggcaggtagaggggagagccttacagctggtggggaggtaggtctagagtgcaaggcttgggctacataactatgtggcatcactaagtatctctttaatccaaaggcaggaacttgcttgccactctagttttgccaaaacatcataggaaaacgcttattacccaggcagtgctgcaaaataggatcggagctatgaagtccaggggtgaagtaagcagcccccttgcaaaccatgcaccattttgttttgtgatttttctttttttggcccattgcaggtagtgctgtttcagcagagctgtaagcagagctgcatggccaacatctgtgaaacagtaagagcggtccccacatggccttctgtcctcaaagtgaggcttatcaattcagaaagagtagggattctggagctatgctagttaatatgcaggactcttctcattccgtgttatccagtaactggtagaatagatagttctgcttcattacgaatgacacagtttcacagtcaaggg

SEQ ID NO: 127069 - DNA, 2280 bp, Homo sapiens
tttctgtatagttgttttcactaaatacaactgtgtaaaactatttccttaattttatactagcagattcctttttatgtgagtaataaggattttttttacctcaagttgaaaatctgttgtaaaaaatatcttttcaaaagatactttgaaagtgtcatttaaatactttatttttttgcttatttaattctaagaacttaaggaaaatacatgtataacaagagtattttctctctagaagaaaatgattaagagggttttcttaatgagaggctgcagaaattattgctccattgaattttctcttgttcacaggtggagatacactacgccttgacacacttatagaatggtggagagaaaagaatggttccttttgttcccggcttattatcgtattagacagcgaaaattcaaccccttgggtgaaagaagtgaggaaaattaatgaccagtatattgcagtgcaaggagcagagttgataaaaacagtagatattgaagaagctgacccgccacagctaggtgactttacaaaagactgggtagaatataactgcaactccagtaataacatctgctggactgaaaagggacgcacagtgaaagcagtatatggtgtgtcaaaacggtggagtgactacactctgcatttgccaacgggaagcgatgtggccaagcactggatgttacactttcctcgtattacatatcccctagtgcatttggcaaattggttatgcggtctgaaccttttttggatctgcaaaacttgttttaggtgcttgaaaagattaaaaatgagttggtttcttcctactgtgctggacacaggacaaggcttcaaacttgtcaaatcttaatttggaccccaaagcgggatattaataagcactcatactaccaattatcactaacttgccattttttgtatgctgtatttttatttgtggaaaataccttgctacttctgtagctgctctcactttgtcttttcttaagtaattatggtatatataaggcgttgggaaaaaacattttataatgaaagtatgtagggagtcaaatgcttactgtaaatgcataagagacgttaaaaataacactgcactttcaggaatgtttgcttatggtcctgattagaaagaaacagttgtctatgctctgcaatggtcaatgatgaattactaatgccttattttctaggcatataataatagtttagagaatgtagaccagataaatttgtttactgttttaagaaaactaccagtttacttacagaagattcttttttccaaacagtaggtttcatccaagaccatttgaagaactgcaaactctttctcttagaaaagaaagagggcagcctaaaataaacgcaaaatttgcttatactccatcacattcagatgtcttggttgtgacttattaccagtgtggcagagaacccaagttacattttagatcaaaatattctttatgtaggtattgttaaaaggctagagcctacaagttgctcttccatgcgttggtcagggggccctgaaaacactggtaatattaagagtctttctcagggtaacttaatgttttcttaatgaacagtgtttccagctacaaattcttccaataaattgtcttcctttttgaaaagtactctcatagaagaaatttagcaatttctcgttgactgactcagtctattttaagtattcagaaaagattttgatccccattgagttaatgctctgccttgaaaattatttttctgatccttgttagtgataacattttttttctactgaaggtcagaggataggaaacaagtatttctcttctggtatacatgtaatgtattctgtaaaaaagtattcatattggcaattttagttaggcataatattgtggttgtaatttttaaaacttagtgttttgtctgattaaagcaggcactgatcagggtatctcctaagaggtaattcacttcttattcctttccaataattattacattctaaattttcatctatgagaaataacaaacaagaagggaatagaattaaattggggtataatctaatcttcattgtttaaatggtttgccttctcaccattgaagccatttttttatagcctcagaaagaggaaataatgcctccaccattttctacctggtgacttgaaaattgaacttttaagttaggaagaagttagagtcagggaacttgtataccactatctatgcagcattgttatagtctgattatttctgtg

SEQ ID NO: 127070 - DNA, 1021 bp, Homo sapiens
acatgtttcttttatgcagccatttctctgaaggttttatataaaaggtgatcagatatataacaacatagcaggttcttaattatagattagaggttatcctaagaaagaaaacatgggtttcacagtacctttgctgcccagaaatgttttctaaaaggttcttgtagacaaagacatttgtacagttggagtttgcatctgcagtattaacaaacccagtcttccattaattgagcatgtattgactatgcactatatgccaggcactatagtgggtgcggaagatctcaggatgtctgtcaaaggtggcacagtctccaatgggaggaggaagaggctggcatgtaaacaaacaattatgattacagtgtgataaatactataatctgtgtacatcagactgggatgtggggcataaaggaaagtcagctctgcttggtgcagctctctgtaagagtttgttgctgctgactgatttctagaggaaagtcagctctgcttggtgcagctctctgctttgtaacagtttgttgctgctgagtgatttctagaagtgtgttttgaagagggagatgtgaagacttgcctggacatggtgctagatttctagtcagctgggctagggcagggatcctgtgtgggagtcagccaaatgaggaaaacatcttgggtgtggcctgaggatattgtccttactttgctctacttgctggtgttaggtactgtcagaattatgttgttgatgtcaaaaactcaagcatgagttttcctccctcttccttgcccctcctcctgctagctcctttcccagccctaaatactttttcttttccaagtcagcctcattcatgctggatgccattccaggctttcaaattctgttaaccaaatatgaatattttcttggtctccaaactttttcttacctagtggtcttcagatatggtgtgtaccactggaggtacacaaaaactttccaaggagtctgtcagcagagataattttaagagaatcagtt

SEQ ID NO: 127071 - DNA, 1498 bp, Homo sapiens
aatgttgaaataggagttgcggatacattggatatactggatgaaatacaagcggttaatttttgtaacgtgagggaaaagcccacattgctggttacatgtgtaaatcactgcgttattgctttagtcattgtctctatttagcaatgacaagactggaagaagtaaatagagaagtgaacatgcattcttcagtgcggtatcttggctatttagccagaatcaatttattggttgctatatgcttaggtctatacgtaagatgggaaaaaacagcaaattccttaattttggtaatttttattcttggtctttttgttcttggaatcgccagcatactctattactatttttcaatggaagcagcaagtttaagtctctccaatctttggtttggattcttgcttggcctcctatgttttcttgataattcatcctttaaaaatgatgtaaaagaagaatcaaccaaatatttgcttctaacatccatagtgttaaggatattgtgctctctggtggagagaatttctggttatgtccgtcatcggcccactttactaaccacagttgaatttctggagcttgttggatttgccattgccagcacaactatgttggtggagaagtctctgagtgtcattttgcttgttgtagctctggctatgctgattattgatctgagaatgaaatctttcttagctattccaaacttagttatttttgcagttttgttatttttttcctcattggaaactcccaaaaatccgattgcttttgcgtgtttttttatttgcctgataactgatcctttccttgacatttattttagtggactttcagtaactgaaagatggaaaccctttttgtaccgtggaagaatttgcagaagactttcagtcgtttttgctggaatgattgagcttacattttttattctttccgcattcaaacttagagacactcacctctggtattttgtaatacctggcttttccatttttggaattttctggatgatttgtcatattatttttcttttaactctttggggattccataccaaattaaatgactgccataaagtatattttactcacaggacagattacaatagccttgatagaatcatggcatccaaagggatgcgccatttttgcttgatttcagagcagttggtgttctttagtcttcttgcaacagcgattttgggagcagtttcctggcaggtaagcttattgtttgtccagcaaccccaatgacgtgtaataaaatgctagcttcaataattgaaattaaagttataaggtcaagttcctgatttcaaaaggatattcatgtttgctcttaattttgttcatggaattgaagcactgaatgtgtttcaagaggataatttatttgatctctagcaaagaggtaccaaaatgttatgaacactcagcgttgagatgcctcccgcttcctgactgttcattagtgaaacactcatcgattaaag

SEQ ID NO: 127072 - DNA, 2063 bp, Homo sapiens
ctgttggtgatctcataaaatggttttgaccttttggtatcttaatttctatctaaactttatcagaaaattttctttgaatatatcaattagttggctgtgggaattttccctttccacattaataaatgcctttctgtgtttctgaatcagaagcaaatgattagggaaaaatatatgtccaaacaagacaagattagtttaaacagttaagaacatttagtccacattgtcttgtcagccagcaattgtcatggaagctatcatttttaagagtgccactgtgtggatttttttttcaagtggttattacattaaaattacctcatactgaggtttttgcactgaaatatcacagtttcagatttcatggttaatgttgtgcgtatgtttgtatgtttttaaaggaaacttgcattttcaatagttgatcctaaatttcataaactgcacttctttactctggtaaagctgatgtttttgtgcttattgtgaattgccgtagtacctttgaatgtcaaactttatttagaaatataaaacttatcctttatgatataaatggttgagtgtatgtacccagtatttctaattaaatttcacatgctaaattaatgaaagtaacaagattgtaattttttaaagtcagttgattaaatgcaataaatattggttgctcaaatatgccacaaataactcgaaatttttcatttactttcaacagcataagattctttaatatttaggattgactgttctttccagttaagcactgaaggattatgtcttgtagcttccccaagagaaggggaaggaaaaaaaagcactatgttaaggataatacagaactcttttgaactattttggtagtaccttttaccatactgtttgctttttgatttgggtaaatatcttaagagcaaagaaaacaatacaccaaatgaaaatgctttgaaagtaaatgaaaacagcgcttttgaaaggctggtatagtatgaccctggagtcagcctttgtgttacagcgaaaatgttggtgctataaattctgattgtttacagatgttgattctgcttatgctccaaagtgtgcatgatgtattttacgtagtactctgaggaagtctctttataaaacctactaccacttagtataaatttgtttgaatttatatcatttgttactgtaaattcagcttattccaattaggttggcacagatttaaactgatacacattccacaaaaaccaattcagtgtataagtattgaagtataagcagtcattgcagcttgatgccagatcatgtatgtaataacaagtggaagttaatagggccttctaatactgtatgggtactcctaagaattatttcattttggatataaagaagttatgaggcctcctgtcacattcacagctggttctccaaaataatttggttgtttcaaaaacaaatggtaatcatttggttggattcttcagtatcatgactagatcatgtggttttaccatagttgccaagtggtgggaggtagcatacctgaaaatgtacgtgtgtgtttgttgtattttttcacattttgtgaacaaagcacatttattaaaaattttaaattttctagtattctttgtctgttacttgtaaaccgaaagttctgtggtctttgatgtatctcactaagtgatttcagcattgggaagcaatttagaacttgagtgacttgtacaattttcccactgggtttcatttttgttaaatcccttaatgtcataaatttattcactgagatccagagaactcaggtgacttcccattgtcatgttttgtcatgtttatggcagaagcagggcaacagcataaattctactttattgtatgtcaaccatatcatattctttttttttttttaagtaagctacataatttatcagctctttcaggacagcagatgtcttcctcatgatatgaaaggttttttgttgttgttgtttattaaacaaatgtttgaattctgccatgtgctatatgctgggaaagcagcaaggattggagtgatcatt

SEQ ID NO: 127073 - DNA, 2017 bp, Homo sapiens
aaagttaacagtttcaaagaactaaagttttggaatcattctgcttgtacaaattttataatgcctctttcattatcctctttatttgattcatctttatttcatggtatttcttgtttagcatttttatattagtttgtttttggtaactgtaaatgttaaagtgaatgtaaatagaaatgtcattcctgtaaactcctacccaaattaaaattcatgtaagtcccaacccaaaatacacaaattatttcccattttaaattgttaggcaaaaaacatatatttaaatgatgattagcaggtctttggacttaattactttgagatttttgtaaaagttgtggttgaatacatctgttcaagtttaataatttaaaaggaaaaatgtataatcaatgctggaattactatgatatgtgaaatggtttgctgaaaagtctatgtactaaagtggaaataatcttgaagttcttaatatgccttgttttctgtttctgcagagtgtctataaatgtgatttcctgaacttacagcttcagcaaccactccagcttgcacaggatgctatagatgcttttttgaagcagctgaaaaaccctattgattctcttcctggagagcttttccatgtggttgttttctctctccttctttcttattttccatctccttaccagcgatggatttgctgcaagaaagcccatgaactgttagtgttaaatggtttattactaatcatcacacctgattcctcccatcagaaccgtcatgctatgatgatgaaaagctggaagattgctatagagtccctgggctttaaacgcttcaagtactcaaaattttcacatatgcatctgatggcatttaggaaaatctctctaaaaaccacaagtgacttggttagtaggaactacccaggaatgttatatattcctcaagatttcaacagtatagaagatgaggaatattctaacccttcctgctatgttcgatcagatatagaagatgaacaactagcatatggtttcacagaactccctgatgcgccatatgactcagattctggagaaagtcaagccagctctattcctttctatgagctagaagaccccatattacttttaagttaatatagaagcaaaaagcccctttcagtccaggctcctaaactaattgcttacaccaattggaaatactaacatgaactcagtactgaaaacctggtttgcataaaagaaatgcagaggtttacagagtttgctatttttttctacttctcaattttaaaatttattcttatatagaaagcttaaagtttcatgcagagtgactcatgtcatagcagaaactactgttactttagcatttagcactatcatagaaaggtacctttttctctttagtgctattgtgaaaacaagcataatttgctatatgttttccttttcaacttttcagtgttgactataaaccattgaatggaaaactttaagatgtagaaagctgtagattgcactttgatgactcacaagttaaatgtgatacagaaaaatagatcggttagttgttttgtgatgcacttatctttttcttttttctaactaaaattgtgatgttacagaaagtcattttatgttccttttttgtctgatgatccaatatttactgaactttttgtaattggtgataattctttttatttcttccttatattaaaagctcatttgacagcatcagacattgggggagagatgtcccccaaagtgtgtattctaattttattagccctatccaataaacaccattgccaaagtagtattttcataactttcttgttgatttgggccttggtgtgaagtatatttacctgagagttcacttttacttttcttaaacttaggcttcatttacaaaatgttttatttaagcaaggaacaatgtaatactcaataatgacctaaaacacctttttgaaagggtttgcacttggaagagagtttatgttctgttgaaacca

SEQ ID NO: 127074 - DNA, 1033 bp, Homo sapiens
gggggttgggggtgggggagccaggctcagtggctcacgcctctaatcccaatactttgggagctgaggctggaggatcacttgagctcaggagttcaagaccagcctgggcaatacagcaagaccttgtctcaatttttaaaaaattaaataagtaaatatatataaaacaaggctgtacttttttactatcctttttaagtctaataaatgaatatttttaagacttgttcatcttaacttcaaatatgatcattattaatagatataactcacagaaatgaaagctcattggggccgtcagtaatttttatatgtgtaaaagggtcctgagaccaaaaagttaaagaactgataatctatgtgatttcttacattctcatatttgattttgttcttataaaatatctgtttttaggttgctacaagcctcaggaaaaatcagattacttgatgttggcagctgctttaacccatttctgaagtttgaagaatttctaactgttggcatagatattgtacctgctgtagaggtatgcatagttttgtttttggactttaatattttacatgtatatttacaaaagaaaagcactgtctttgcatccctaaaatagcaaatgtatttcctgtgtacccattgaggagagatttcaaaactaaatacattttgtgaataattgagcatttaaccaaatattgtctttattttctttatcatctaaatagccataatctaaaactatgttagagcaaaatcattgcaattaagaaacttcaactgggcatggtggatcactcctgtaatcccaacactttaggaggccaagatgggtggatcacctgaggtcaggagtttgagaccagcctggccaacatggtgaaaccccgtctctactaaaaaataaaaaaaatgtagctgggcgtggtggcaagcgcccataatcccagctactcaggaggctgaggcaggagaatcgcttgaacccgggaggcggaggtggcagtgagtcgagatcgcgccactgcactc

SEQ ID NO: 127075 - DNA, 1084 bp, Homo sapiens
gaaattctgtgagtaaaatgctgtcaagcagcatcacatgctgatgcttcagagaaatcattcatgataggtacagccaatgtatgtggcaaactttagtgttgtcttatttttagaaattctgatagcaccccagctttcagcaaccatcatgctaatcagtcagcagccatgagtatcaaggcaaagcttccaccagtaaaaagattacaacttgctggaggctcaaatgatgactagcattttttagccataaagtattttaaaattaagatctgtacattgttttttagacaatgctattgcacacttcatagactatggtgtagtggaacataacttatatgcactggaaaaccaaaaaaattttgtaacttgctttattgcagtagtctggaaccaaagctgtagtatctctgaggtatttcgctgtaatattaaaattgttcctatacccttttaccctgttggtttgtggtatcaagtgtattttgttaattacttaaaaatgctaaacttgaatagttatagaaatattcttgatagacacagaaaataattatgaaagtaagatactcttaagcagttccaaaactatagataataacaagcattacttttggttgctttgattttaaatcatgttgaaaatattacctagttttaagcaattacgtttaaaaatcaaaatatctttgattacttcagtagggaaccataagccatctttacctttattcaaaggttactacaaagcttataatgcataacgacttactaaacatcctttaactcatgtgttatggacattcttaaatattaatattttaagtgttggccagttaaagaaattatatagttatacttctatcaaacacagatatgtatggaaaatatcaactttagatttctatatattttttatagctctgttatattgttgagattcccttatttattgagtcattgttactgcattttcctttgattctttaagcatgatttccttaaatttgttaaatatttttatggctgggcacattggctcatgcctgtaatcccagcactttgagaggccaagaca

SEQ ID NO: 127076 - DNA, 1022 bp, Homo sapiens
tattttatcacagaaggtcattttcaaatgaaactgctggaaaaaaacattaataggaattcaagtcaaactgctaaaaaaaaaagaacattggccattatattaaaataaatcataatttattatgatttaacatgattgaactcgaataccttaacatttctaaaactgaggaatttttatttgagaatctagaaaacttttccctgctttttttaagttaatagttattgccagtctgatatgtaacaaattgagaggccagtcactacccaaatgttagtgattaatggaaatatttgtatatgagtacatagccccctcaaaaataattctctcaggtttaaaatcagtattcaggccaagactcagactgatatatagtcatcttaacaatgtgtgagagggtttgtttgtatccttactcttctttcttgatcaaattagagggctaatagtttggttttcaactcagtacttattagactgtagaccctaaaatacccagtaactgggattaatggaaagattttcaaatttgaatagttaaatattggttgttacatttggactattataattccttttctgtttaaaaaaaacctcttagatgtaagaattcaataaccttaagtggaggaagaattttagtataattatctcccacatttggctgttctatttatagttttttttcttttttttattattattatactttaagttttagggtacatatgcacaatgtgcaggttagttacatatgtatacatgtgccatgctggtgtgctgcacccattaactcgtcctttagcattaggtatatctcctaatgctatccctcccccctcccgccaccccacaacagaccccagagtgtgatcttccccttcctgtgtccaagtgttctcattattcaattcccacctatgagtgagaatatgcggtgtttggttttttgttcttgtgatagtttactgagaatgatgatttccagtttcatccatatccctacaaaggac

SEQ ID NO: 127077 - DNA, 1001 bp, Homo sapiens
ctaatagcttcttcattttacagataagtgagcggagtcctaaaaatattaaaataactttcttgatgctttggtagttcattattaatactatacatattttatgggaataatataggttccccacccccaactccaaacctaatattagtgactccaaatgttagaataggagggaaaatgagaagcaggaagtggccctagaatttccattaggtgaaaagttataaattgatgggaatggatgatccataggataggtatgattagctgagttggggctatacaaggtgagggttttttggggagagatggcagggaaggaaataagttagggtagaataaggaggcaaaacagccattgaatattaaggacaggatagatagtgactgggaggttggagaacagagccttcttttcccttatctctattagtggaattgaaaataaaacaggaaaaacaatgaaaataagttgtgttgttcttttttgctgtgataagaaaagatttttttccactcttctccaaccatttgcccaactgatgctagttgatggtgatgaacaggcttggggtggggaagggtgaacagggttgtaaagagtagcaggtaggcttaatgcactcttttcgtttaccactttttccttccccagtttatggcctgccttgtttcaccacttaagagatgctgtgccaatttgtctaaaggtaaagtgagaactggagataaaggtgtgttccaggcagcactcgtatctgaagcagttactaaaaagaaatggtagggagatgcctagcagtggtgatgcgaaggggtatttctggtgtctgccattgatagttaagagacagtcttttaaagtgaggttatattcataagatattcataagataggtttttcactatctagtgaatagatccatatttataaatggaaatatgcttgcacatataggtgttttctgtctttgcatacataatttttaaaatttgac

SEQ ID NO: 127078 - DNA, 1081 bp, Homo sapiens
gggccggcggccgaaatactgctcgtgcgcagagggccgggtccccgaacactccgccgccccgggagcaggagcggaaactggagcaggagaagctctccggtgtggtgaagagcgtccaccggcggctccgcaagaagtaccgagaaggtaaacagcgcgctgagtgagggaggaaggggaggcctcatcacccccaaccgcttgtcacctcttccctcctccaaagaggccaccattaaaatgtaaaggatctgcacgtccccccagccgctgctgctctcccgggcctggtctgagccccctagtcggcatcagacgcgctcctccccgcccccttttctttgagggcccttcgggagagttctaggcctgtaaaggaattgagtccccaccccctccaagcccctgtccccagccggggtgctgaggttgttgtctcggcacacacaaacacatacacgctcacagaggaggtgggggtcgctttttgcaagagacgccgaggtaaaacaagacaggtaaaatccatttgtaaaagacgaaaagaaacctgagttgtccctcctttacgcttgacctaccggctgtaccatttgcttccttatcagacccccttcctagtacttcattcctacaaccatgccgagccttcctcgcattggcttccagggctgggaagccagcaggccttttagctgactggacttcacattgttaaaagggggcgggctacactcgtggcccccactcccatttcttaaatacttggtcttaactgtttatttaggcgatgaggaagagatctgggcaggttctgaaaataccgtttgtattggaagcctcctaaagacacctgccgataaagcccaccctcggcttccatggatggggttccggtgagaaccccctctgtggaagctcataggggaagaagccttagtggcttttgcctgtgcctgaagagtgtttatagttggagtctacagttatccttgatatctttaaatataggcttttgtacacagctgttttataagattttgacagtgaaaattctgttttcataggcttgggagag

SEQ ID NO: 127079 - DNA, 1028 bp, Homo sapiens
tcaggtggaccaacttatttaatttctactcttcaaagtagtgctactaaaacaacaacaatactcaaaatcaagaagacaaagcctccaaacctagaatccttttagaccctgtggatcgagaagtggatgaaataaaagaatcggttgattccttggcaacttttcattaacattcaaagcagattttaaaagattaattgagaacatgaaaaatagatgttattgtaaccattctttttattttggttagaaaaggcccaactgggtttttataagttgaacaaaatacatttcccattatctatgaaaacatggtaatctattatggataaatcattcttattatccttttctttttgtgctctttcaatgagaatttcttctggactcttacccctcttataattgggtaatgataaaattagataaattttaataccaatgatttggcttctaaattttgttgcatttaaatggaattggagccatttagcatagattaaattccagatcttgtctctgtctcagtgaataggttcagatttctaatggaagaccaagactgatattaggaccagctactgataaagtcagcaaaactactatatgccaccgtgtttgccttacataattatagaggtgggttttacattaggctggctgaaagtagaattctgagatgaagagttatatgtaaagattttttgagatgtgctctccagaactgcacctgtgaggagatgagaaaaggaagatagggtagaggggaaagctgactcacaatgcaactgaggtcttgggagagcttacagggagctctggaaaggagatgtctctaagaattgttccaaattgaagcaaaggggactttattccttggcgtgtgttgggcattgactgtggctctcccctgagaagtatttagtgaggtagttgcttgtagccaagagcatttctctgtcagggttacatctgtaagcttttaccagatggtattcctcaaagctgagggcagtaggctttaa

SEQ ID NO: 127080 - DNA, 1011 bp, Homo sapiens
taatttcatcccactagcttggtccaaaaatatggggtgaatgctggagatgaagggtgattttggatataacgtatacatgctacttgggtttctttttagcccagcttcgtgaactaaagcaatgttttttgggaaaattgtcctaagtagagattcttaaaggaaaaatgaaaaaaacatgcaacagtactttgtgtcctcacaaaaggtataccatgacctactctcttatttagaaaatctgtggatctcaaagacaaatcttggtaacaaaagtgaagttacctaagcactctagacagattaaacaacaagtttctcccactattgaatggagaaaaccatcagcatccgtttagcatttattggaataatctcaatagtttcagctttaactttaccagatacaagctttcttcaaatctgcactaatcttgtacaaatcagtgacttattcagggcacagtttggctattagtggaagttaacacagacaggcctgcagataagtgggtgatagtgtaaaacacatcgtgctgtgggtttatattacagcaattaatccagagtctgagaggaacacaaactcgtaccttaatatcatccctcactcaaaatcactcatttagctcatttgggaagccttgtcactgcctgaaaataaaggagtacagatgaaagttgccacatcctgtggagaagaggcaattatcctttatttggtttccaacttcccttgtaaatgtgccagcagataaagtgttggtgtgagttcagggctgttagaatttttttttttttctcaccacatgagtcaatcctgttcttaggctttatttcccagtgatggctgtgtaccgagcaagtgttatcttcccatgtttatgtctccacgacaagaatttaccattttaaaataaaacgatcaagttggtggactgatggcttttgtgatcacaccacaaattttacttacttgttttcagtgttgaaagtgattgatgaaaa

SEQ ID NO: 127081 - DNA, 1004 bp, Homo sapiens
gttggttgtacccttctctcttcctactatctgccaagtatatctagaacataccttcccattatattgataagtataatatgttatacagaactgattcttcattttttttctgctgtggcaaattattttcgttaacaagagtgaatacagtttaaatgttgaaaagcacattgctgtgaagaaaatgaattcccagtggtttaagagatctcagcatttttttagtttattaatgttcttcaatttgctttaatttctgtcatgaaagacttaaaatgtacgttgtgttgttaatgttgatttaaaatttatttaagtttttagtgtttcctcttgaagatttttctaatggaagtctataagattataccattagaatgtcttaaagatttttttttcttttttagcagattaaggaaattaactttgaattccccaaagaaagaatgctactagaaatatcttaaagattttctggtatttaattttatgtttatttgatggcattctctgtgaaagttttctttattattttagctttgtatcattttagtatacacacccaacgatagccatcattttgcaactttttctcaaccttaaaaaaaaaaactttcttaaaatgtattttaggggtaggaaaaaatcagtggtagacatattttggagaaagcacttataaaatttctcactggcagatagtgaggaaaaacttacagtacactaatccaaatatcttaccatcttaacatatgtagactgtcataaaatcatctcatttttttttaaaaaaagatccccaacatctttaagaaccattcctcactattacctcacccaaatttatgttccaggatttggttgatctatgtctgtatgcctgtagctaactcttcacttcctttttgttttcaatttttttccttatggagtctacctttagtttagctaaatggcaacaaaaaatgatcttgttctatacatatagtttgtacagccac

SEQ ID NO: 127082 - DNA, 1078 bp, Homo sapiens
tttcttggttagtgtcactatgtagttgttagtctttattgttatgtcttcttggaaaagcaaaaaaacgctttgttaaactaatattaaattataatttaccatgggcaaaactcatccttgctttccttaaaattacctactaaaacatattaaaatcaataaagtttacattttaataaactaatatcgtattaaactgatactttatcttattttagtttaaacaacataattctgatttttaaacaacataattctttttctacttttttccccttcattctttgtcttcacatcatcatccactcagttgcccaagccagaaacttgcaaatgtccttgaacctttcaccattaacttagtctttcattcatgtgtttcttctcatgattctaggcattgaagatacagcagagaacaaaacataaaaaaatcacttatcttctgcagtctgtgttctcatgaggggaaactgacaaataaatctgttaaagataaagaatataagatcatagtaagtactatagagaaaaataaaatagaaaagataaattgtgtgtgtgtgtgtgtgtgtgtgtgtgtgtgtgtgtgtgtgagagagagagagagagagagagagagagagagatggggtggggtttgcaattttagatggaatggccaggaagccctcactgaaaaggtgatacttgtgcaaagatctaaaatcagtgaaggaaaggaaagtaagctaaggcagaaggaatggcaagtattgaagtagaagtgtccttagcaagttttgagcaactgcaagcaggccagtacagctggtatagaataagcaagggtaaagagtagtaggagatagaattgaggattcagggatagagagcatagggccttttggattattctaggccactggagggttttgagtagatgagtatcacattatgatttatcttttcatataatcactctggctgttgtattgaaaatagtctgcaccagaggtagggatgaaggcagggaaggaaacagggacgaaaccggttaggatttattgcaagaatccaaatagcagatgaagat

SEQ ID NO: 127083 - DNA, 1027 bp, Homo sapiens
aacacagtaattagactgttgcaaccatctaaaaccttaggcttccagtctgtgctgttagtgttaagatgtaaagtgcaatcctaagctaacattatctgtgcaagcaccatagaaacatttgcatatctgcatagatcttacaactgtactctttacctccttgtgataaagctttgtctacctgcaaacacagtcaaaggctacagctgcaaaccaaagccaactctaaccatggccaagagctcaaggacagaagcagccacatgctttggtcagccttctgtaacttcaattagtacaaaggaaccttttccatgaactacctgctgttttctgatgacctctgggatcttttcatttagccctaaacaaagaaacaaatatgacaaaaaccacaactaaaaaatgttaattcagtcacagagtaatcttctgaggccaaaagtccatctaaatgcaatgaagatttgctttcattaaagacagaggtgaggacaaaatccgcagtggaagttatgatatgctagaaagcaacaaatgtggatcactgaccaaaacgattatgtacttgatgcaaatgcagattgcatattgttatatatatagtactttgtgtttttgttttccctcattcagtcagttattttcagtggtgaatacatgttgttagaagatgtcttgtatggtcttaatctttgttgtgtactatttttttatagtcttaagttataatgaaaaaacaaaaagtaggaaccaaacataaaaggtctagtaaagccaaaaattaatttcatattgattttaaagtgatctagctgagtttttacactgaaagcaaagattatagcaattgtagtccatggtatttattttcagtcaaaccaaagttacatataattctgcctctgcttatacgggatattaacactaacaatacactcccttcaaagacttgcacaggccaaattgttggaatgctggttttcttgacaattccaaaccccaaaactatgataatgagtta

SEQ ID NO: 127084 - DNA, 1029 bp, Homo sapiens
tcaaatcaaaacttccccggggtggagtttgagggagggaagtggagggggagggaacgtcccgcaggggtggtgtgctcttctctaaaaacatttttttttttaattttgtatatttttccgccagaagcagtcagttccctgcacccagcacctcacagcccttcctccgtgcgccctgccgggcggcgagctaggcggcagcggcgcggcgcgggctcggcggagcggcccatgtccggcgcgggcgaagccctcgctcccgggcccgtggggccgcagcgcgtggccgaggcgggcggcggccagctgggctccacagcccagggtgagtgcgcgcttgcaagtggcaagcttctttgtcattgttgcatttttcagtttgctcacaagtgcacagataggggtggggggagtgctgtgaggaggggctcccactcgtagttgagaacttttgcacagttcgcgttactcaggcaagttcttcaggatccttgccctagatcaacaaccgggtaagagggcgggaaccgttggtccctccactcccccttcctttggttgcgaagaaacaggatgacaggattgcttctttcttaagcatatgcatgtttgggcctaagactcaatgtgtaggttctgaagcgcttctcctctaggtctcttcagcagatccaggactgccgcagctctctgaacaagcgtgcacttactccatttcatctttctgtttcttgttggctcctctaccacccggttgataattcaggtttctgtgaccagtagctttggaatggcttatgcttgttttcaataactggtttgttttgaaataaataaacaaggtttataagaaacactttccaagaatgaattagcttctttgtgttcttccaaagtgtaaacacacacagcctataaaatactcttgtgtctgggaaacttccataacaagcttctaaacgagttgaacctttcttctcttgaaggcaatatactttaggtttccattggtgacagagaggaagg

SEQ ID NO: 127085 - DNA, 1028 bp, Homo sapiens
gtgttttgaaaatagttacagagcagggacataagcttacatgctccaggctgtaagagggaaccaggatagatgtcagacagtatggagcaatggggattttggggaactggagagctcatgggccaggaaacaacattcctcagttttagctaattgttgccatgtgggttagtatcttcagatatttcaagtgatactggaaatccagatttttatgtatcatctctccatttttaagagtttgcaactaattaaacaccaattttgtgcaggccaaacaaaacaaccacaactgtaggctggatatggcctctgagcagctaatttgtgatctctcatacagaaaatagaaagtaaacatgtaatttaaagctatattcttatttgttactaccttgtgaaatattgatttactttctcatgcaaagtacttgtatacatgtcttgataggtgaaaagccatttcagttatactttattttaagagataatggatcttgtttgtgtggtccctgtaattgccatttgtcctggtttgattaaacattttaaaattcgtgttatggaaccacattgaaaatgtaagtatttgccctttggtgcaatagttactagaactcctataatccaaagagcctttgaattaagtgcttctttcataagtatgggatttgtaactagaggggtctttagaaataatttaatccaacccgctcattttttaaataagggaaaggatgtccaaagaatttaagtgacttgcccaaggtctcatacacagtcagtagcaagaaatcagggtagaagcacaaattataacataaattgtatgtcattgtgataaatgcagttgaagtagagaatcagttcaacttttttatagggctggatgcattgacaataggcttgggatattgtgaatcacttgagcttgttcccatccctgtatctttcccccaaccccccaagacattgcatttgtcaagacgtagatcgttggactctgagtgctagaatatatttta

SEQ ID NO: 127086 - DNA, 1032 bp, Homo sapiens
tggatgggtggattgaatacactcactgtgcactaatgagaagaaagccggaagttagagagaaaatgaagatgaaaggagatggaggagggaggaagtggtgcagtaggtgtttgtaagggaaagataaaaattctgggatggaatgggatgaagggaccagtctttggaaagttgggaatattcctctttgagatggaggtgggagaaaaggataggtgataatctagagaacatttgatgtgaaaatgaatattgagggcctagatctcagcaaagtaaatggtaacattttctgagagcaaaggaggttaggatgaatcaagaagtttgagatgtctggaaaagatttggaagagggaagaattaaagggatagtcaatctggggcaaataaaatgcctgctgggtaacacaaagaaattaactaggactgaatggcatgaattcttagtggaagtgatcagcatggttgattgtctttctcagccagggagcatgcaggagcttgggaagggaagcagacagaatggattttgcaattagcatagggttggaggttggcagggtggaagtgatgagaggatgacaagtgacaagggatgcatatcacgcatgtgtgggaagtgtttatgttaaccggtcttgtattccaggctgggaagagaatccagagaccagaaatgcaattgacaggctaagacctctggcgagaaaaaaaattgtggctgttgctttgtttggtcagttcacatatgaggatttaatatatatgattgagtgacctttacatggctatgagggaagctgtggaatttttgggtgtgtaaaggcttttcctgtttctttgaacctcgtttcctggatcttgttgagatgatttcatggaaagaaggcctaataacagtgtgcaattattttattggattatgtttctataataataaaaggtttgggagtaatgaggaaacatcaattgacaccatctaaagttaggccatatgcaaatacaaagttatttagaacaacaaca

SEQ ID NO: 127087 - DNA, 1716 bp, Homo sapiens
atttaaagattgtaattggtaataaattccttctcatatttacctctagttctctggaattgtaaattggaatttgctcatggattttaatgagttgtgaaatgacaagttatatacaaacgaatttgcagagtgtaagaaaaaagagactgctttacaatttatggaagtagatgtttctatgtatacttctctgtgtttcctccaaacaaagcttctttttgtgtttttctagatactttccattgtgcttaagtgatcagatttgttttcgtgaagattggataagaatatttttaaagtgctttgtataccataaagcacaatgtgtgttgttattattgtcttattattatcattaatatcattattctaatttattactttacctttcacttttattatattctatgacatttgatttgtaatctatatcctacttcttttgttaaaggtttttaatctcttcctgttattcctaaattatttgggtcattattgggggaaatgagatggcattaaagtgtaagtagtggacaagggctcagtgaggaggtagatttattcctctcctattggagagtgtttctgagcctcaggaaggagctgaggcttgggaactggcttagagatcatcccaaaaatgctaaccactgaagaaataaataacatttaatgatcaagaccacaaatgctgtggtctagataattttagttctcaaacctcaaacttcctggatctgaacactctgtgaacttacacgtaaattatgtttttgcagatcatgttgttatattgaaatttgtgaattaggaattaaagagtaattttaaaaacaaaattaaaaattgattacatgaagactgaatgcttacagtttaccaactgagttatgttggagataacagtgatgggtgtgggttctgcattcaaagtttacagtcttgtgggagagacaatttattgtgatatgataatgtgtattatgagtgctccagtggggaagtgcaggctgtagtaggttctcatgggataacacaaaccctaaatgtggggagggggccagagggagctttccagtggaagtgttgtctgtgatacctaaagggagtccaccaactgaagctgttcgtgggagggactgaagctggggtgttccaagcccaaagcacagcacacctacagttctagaggtaagagaggacatggccattttgaggggagctggggaagttttgtgtaatctgggatgtaaatgttagatgaggcgtggtgagaaatgagaaagaatctgttaaagactaagggaagatagaaagtattgaagggagtagtgacttaatcaacattgtgttttagttgggctatattttaggatgatgactctggaaatagtgagaaaataaataggaatgggaaggactgaaggcattaagagatcaactggaagactgttatgtaatgcctctgagaaaggaaggtgtcttggactggggtaatgacaggtaggattacaaggaggagatggattcagctttctatgggatgtagccagtaagacatataggattaaaggaatgacaggtgctgagaatgaagcccaaggttttagtttggacaagtgatagttgtgatgaaatgacggtggagcaaatgatttgtggatattgtccaaagagggtgtgaagtgatgagctacggctataaaatgggta

SEQ ID NO: 127088 - DNA, 1192 bp, Homo sapiens
tcatggtcaactggaatctgcaaatgatctttcatgatctccctaaattccataatcttatggcatttctgccatgcttatgctgaaactatggtaacagaccacacatcggtcggtcttctcacttcaggttcccagcctgtggggcatagaggaagagtgttatgtaatggaaggattaattatagaataaatatgtgttctctcatctcagttgaaatgtctctgcttctcagtttttagttggtttccattttgggttcattattgccttttgattttataacacttactgttctgtaaggattcagattatattctagtcctctcattactgggtcattgtagtttatatttaagcacagctcctggtagtcaaatccagttctggtctacatgcctgataccttaagccatcttggtctatgtcctgggagaattagtaaatactactacagtagtgttttgagactgataggttgtgtttctcatttagtgcagtgggctcttctcagtccttattctatctgtaggatttgacaggacatgttttctgcttgaaactccctccctatcctaccactcccctcaccactttctgcctctatagttcatgttgactccctttcagtctctcagatgccactgggttcctttctgcctctcgtcggtcttttgcataccagatcttccttcaggcttgtcccttcagaaaggccttcccagacccccatctacaatggcttttcctatttctcacaacaccctttcctttttagctgttgccacaatttgtaatttatttgtgcaattcacatgtctaatgtctgctggctctaagttgtaccccaagcaatcagcataattccaggaccacagtaaactttcattaagcaaatttggatgattgattttaaaaattgaaataaattgatttttttctctactacttcctttcatgaactttcgccatagccaaaatatgttatttgcacctctgtccacttgtctagtattttccttttcccaggcttcactcatgttacccatctctccacgtctcccgcccaacaagcaaggctcgtgtgatttctgcctcatctgggactgggagtgtttaactgtatctctcctaaaggactcattaatttcaaaattgtaatacaggtgtttatgaccctcttctccatta

SEQ ID NO: 127089 - DNA, 1047 bp, Homo sapiens
tgagattgcaccattgcactctagcctgggtgacaagtgtgaaactccatctcaagaaaacaacaacaacaacaaaataacaaacaaacaaacaaacaaatgattttccctaaaatatgcagcccattacttagctaaggattcgccactcctcatttattatcttcctccggtttgcttattttgataaacattgggttcacaatcagttccttgtcctcattaagcctagaggaaatgaggggtttgttgtaacactcactgggaagaagtcttcaattttgtttgtttgtgttatgacatctacagtgttaaagtaaaaatatttaaatgatacagttcacagagtacatacttaatgtgccaaaagcacaaatgtgtgggagtgttcattttctgaatttttctttttactaaaaatgaacaaacataagaccaactattacttcttgagcctaaaaaacaaaattagataactaagctctcagagtcagaatctacagctctggtatgactgagtaggtgtgatcatagcctggtcagtaataatgacagattttagtgtccattttagtgtatgaaacactaaattacagtaaattgaaaaatgggtggtttatagtcctagaatagtatttctcagagagcaaataagacattaaatcatttggggatggttttattcttcctcttaattgaaggtgtagtgtcattttcacatctttgttcattaatacaaatatgaaaatatttgtgaaagtcctcttggaagacaggctcattatcatgtgcatctccagtttggacatatctgcatgatattgttttggcatacaacattaaaacttagtcttttggaaaatgccataaagaagtttcattattcagataacttaatttcaacttagagagtttccagttagtcaggcctattgcagtccactctagtgtgccttgggaaataactgctgaaatttcacacacataatgattatgtaggaagactttggaataagtggaggcgtcagtgactatagatacaaacat

SEQ ID NO: 127090 - DNA, 1020 bp, Homo sapiens
atatgggatttgaaaggctatattaatagaaaataattacttgaaattaatgggagtttttaagttcccagatatatagacatttaattcactgtcaagttgcccattttgttctcccataagggtttgcctttatgataaaaactgcccttggtcatcattctaaccgtccatgtttccagtattagaattatgattctccagtgaagtgcataaggcaggagacataagaatctctggaggaggagtctgttttttttgaaccacacaggatattactagaggatgtgcagtgctcagataaactctgtggagttggaaaaaggttgagaactactgctagagaattatgtgttttaaccgagtaaaggaaccagatttacgaaattagacaaaaatatgaagttagatacaaatcagagtgatagtgtcatttctaaaatctgagcagattcataagaatggcaacatgattccctcacaactgttcatttcattattaaagagcatcaaatcattcatactattctttctagcctaagaacaattttcactcaatttcaatataaataagtttgtatatttcagagaaatgaatgtatgtgtttctttcttggaaagtaattaaagtataaaatttctgaaagtgttttctaatattccaaattgtggttgtattttacatttatatacagttgatggcccctttatgtaacttcaaagaaccttttattgggagtgcctcagtttgcagtaaatatttaagccaatttctggtcagttatactgagagtggtcttataaatgaataatttataatggtaatggcgtatatggtaaataagcacaatatttggaagactattgctgggaatggtttatggaagtacattctgtgatttttctaatatatttgttaatgtttataatttgaattaggtaataaatatacatccagaggacagtgtgtgtattatctagccacactggctttccatcaggtcagcaaatgtgctgagc

SEQ ID NO: 127091 - DNA, 1101 bp, Homo sapiens
ttaataaatgttgagtgactatatgaatgaaggagtggaatgtttcttgttatggaaaagcatacagtttggtggagaggacggatctttaaacaaattttgctctagaggcagaggagggagccacaaggttcccagcggaacaatttagcaaaggcagatagtagatgacatttcacctaggtgttgatgtaagagtaagaggcagtgaagggcattccaaggagaggagtagtaggtacaaggcctagaggcatgaaaagattgtggtaagtttgggaatcaggagaaattcagtgtagctagagtgtgggaaaataagagaaaacaatggcataggggtttggagcaatactgtgaagggtttggaagaggctactgagttgtgattttatcctggagatgggtaaatactggagctttcatctaggacattaatgtaaacacattttgtttttggttttattttttagaaatgtatttttggtagtgaaatggaagatgggccggaagagaaaatctggactcccagagttcaggttaggagaccaagataacctagataagagatgatgaggacttaaactgatgttgaccaggtagacggaggggaaaggatggattatggaacacagttgacatttgagagatacttgtgtgcaaggcacacagcaaaggttactgattcagttagtgacaggtggtgggggatgagcagggacgggccagttttgtaatctgggagagttttcaagatgtattccctctctgacatctattaactagcacagagtcttcaggatattattaggtgctcaataaaagtttattgtatgagaataagcaatattttctttatctctcatttggttgtatctttccctactttgttatttcattttttcttacattttatccttgtattctgacactatttcttagttttgcttctgttttccccagaagagtactttggttaaaatgtatcacttgcaaaatagaataacacaccgccatgtagtgttgcttcaggttataattttccatatatgtacagtatgccaaaaggatgctgcttctagagagaatgtttaaaactca

SEQ ID NO: 127092 - DNA, 1048 bp, Homo sapiens
agaatacagactggctcagatgaagtgttcgatatgtgttagctgctgttatgatcattagtattaaggttcatagaggggtcaggaatgttagcttcttggaaaagtcaatgcctggatggggacctgaaagacaagacaaagatagtttagggagttgagaatagagggaggcattcaaggccaaaggattttgtttttcttttttcttttctctctctctctctgtgtgtgtgtgctcttctttttgtttgtttgataagtaaggtttgttagataagtaaacatgtgtcatgggggtttgttgtacagattatttcatcccccaggtattaagcctagtgcctactggttatttttttctgatcctctcccatctctcaccacctccctctctgaaagttcccagtgtgtgttgctcccctctatgtaaattcatgaattcatatgttttattcagagaactacaaacagtttgctgttgttgaaaagctaaattattagagaagatactagatgagtaggaatgaaccagtctacggagcctgggatggcccgttcttctgaagctattaatatcacacaggtctatatgatttatctaaaggacatcatatcccatatatactttttttgaaaaattgtgttttcttttctctctgtaatacaaaaattccatggttggaattatatagaatcagggtgctttctcacctgtagccaatactgctatgtattaacctgccctaccatctgcaccgtgattacctttgcagtttttttttttttttgtacattaataatgaacggttatcgaaaaggaaatgatgaattggttttagccatgttgagcttgggatgctaatgagctctacaggagacatttggacctatgggaggactgaaacccagtttatattgtacaggctttttctgctttctttttttaaaactattttttggtttctgaggtctatgacctttctttgttttctttttaggcttcgcttctttgtctttttggtgattttctcttgcatttataact

SEQ ID NO: 127093 - DNA, 1058 bp, Homo sapiens
cttcatctcagaggggtactcagccgtgtgaggtgtcagtctgcccctactggggggtgcctcccagttaggctacttggggatcagggacccacttgaggaggcagtctgtccgttctcagatctcaaactctgtgctgggagaaccactacttcaaagctcagttggaaatgcagaaatcacctgtcttctgcgtcactcatgctgggagctgaagactgcagctgttcctatttggccatcttggaaccacccagcattgtgttattcttgaaggtaactgaagagattggataacttcagttctaaaatcaaacatctctaagaactgaccagataattaggtgcctactgagccattgtaatgtttttgattttgaggtaggaaaactgcatcaggctatggcagatggctgacatgatctgacttactatttttaaacatcactttgccttttgtgctgatagtggactacaggtacacaaggtcccaaaaagcgagacctgccatgacaccattgctgtgattcacatgggaggtaataggattggatcggggtgacagtgatggaggtgatgagatgttgttgcatttgggtttatttttaaggcagaacaagatttgctgaagaatgagattttggtgtgaaagacagggattaaggatgactccaagtttctgggcctgagcagttgaaagtaaggaatggccattaactgagatgagaagactataggaagaatggggtttggttcatggaggaaggtcatgtttggtttggaatatattgaatttgagatacccattatctgtacaagtggtgatgtggaggaagtgtttggataagggagttgggagttcaaaggaaaggtctgcagcttgagatatgttttgtgagttttcaaggtgcagaatgtatagtggatgaggtcactggcaactggggttctcaaccctggcctctggatatttggagaaagatctttagggcaaagggattaggaaataaaatacaaatcagcgattatgattcatttggaatggagtgggtccaag

SEQ ID NO: 127094 - DNA, 1092 bp, Homo sapiens
acactctagcccgatcacaacactaaaagggtgaaggtcaccagtgacttctacgtgacaatttcaatggtcacttctcattcatcttactggatttctcagttgcttttgacacatgatcactccctctgttttaaaatacttccttcatttggtttccaagctgcccctctttatcccttctccattactagctactcttcctcacttttttgatagtttctcttcattttctacagtggcataatggcccagggcttagtttttggagtacttttgcactttatctatgttctgggcaagagttcttaatcctgcattcaaattagaatcatatagggagcttctaaaggatgctgataccttggacccactccattccaaatgaatcataatcgctgatttgtattttatttcctaatccctttgccctaaagatctttctccaaatatccagaggccagggttgagaaccccagttgccagtgacctcatccactatacattctgcaccttgaaaactcacaaaacatatctcaagctgcagacctttcctttgaactcccaactcccttatccaaacacttcctccacatcaccacttgtacagataatgggtatctcaaattcaatatattccaaaccaaacatgaccttcctccatgaaccaaaccccattcttcctatagtcttctcatctcagttaatggccattccttactttcaactgctcaggcccagaaacttggagtcatccttaatccctgtctttcacaccaaaatctcattcttcagcaaatcttgttctgccttaaaaataaacccaaatgcaacaacatctcatcacctccatcactgtcaccccgatccaatcctattacctcccatgtgaatcacagcaatggtgtcatggcaggtctcgctttttgggaccttgtgtacctgtagtccactatcagcacaaaaggcaaagtgatgtttaaaaatagtaagtcagatcatgtcagccatctgccatagcctgatgcagttttcctacctcaaaatcaaaaacattacaatggctcagtaggcacctaattatctggtcag

SEQ ID NO: 127095 - DNA, 1734 bp, Homo sapiens
tgggcagattgcctgagctcaggagttcgagaccagccagggcaacatggtgaaaccccatctctactaaaatacaaaaagttagctgggcttggcggtgtgcgcctgtagtcccagctactcaggaggctgaggcaggagaattgcttgaacccgagaggcggaagttgcagtgagccgagattgtgccactgaactccaacctgcactccagcctgggcaacagagcgagactccatctctaaataaataaataaataaataaataaataaataaataaataaacaaaccagtctttattttaaaagaaactttaggaaacaaacccacataatagttgggaaccagtgttgatctctctcccttaccttctccacttgttcaacagactctgaatgccgactgtgtggactctcttcctcagactgtggggacagatacaattccactcctgtccacaggaacatgagatttagcagactaaggagatctgtaaagaatgaaccataccacaaggcatactgaagtgaggattataagagaaataaactcaaaatgctgttggaatatgcagagaattgctaccagaatattcagtaaggtttcagggagaatgtggcatttgaggactctcttagaatgagtgattcacctgctatttaaatgaattatttagatttttgacaaagatttaggtggacaccctaaactgtgtgtgcctttaaccagttaaaagaacagtgccttcagcatacttttttattagttgtaggaatacagctttttgaaaaagctataaagtttaaattaactaaaaatatgcattttcttacacataatttaaatgttatcatacttttttgatgaaaacataatgccttagtaaaatagctctatttaataaagaagattgagtactctgacacatttcatttaaattaggaaatttttaatattaaaatcccagtgttctgagttattgaaaggctttcttttattttgagagctttaggtctttttgggatgagaacattttagttgtttagtttgtttcttaagcagtgctattttttgtaaacacagataaatggaaaccattcttttcaatgcagaagaaatctagatatcccctactgtgaccaaatttctgtattacgattttatgttaaattaaactaatatggcaggttataatgatccttaagtgtaaagaaatcagtcaattacaagagtaattgtatagttattgagacctatagtgtgtggcttagatgaaagggagagtaaattttcataccatgctctctcctactcagtttgatctctctaaaattgtagtttggtttgatttaatataattcttagtagaaattttgaaagtatgctttgggattaataattatttttaatttttctggctgaatatcaaattgatagtaacaacagaagcataattttaggaaggctttcgcaaacctagccttttaagagaggtttttaacctgaagcatgagaatatatcacctgtggtttttcctttgagatgaaacgtagtttctagttatatcattacttaaagggcttaaaaagaaaaaacttagcaaacttttgaatctttcttttattgctatttacacatacatacacacatacaaaacctttaaattttgggatctgaatataattctggtaaacagctgtcttcatttttctcctctaaagaacttaattca

SEQ ID NO: 127096 - DNA, 1146 bp, Homo sapiens
aagtgtatattgtagctattataataatatttatcataataaaaataatatttcagttgtaattcctaaaatctttaattccttgtttgatgtaaaatatgttattcaggatgagacttgctttttaaggtatagttttctgagtgttgtacctattgtgctatggggctgtactatggggcaagtagtggccaaagacataaattcatgagtttttgttatttgcaatatttgtagttttctatacagttatattctgatgcttttcttttcatgataaaaagcaatcagaatataaaatatgttatgtatgtacttggaactgccatgtacatacctgggtatcatcattgactaaatataagatttgtttgaaagttatctcaacacaagtggtaagtggaattaaaagtgcaatttattgaatttttagatttgtaaagaatctaataacagattcatgatgttttctttttaacagatgggcttaggtcacgagcaaggatttggagccccttgtttaaaatgcaaagaaaaatgtgaaggattcgaactgcacttctggaggtattgttttgaaaactgcaaccacattagtaatttatactttttgcaatacttcctcagacagtggagatatcttcgagttctccagcatggttgctaagttgcagacctgttactgtcttttctgagaaatgaatacaacataaaaagtgttctgtcttactgtcattaagtttgacttagtgaattggaccataataactatttagagttgttggatttgcttgctgtctttaagatttccttcgagcctgaaatactgaatatatcatctttctggtggtaaataagtttgtggtaatcctccaggactgtttaataatttatttgttactttttttttgagacgaagtctcattctgtcacctagactggagtgcagtggtgtgatctcagctcactgcaacctccgcttcctggttcaagcgattctcttgccttagcctcctgaatagctgagattacaggcttgtgccacgacacctggctaatttttcttttttgtattcttagtagagatggggtttcgccatgttggcaaggctggtctcaaactcctgacctcaagtgatcagccca

SEQ ID NO: 127097 - DNA, 1034 bp, Homo sapiens
ctctttgtaagttggtgacttgcatctgtggccttgaatattttattatcacatgtggcataacagtatccacactttttagttctttatttttttttttttattttgagcaattctcctgcctcagcctcccaaatagctgggattacaggtgcatgccaccacacccagctaatttttgtatttttagtagagacaggttttcaccatgttagccaggctggtctcaaactcctgacctcagatgatccgcctgccttggcctcccaaagtgctgggattacaggtgtgggagccaccatgcctgacccacacactttttacttgtatagatgatttttggcttggacataaaagccaagccacccatttgcttttaatccaaagaacatgtatagtttttgtacccagagactatgatttatattgattgcacttgcctgccatgatttagataagattttttttgcatggtttttattctttcctaatggatcctgttttataatacttccaagcctgtccatggatatatcaaatgtcttcacttgtatattttcatggctaggtatttctaatgtttattcttccctgtgtacttctacacatagctatgcactatgaaaattaaatggaatgaatgatatgtatattactcaaaataaagtttctttcactttaataatcattgtatctttttattcatatccttttttgagtgaaaaatgcttctgcaactaagcatgtgttacagcagggggcgatgtctccaaggataaaaattacccaaacgaaaataaaagtctgcctctgacaggacagcacagaatctagatgtttcattatggagaaaagataaggtttatgaaactttcaaatcaggacttttaagtttggtcatgcaagagtttttttctttttcaaagaaagggaaagtaattttaattaaaatttgggagagcttattttctattcagttggatctaacaagccttttatacttgggtttcaactctggtttctttatatgtaaa

SEQ ID NO: 127098 - DNA, 1038 bp, Homo sapiens
tcacgcggggcttgtgatccatcaattttccatcgtaccttatctctttctggggcttgtggtggacatctatcttattaggtgaaatagattataaccagaggctgagcgatgtggccagtcgtagtgctgacccgataattaaagcaccagtgaaagtactttccctgactattgtcaatgcagaatttactccgaagtacggtttcccattcatatctttcatgttttaaaagagccatttgctaatttggcagttggagagggctccaatggctcacgcatgaatagttgcccagtgtattttaccttatcacagttttatgttcaaaggagccctcgggcagaatgaaatattgtcaactctcttaggcaaaataatcaagatactttaattgctatgttaagatggtccatgaatgtgagaggattgtaagaactgacgttggaggcaatatagactatctggaccctctcttgaattttaagaagactgttcacattctgtagctttgggtgggggtttattctgtcgctttcatcagccagacacatgcacattgccatgcaaatggattcagaaaaacattatattcccttacagctaaactattatagctgactaatgaattttttctgcatgaagatgatctgaaaatgatgtacatcatgtttctctgtgctacagggacataaattgcatttttatgtaaacagtgtaagtggtgcttggattatttacaggtacatagctttccttccttgatctaagctaattgagctttgttttgaacgtgtaaacttccataatggaacataagtgaggtactttggttcctatcatttgcaagtctgtggtgtattcaatgttcattctttttgaactgctgaataacagagggaaaatttacatcattcataagaaattttggtagtacaaaaatgtgtctgatagcctataaaatgtactgctgttttaaaaattctattccgttttcaaacttaatggtgtataagctatagttattaacttaaata

SEQ ID NO: 127099 - DNA, 1133 bp, Homo sapiens
tatcaacctagtcattaaccacagttattaaaccacgttaaacaaccagcaaggggttaagaaagaaagttgctatgttttttctttcattgctgaatgagtctaacttagttactgtatcaaccttaatacagaacattgtttgcatctcaatggttctctaaaattattcgttcatggcttgagttctaaaattaaactatgtggagtcatgtccaaccgcacaatgcatctttatgtgaaacttgctagagtttttgttttccttctatgtaaaagtccagttgggaagctttatttctgatagattaaatggtataggtctttcagttttctcttcatttctgacaactgaactgctctcgccttgaacctgttttggcagataaacctctcataatgaaggcccccgctgtgcttgcacctggcatcctcgtgctcctgtttaccttggtgcagaggagcaatggggagtgtaaagaggcactagcaaagtccgagatgaatgtgaatatgaagtatcagcttcccaacttcaccgcggaaacacccatccagaatgtcattctacatgagcatcacattttccttggtgccactaactacatttatgttttaaatgaggaagaccttcagaaggttgctgagtacaagactgggcctgtgctggaacacccagattgtttcccatgtcaggactgcagcagcaaagccaatttatcaggaggtgtttggaaagataacatcaacatggctctagttgtcgacacctactatgatgatcaactcattagctgtggcagcgtcaacagagggacctgccagcgacatgtctttccccacaatcatactgctgacatacagtcggaggttcactgcatattctccccacagatagaagagcccagccagtgtcctgactgtgtggtgagcgccctgggagccaaagtcctttcatctgtaaaggaccggttcatcaacttctttgtaggcaataccataaattcttcttatttcccagatcatccattgcattcgatatcagtgagaaggctaaaggaaacgaaagatggttttatgtttttgacggaccagtcctacattgatgttttacctgagttcagagattctta

SEQ ID NO: 127100 - DNA, 1038 bp, Homo sapiens
atgaccaagagaaacataagaatctgagaacacacaaaataagctcttttgaaactatcaaaattataaacattaatagaattcaagggaatgtgatgctgaagtgatcccaagtcacattgtctttctgcctctgtgcactgtactctgcacaattgcatccatttttagaccatttccttctcatgagaatcatgtgcatggagggccaaaggagagacaagtgctcacaaggatatcatgagcacttatgaatgtacaaatgagtgctctccagtcagtgccatctttatattgttccggtttataggcaatgccttcatctttacctacagacacatgttgcctttctgtttcattttaatcctgttcatctatacatatttaatcacacaaatatctaaataagtttatgtcttgtagggaaggcactttgtcatgcttctttgtacctaagcatatgctttgcaaatcataaacaatagtgttgattttatttgatataaaaacttggattctcaaaagaaatctatgtgttcacacgataaacagagaccatctgaattgccaaagtatgactgaatcataagcagtattgttttagtcatctttacagaccaggaagatttgaaatacaggtgtaaaaagatgtgtgaggcatcaaaagaaatattcacctttctttgtgttcattttttttatttttgcttggccgagaaagaaggggtgttttccaagggaataggaggcttcagggcttattcctgtgcctacaagtcagagaggtcactggcttgccccttcctgaaggctgtaattacaggcagaggactatttattttcccgtaaggcgaccagaatcttgagtgtaaaaaactgtttacaagagtacactgtgtataggggttacacacaacctcaggaaaaataataggaaagtgagactatttttcttcatgtattcaataatatgagaaggtccaagactctggaaatgttctaaagtacaataatagagatgaatatgaggtcaaatta

SEQ ID NO: 127101 - DNA, 1034 bp, Homo sapiens
ggtaaaaaaaatgcttattttatgaaaagtactggtatcactgattttttttaaaagtggcttttaatttatcaaataagtatcaagaactacctaactttgctttactatacaaacgaatgaagcaaaggaaacagtgacacagaacttacctttaagaaattaaattttagtaggaaagatacctgataataatagtacctacagacaaagggctattcgaaaccacagagaatctatttctctgacgcttgcctaagagaatttcattccattaaattttataaagaaacctaaagcatttgaaggatcaaacaatcaacatcactgaagtccatatatttacagtaaataatagtgcgggaggagtcaggagtggagcacagatatggcaacctcccactttaatctgtcagagcagtgacttcctacaaagttctgtaaatgttttgactgcaccacagtgttaaatgtatggctaggcctgagtttctacaactcgtgttttagtaaatacgatgaagtttctgttacaaaatagaatggacattttttttccccccaaagacagctgccctacacaaaagggaacagaaagatgattttacttccttcctaccctgaagcctaatggcaaagttgctttgcaaatttttttctcccaagagtttgcagctgtttctgtctttcctattgtgcttatgttcagctctggctgggaacacaagctacagccccagctgttgggtgcaaagtgaatcaggtatttcacagtggtcatttgattagaaagaattatattgtttagctaacaacattttgtgtatggcagggaagacatttttgacatgttcctaacatttaatgatgtgtaacttatcttgtacaggtgcagctatatctgaaaatactgatgcatacatatatttaagtctcaatatctgcagagccatgtcaatgtagatgaagatttaaaaataatttttatttgcatgatcactctcttgggatacttcgaagtaaaatagtaggat

SEQ ID NO: 127102 - DNA, 1111 bp, Homo sapiens
accgagagacaagcatcttcagttaccgtgaagatcccattgtctatgaaattcatccaaccaaatcttttattaggtaagtagaagcttctgatgggtataagaaaacaatgaatacaaggatgattttgctgtagaatagtcaagaggaattgcagttttatctctggctttgatgctgttatgttgcttttgaaggcttctttccaattcaggagagaaaactatattcaggttctgagtgtagtttgacttatcaatgctagttcattccaagaagtatcttatcctgttctattacatttaaacagagtatagcaaaatagtttaatgtggcattgtagtatacatgcacttacattatgtacatatcaattctatactaaccttagtgcccagaagtggaattaccttttttcttccattctctagatatgtttttgtcctgcctgctttacacacagcttttctttatgccagactctctttgaattgatatctcattggacccagttcaatctgccttgtttccgttaattctatcagtctagcaacaatagttaagttcggttttctttgtatttttttcagaggtgaaatatttattttgtgtaattcggtgaataaaatacaaatgcatttcttaagcttatgaaatatgcattttaaaaatattttcaagttaaataagttgtttccaaagaacagttacccatgaacttccatttgatgttgactgtgcctctgacctgtaatcagtgcaggtgattaaattgaatccctctcttacagtacttggtggaaagaacctctcaacattgtcagttttctattttgctttgccagtggtgggagcacaataacaggtgttgggaaaaacctgaattcagttagtgtcccgagaatggtcataaatgtgcatgaagcaggaaggaactttacagtggtaagtcctttgagcaatggttctactcagagctctgcatctttgcctctaaccatgtggctttcatggtacctgagacatctcagtttcgcctttaaggtttgctagttaatttccttgcagtgtagccaagtagtattttttatttaataactgaaattatct

SEQ ID NO: 127103 - DNA, 1085 bp, Homo sapiens
cagttcctgttttttgtacatctttttatccctaatacctagttacaaatacaaacagctaagtaccacataagtacttaagggatcagtgtcccctaattatttgaacactggagcataattgaggaatctcttattatcctgaaggcagttatgccatttgtagaatggtaataaccagttggtatttgggacccaaagtgctacaacctgtgtagtacaaatatctatcatggctaaatgctgacttttctttatttgtcatttttagtggaagcaagcaatttcttcaaccgtccttggaaaagtaatagttcaaccagatcagaatttcacaggattgattgctggtgttgtctcaatatcaacagcactgttattactacttgggtttttcctgtggctgaaaaagagaaagcaaattaaaggtgcatttttgttactgttcatttttagaagttaccttaagaacacagtcattacagtttaagattgtcgtcgattcttgtgtgctgtcttatatgtagtccataaaacccatgagttctgggcactgggtcaaagtctcctggggcccatgatagccgtctttaacaagctctttctttctctctgttttaagatctgggcagtgaattagttcgctacgatgcaagagtacacactcctcatttggataggcttgtaagtgcccgaagtgtaagcccaactacagaaatggtttcaaatgaatctgtagactaccgagctacttttccagaaggtatatttcagtttattgttctgagaaatacctatacatatacctcagtgggttgtgacattgttgtttatttttggttttgcatttatatttttataaaaacctaaaggaagtatttacctctgccaagtaagtatttgacacaaaattacatggctcttaattttaaaagaacccatgtatatattacattatgattttagagtccataagctctcatttcacaaaaaggttaatttgagcaaaagtaatttgtttatcatctaagtgcaatagtaagaaattgcgaagctctcttttacaatccaggaagagttaagtt

SEQ ID NO: 127104 - DNA, 1067 bp, Homo sapiens
aagataatgacattaattcacccatgagagtagagcctcatgacctaattacctcttaaagatccctcctctgaacactgttgcattgggaggggattaagtgtccaacacatgaactttgggggacacattcaaaccatagcaaaggcaatattactcaatttttttaagtaagcagaagatttgaatagacattttaccaaagagacgtaagaatagctagctaatgagcacatgaaatgaaacatatgcccacatgaagatttgtacatgaatgatcacagtagttttcttcataatagccaaaaaccagaagcaatcttaatgtccatcaacgggtgaatggataaaaaaaaaatgtggtgtgtccatacaatggactaaaccattcatcaacataaaggaattactgatgcctactacagcatgataaacctcagaaacattatgttaagtgaaaaaaaggcagataaaaaaattacatgttgaatggttccatttatatgaaatttctagaaagaggcagaactacagagtcagaaaacaaatcagtggttgcctggggccaagagaaggagtgaagataaaccacaaatggacatgagggaattttctggaatgttgagatgatctaaaactggactgtgatgatatgatagctgcacgtctatataaatttactaaacatcatttaatcactttaatttactaaacatcaccaatcacttaaaattggtgagttttatgatctataaattatacctcaacaaagctgatttataaaaaaagagcctgatgaaattttggatgtttagggcaagtgttgggattctaagcttcttgacagccacatacatgcaacaatacccccacctccccaacaaacacacacagacagcacagaggccaaggcttccaccatagccacagtcactcagatacttgactggaaatgtacatagatttctgcagataggatggtgctatttctttctcactctcatcgaaagacactattttgtgctacataaaggctgaacctgaataatctgtacataatgctgctt

SEQ ID NO: 127105 - DNA, 1584 bp, Homo sapiens
cacccattaggtaaacattcccttttaaatgtttgtttgttttttgagacaggatctcactctgttgccagggctgtagtgcagtggtgtgatcatagctcactgcaacctccacctcccaggctcaagcctcccgaatagctgggactacaggcgcacaccaccatccccggctaatttttgtattttttgtagagacggggttttgccatgttgccaaggctggtttcaaactcctggactcaagaaatccacccacctcagcctcccaaagtgctaggattacaggcatgagccactgcgcccagcccttataaatttttgtatagacattcctttggttggaagaatatttataggcaatacagtcaaagtttcaaaatagcatcacacaaaacatgtttataaatgaacaggatgtaatgtacatagatgacattaagaaaatttgtatgaaataatttagtcatcatgaaatatttagttgtcatataaaaacccactgtttgagaatgatgctactctgatctaatgaatgtgaacatgtagatgttttgtgtgtatttttttaaatgaaaactcaaaataagacaagtaatttgttgataaatatttttaaagataactcagcatgtttgtaaagcaggatacattttactaaaaggttcattggttccaatcacagctcataggtagagcaaagaaagggtggatggattgaaaagattagcctctgtctcggtggcaggttcccacctcgcaagcaattggaaacaaaacttttggggagttttattttgcattagggtgtgttttatgttaagcaaaacatactttagaaacaaatgaaaaaggcaattgaaaatcccagctatttcacctagatggaatagccaccctgagcagaactttgtgatgcttcattctgtggaattttgtgcttgctactgtatagtgcatgtggtgtaggttactctaactggttttgtcgacgtaaacatttaaagtgttatattttttataaaaatgtttatttttaatgatatgagaaaaattttgttaggccacaaaaacactgcactgtgaacattttagaaaaggtatgtcagactgggattaatgacagcatgattttcaatgactgtaaattgcgataaggaaatgtactgattgccaatacaccccaccctcattacatcatcaggacttgaagccaagggttaacccagcaagctacaaagagggtgtgtcacactgaaactcaatagttgagtttggctgttgttgcaggaaaatgattataactaaaagctctctgatagtgcagagacttaccagaagacacaaggaattgtactgaagagctattacaatccaaatattgccgtttcataaatgtaataagtaatactaattcacagagtattgtaaatggtggatgacaaaagaaaatctgctctgtggaaagaaagaactgtctctaccagggtcaagagcatgaacgcatcaatagaaagaactcggggaaacatcccatcaacaggactacacacttgtatatacattcttgagaacactgcaatg

SEQ ID NO: 127106 - DNA, 1032 bp, Homo sapiens
actttgggaggctgaggcaggtggatcacctgaggtccggagtttgagaccagcctggccaacatggtgaaaccctgtctgtactaaaagtacaaaaaattagctgggcgtggtgtcgtgcacctgtagtcccagctactcgggaggccgaggcaggagaatcgcttggacccgggaggtggatgttgcagtgagcggtgatcgcaccactgcattccagcctgggcaatagagcaagactccatctcaaaaagtttaaaaaaaaattcttattattgagaaggtaaactcaagcaaaaagctattaatgtggacaatattcattcctaattctattctatagataaattatgttatttcaccaataaagtgtaaaaacttctgttgcagacaggaacttgatagcagctgtagcattagtggagtttttcagactttgtacattaaagtaaatttgtagtaaattttcagtgcatttgggagccatttttgcatgagtagttgaatagatagaataattgcatgttagtgtgagaatacagatatgaaaacacttagagcagagaatctaaaataatttttaaggttgaaaagcaggatggcaaaacttggatctgtggttccaagctatgacctaaaagcctaatcagtcacctgaagcaaaaatttgttaaagttattatagcaataatttgttaaataggagattcatgcatatcaaagaaaatggggtctttgtcttctgaaaaccactctctgacaggttccatgaaaatacccatggctgtttcaaaaaagaatttcataaattttattttgaggattaagtatagtttttgcattcttgctcttatgacatatttacatgtttcactatgcatctaatgactgagaacttttcttatacattctaattcgcagtgtttctactggaaatgacttttgaaatccatttacctccatcttcattcatttactaaatataccacatttcactgatttcagtactgatacttttttatattttaagat

SEQ ID NO: 127107 - DNA, 1018 bp, Homo sapiens
tgaaaacacataaaaaaatttattttttcaattagcatatagtgagtactcttttttgatgacttttagcacatgtatagatcaatgtaatcactaccaaaatctagatacatactagtacagttccatccaccccagaactctgtttctttttcctcgtctcatttctctgtttgtagtcaaactcttccccttccccacccctcagcttctagcaaccattcatcttttcgtcattgctctaatattgtttatttgagaatgtcatatatagggaatactgtagagttactatgtaaccttttgagattgacttatttcattcagcataatgcttttgaggttcatttcagttgtcacatatattaatggtttgttcgtttttattgctgagtgatatttcattgtgtagatataccatggtttatttgtctgttcacccatttatggacatttgggtggtagattatttccagttttgagcaattatgtataagtttttatatgaaaataagtttgcatttctgaagggtagatacctaggagtgggattgctgtgtcctgtggtgtgtgcttgcttaattttataagaaatggccaaactgttttccatactggttgaatgattttgcatttccacagaaatgtatgagagttcctgttctgcatcctcaccagcactgggtgttatgtcctttttattttagccatactattaggtatgtagtagtatttcgtgatttcaatattcatttctctactgactaatgatattaagcatctttttgtgcatttatctgtcttatatatactctttggcggcgaagtgtctattcaagtcctctgcttactgttttcttacttttggagtcttgtgggtactttatatattctgaataaaaatcctttgttgaatatgccatttgataatattttctccagtttgtaaacttgtcttttcattctcttaacagaagtcttccacagagcaggttttacattttgaataagtccagct

SEQ ID NO: 127108 - DNA, 1053 bp, Homo sapiens
cttggagatacattacatatagcaggggtgtccaatcttttggacacattggaagaagaagaattgtcttgggccacacataaaatacactaacaatagctgatgagcttaaaaaaaaaaaactcacgatgttttagagtttacaaatttgtgttggattgcgttcagagctatcctaggccatgggttggacaagcttggattttagtctgcctgcattgactgttaagggtgtaaacaagtatgtatttctatttcattccccttcatatttactaaccaaaaccttttttttttttttaatactatgttgtgtgtttggttattttggtcatgagtgatattttgatcttgcttgtgtttggggtgggaggtgttaatacatcaccaaaacaatctgcgttcattacattcttgaaacatataacaataataatgtagataacataattgttttgcagatgttcggttactgcttaataatgacaatcttctcagggaaggagcagcccagtaagtattatttatcatactaacctaactaaaatgacatgggaaaacgagagatgctttaaaagtgtgtgggggttttttgtgggtttttttgttttgttttgagatggagtctcactctgtcgtccaggctggagttcagtggtgcgatctcggctcactgcaacctctgcctcccgggtacaagcgattcttctgcctcagcctcccgagtagctgggactacaggcgcgcaccaccacgcctggctaatttttgtatttttagtagagatggggttttaccttattggccaggctggtcttgaattcctgacctcgtgatccacctgcctcagcctcccagagctctgggattacaggcgtgagccaccacatccggcctaaaagtgtttttaaagcactaatctctgacatagatatttgcacatcaagttcaaatgtgtatgattttatatatcctagccagggtaggagaaaaatattttttatcacagaaggacttagaggtacaactatgacatgaaattattcactgtgt

SEQ ID NO: 127109 - DNA, 1082 bp, Homo sapiens
atatttatataaatagcatgaaatagttatacatttgactcaagatacgtgaaagtatgggacttttatttgtccaaagaattattgatctgttaatgattgttagatttaatttaaataaattatatttgttgtaagagaaatttgaagatgagcttcatttctcttttattataaaccaaatttctggaacagctgtgatccacacttcatgtgcattgtaacaggaaatacatgatattctgatcttttaagtaaacgagtatttgaggacatcggtaattgtgataaaatatgatgcttatagtatgaccctcagaaaaaactcatcaaaacctttactagaaacttcagattttctttgcatgtagttataatctcagtgaatgtttgcttactagtaaaaaaaaaaaaatagtttgattgacttcagtagtatgcaatttctcaaaactctccatttgagttcatgttgtagacatctctgggtgtctgtgaagtacagaatatatactgtaagtcactgattgacttgactttagaatgctattactctggttcacagtgtcctctctgtgaaataatttctgagcaaaagtagtgttaccctgttcttcatcccacttagttctgaattacttttgtcctcaaaagataataatttgttacctatcattgaggccatccaaaactacgtaacaaaagcttagaaggcattataaaaacatttagaatgtgttccagtggcagtttcactagggtaagtgtatagctatagactgtttctttttcacttgcactttttgatgttgaatttcttttatacaaatacatctttcccacatatatgtatgtttcctcctttcctccacctttgccttgttgctttatctcctttttttttctttgccctttaccgtttttgtagtggggaaaacatgacaattattctttagagtggttgtaatgggacatctttacaaaaagctaccaactcagtatgtttcagagcaaaattagccatactgaagagttggtattgtcaagtcaagaacactttgaaacatccagaaatagctttt

SEQ ID NO: 127110 - DNA, 1088 bp, Homo sapiens
gttttatgacctgaagacacttgaatttatctggtccaaactactgtttttgtatctataaagtaagtgaggtggcctgtactggttaatgatatggttgaagcaaaatttggatattatcactcctagatgagtaccttttccactgtactgtgtaattgtcaccatttaacttattttgagcctttaagataaaattttaacctatttcatattacttgtctccttttcagatttcctatttttcctttatcccctcctcccaagttagaggtggatggcgttttatattacgggcaataaaaggctttcagtccagcctgggcccaatttactgtttaaacttatttaaatatgaccttactggaaaatgaatccaaaattctaattgacttggttttaaacatacttttgggataaatcatttaaggattaataatgccctggctgtattgagtttattcttaggaaaattacagttttcgtgaattaggaaaatgagaagtgaatagcttcttttttctttctcacccttgtacacttctgtattcaatgtcatcttttttgagcatgtagtatcaagaatttgacagctaataatttaattctactttgctatttttacatttactagtctcctattaactcatcagtaatgctttgttcaaccaggctttcctttctagaggagactcaggagctaatacctgaaaattcagtggacgcctggccatcccgaataatctggaagtttccaagtagattagagatgtatttctgagtttggaaattctcagtatcctttctgttaagtgacagtgatttcccagattttagatttaatttaaaaatacaatttttagataatattttatactcttgagaattttttctatacatatatatggtaatgtattattctttactcttatggagtagatagagagtagctttattcttggatccatctcgtcaccatttcctacctcacactctgcggtttttaaccttagcaactgcctaactgctttttctggctctcgttgctccactgcccaattcatcatctacactgctgccaaattaat

SEQ ID NO: 127111 - DNA, 2512 bp, Homo sapiens
tgtgtacgtacacacacacattttcattgcattcttataaaataatgaccagtcgcttctcggccttttggctaagatcaagtgtagtaaaataatgaccaaaaaattctgtgtgtatgcaagtatagacatgtgtatatctttatctgtaagattttatgactatgaaaaaaaatttagaaaggtatatcctgtgttgttagcatgatatatatcagagggatggataagtcccgacatagctaaggagtcaaagactggaagaattacaagagaaggaaaaggggaaattttttaaataaagcacaaaatatcagattatacattatgcattgtggatgtattatttaaatttatggaaatgaagtatgtttttaaatacttggaagtcaattaaaatcagttgtcaatgtagtttttaagaagcaagaaacagatacgtcaaagtaggtaagactgtgggcccagaggcaaggtgggggacacaccaaagaggatttgcaccagaccaaagccattcaggtaaccaccctgattggaggttctcacaagttctgtagttttgaggaactggagtctgataccagacattgtaaactgttagagttctcaaagcagaaaacccaccaaacccacttgaacagtgtttttagaggttgcattttttttcaccagtagctggaagttatattgggagaaaatctgatctgcactggatgagagtaatgtcattgtctgtatagtcaactcatttgaagtattaatagttgtaccatatggttaaaatatatgcttggagtaggattgttttatagttttaaggaagaagcttaaatgagtgtaattatgatgtatcaatattgaaatgctgtttttttattttttttctaaattcattccatcatcaaaggtattgataacagaacatggcgacttgggaaatggaaagtttttggatccaaagaacagaatctgttttaaatttgatcacttaaggaaggaggcaactgatccaagaccctgtgaagtagaaaatgcagttgaatcatggagaacttcagtagaaactgctctgagagcttacgtaaaagaacattacccgaatggagtctgcactgtaagtcatcagtagcagctttgtgtgtgtgttttgtgtaaatgtgagtctttagcgtctcttaaaatttacagtaacttacagaattgacattgtataatttgtcatttttttccttaaatatttctaagaatgtttactattttttcaagaaattctggataataaatagatatactaggatggcttaaaatagagaaatggttgtaccttgatttaaatccatgtagaaattctaatacattgattaaaggagcaggatatggtgagattctgtaatcttatgttcatgactcgtctcagtttagatcaaagttatttttattaagtcacagaaatcttagaacaaataaaattacttggaagtaaaattatgtgtttctgtattttacagttacatttcttgtgttttttgtgtggttctttcgtaggttcaacctatttttatattttcaagaaatatatggctgggcacagtggctcacgcctgtaatcccagcactttgggaggccgaggcaggtggatcacctgagatcaggagttcgagacctgcctggccagcatggtgaaaccctgtctctacttaaaaaaaaaaaaaaaaaaaacaattagccgggcgtggtagcacgtgcctgtagtcccagctactcgggaggctgaggcagaattgcttgaacccaggaggcagaggttgcagtgagccgagattgcgccactccactccagcccagtcaacagagtgagactctgtctcaaaaaaaaaaaaaagaaaagaaaaaaaagaaatacaaaatatggtagtaggaatacatttcttttttaaaaatttcataatattatttgtaccctgacaggcttttttagcacccccagtttgtgcttcagtggccttttccattgccagagtgatcttttgaaatgcaaatcaggtcattaaaattccctgcttgaaatccttcagagatttcccgttgcctggacttaagagtccaggcttttgaaggtggcttaaaggccctgtgaccacgtggcctctgcttacccctccaacctaactctaccatatatcctagtttatacctgctttctcaatgtaattattaatatcaccagtagcgtaccccatttctttcttggaagtttcctggttaggacaaaaattcatatggtctgcttaagtatctagctctctgattatttgagaaatattgcaacataacctcaaatatcttatgtattacttgaattataacttgttcatcaggattattttggaggaataacgagagttaagggagtacttgttagagagtcctcatttattctagaggattgaaaggcacaaattaattattatttttaaagcagtaggcaagaggtgaaatagcattgtg

SEQ ID NO: 127112 - DNA, 1077 bp, Homo sapiens
agttaatacaaagaactatacttcaagccaggcatctgtaatcccagcacttttggagaccaaggtaggaggatggccagaggccaggagttcaagaaacctgggcaacatagtacgaccccatctctaggaaaaaaaaaaaaaaattagccaggcatggtggtgcgtgcctatagtcctagctacttgggaggctgaggcaagaggatctcttgagcccaagagttcaagcctgcagtgagctataatcacgccactgcacttcagtctgggtgacaaagcaagaccctatctctagaagaaaaaaaaaagaaatatacttcagttcatctaaaatataggtagagtaaaaatcagaagcaactagtcttagatgtttcttagatttcagtagagaccttctcttctttgtctctaccatttctccaggatctagcagtattaggggcttaatataaatgtttgttgagtgaatacatatttgtaattacagagttaataaacgagaggggcagaatataattaaaggctaggacatattggccatttactctactaataaaagagtactatctactcagtgtcatttactgttactgtagtaattaatgcctttggaagaatcttttgaaatagttctcaaattggtaccactacttggtttggaattatttttttttcttttcataatcaatggttatataaatgtatattgtcctagtcagtattttatatatgctaaggactcactagctggcttggcactaatacctcaataaaaggaatacttcttttggaatcatgaaacaaaagtgaataaacctccaagttatttttccaaccaaccttctttgaaaaatcttggatgagtcactcaaatcaagacatgttataaaattatctgttattttgtagaacatatacattgttctaataataattttcaaatattcagtgtaactgtaagtatgagaatacaggttgaatatctcttatccaaaatgcttgggaccagaagtcttttggatttcaaatttttaaatatttacatcatacttaccagtttaacatccctaa

SEQ ID NO: 127113 - DNA, 1050 bp, Homo sapiens
aaaactcatgttaataagtatagtcctttatttccagatatcaaaacctctttaagagtgttgtataacatttactagtcattctttttaaattgtatggtactttgtatcattcagtagatgttaaactacactgagtgtattcataaaagcccctgttaatctaaacatttattccatttattttggaaatataagtgatttgattgaagaagtagcttaaaatttatctccacagtagcttatgacttagttttgtattggtttttgttttgttttgttttttttaaggctagtcaagtggagatggaacaaagaaacctgtaactgattgtgatcaattagtggcaaacagcactgcacacacaccagcctgaattgtattttaagccttagctttagaattctggcattaaatccattatgtaagttctttcttatcagtagggtgaaaattaaatatgtatcataactggacttaaccttttgattatttttgactatttcagtgattaaaaatttaatgtccagtattcatcccccacactctctcatactgtagcatgaaatataatctgaaacttaaaattgattcaaattattttccctaccttatttacagctgctgtttttatttttaaggaatggtcgttggaggtcagaatggaagtttacaatcactccttcaaccactcaagtggttggcatcttgaaaattcaggtatgaaaaataatttgtttactgatctttagatgattctgaacagagaaacaactaattcctaagtttacattttcatagtatatcatacacatttctttttcaggtctttgttttggggtaatgggaaaaacaatagtgctgttttaaatcttttaaataacctggcagtttattccctagtcatcaaaaatctgcaaggatagctgacagattataaaacacagctaaaattagatgctgccatttggtctgctcttcagatacaatttgttcatgcaggcgtcttctgagtttgagttgtgtacttctctcctctgaattgggtg

SEQ ID NO: 127114 - DNA, 1085 bp, Homo sapiens
caggtcaatagaaggcttgcctgaataactacaggaatatctctaactagtctcctcactaggctgagggcaggaagagtcttgctggagttcaaaagttttggggctcagcagagaagtctagactagagctgaaatatgtagtcagtctgcattgatatgcttgttgacgcaataaggttcttgatgattcctgtaatgtggtttctgtaatttctttttctaataggttcattattatgaagatggtaatgttcagctagtgagtcataaagatatacaagattccctaacagtgtctgtaagtaattaattccacaataaaatttaacctaatacttctgtaaaaccagaacagttttggaatgaacattttaagtaatatttctgcttcagattaccgtgttttctgatagattaaagataagtaattgcaaacctgtacctaacttttttgcagctttgagatataatttgtataccattcagttcattcatttaaaatataagcttcaaatttttctcttttttttttgtatattactaacagggttggacagcagtcaccacaatctaattttagaacattttcatgctccttaaaagaaacactgtaccattagcaatcattctccattctacccagcccttcccccagaaccctcccagccctaggcagtggctaatctactttctggctctgtggatttgcttgtgctggacatttgatataaatgtaatcataatatatagtcttttctgactggcttttttcatttaacatgttcaacattcatcctttttggagcatgtattagtacgttgttcctttttattgccaaataatactctgttttatggacataccacattttatccattcttcagttaatggacatttctgtgttctactttttgctgctgtgaacatttgtgtactattttttgtgtagctttttaaatttatttttggtatatacataggagtggaattgctgggtcatttggtaactatgtttaaccttttgaagaactgccagactgttttccatcttatagtttcaccagcagtgtataagagtttc

SEQ ID NO: 127115 - DNA, 1695 bp, Homo sapiens
aagtattctgaactgtcaagctgcccagtcagatgggctgttgccatttaaaatcactgtaattaattagtttgattagagcacaaagcttagctaatcaaccattatttttcattttgtttgttctaagaggattgaaaatcagtttagtttaaatgtctttctgttaggcctttctttcttacaatgaagagatgattcttctagtttatggttaaaagtttttgaagtgtctcaaaaatattttactaactgtaaccctaaaattgatgtcttttggtttatgaaatcagtaatttttgatatttccccagttctttttaatggggtcaataatggacattctagtttaaggtggttgatggatttagccatatatgctgctaaagaaattgtctaccttttcttcctcacctgttccatttatgtaaagttgagattagagggaaagcattttctatatcaattgtgtttaaacctttcaagaaggttatttagctagcttagtgttgaactaaattttttttaaacaaggcaaggtctaatgctgttttgagattctgaaattaatgaaaatacttatttcagaaatgcatttaatgctttttttcttgtgacagttacgcaaatcagcttgaattccatatgtccctgagttatttttatcataaagccacaaatgtattataacaaggcaaattgtaatatatataatcctgaactcatgaccatgtctcggtttattttttttttcttggattgaaaagtactgaaattcaatgtgacattaaaatgcaaattttcctatttatttgagtagaaaatcacttaccagtgagcatatatattttaaaatactttctttggatattgtaattcttaactggttgtaaattagaaaagctgggattacatatggtgtgcggttacagtctaaattttttcatcctcctatgcatcataagcatgtttgtaatattttcaaaaatagttctactgatgctacaggaatttcaagcctgtggtgaatgttagtatttaccatagggagtgaagtggagttatggtttcattcaatagagtattgctgattatacttgagtggaatcctttcctcacgtactcccacagacgtctgggcctggaaattttttttttattttattttattgtttttttttttagaaaaacaccacttttattatgtacaataaaatatttcattagcttgaattgtatagatttttaaaaattcaatgaaagcatgttgtttaatttctttttaaaatcactgttgggctttgaaagcattgagaatataatatgaaattatgacattttgtctaaatcatcttttctttagttttaaaatacaagttttggcacattgggattcctaaagaaaatgaattggtaacattaattatctgttcctttttaaaatatatatatttgaaagtttgatgatggtgaactaaatactagatctaattgacaagcttagttgtatcagttaggccatcatgagtttctatcccatgaaagtcatcaatttcctatctctgttctagtctggaatgcattactgaaaatgtatgcaactgtttttaaggtgatttgcttgtgagacggaagatttatcaaaaataatttagaacaggctgggcgcggtggctcacatctgtaatcccagca

SEQ ID NO: 127116 - DNA, 1751 bp, Homo sapiens
tgtctcagcctgccacctcagtcttagtagctgagactacaggtgcacaccacagtgcgtggctaattttttttttttttttttttttttgtagagacagggtcccctgtgttcttgaactcctgggctcaagcagtcctactgcctccacctcccaaagtgctgggattccaggtgtgagccaccgtgcctggtcaagttatttagaagacttttttttgtgttaattaagctcatgaatacagatgtaaaactcttatattgttgacgtgatatagaacttaggctgcagctcagttttggcattttttcatgttgagaatttttgctctaaatttacttaacatttagattttaatttacttaaaatttacataaaattggatttcccttctagagggtctggttgcagtttacataggtcttttgcccctgttgtgcctgttgtctaaaatgttcttccctatctgtaaatcccacccatctatcaaggaccagctggcatgctgccttctgatcctttcagctgcagaaaagacaggcttaccttggagatattgcaagtttggttcccggccactgcaataaagtgagtcccatgaaatttttggtttcccagtgcatataaaagttatagtcacactatattgtattatattaagagtgcagtagcattatatctaaaagaccaatgtatataccttaatttaaaaatcctttattgctaaaaaaaaaaatgctatctgagcctcaggaagtcataatctttttgctggtagagagtcttgccttgatgtttatggctgctgactgatcagggtgctggttgttaaaggttggggtagctgtggcaatttcttcaaataagacaaccgtaaagtttgccacatggattggttttcctttccagagaaagatttctctgtatcatgtgatgctgtctgatagcattttacccacagtaggactttcagaattggagtcaattttatcaccctgccacggctttatcaatgaagtttatgtaatattctaaatcctttgttgtcatttcagcaatgttcacagcatcttcaccaggagtagattctatctcaaaacactttctttgctcatcaaaagaaacagctctttatccgttcaagttttacaaggaattacaacaattcagtcacatcttaaagcttcagttctaattctagttattttgctgtttatggcatgcctgcagttactttatcttatatgaattatggtatatgtgtgtgatatatgtgggtcagtgtttgtgtatatatgcatctttttttgtatatgtatgttttattacttcttctagattctagttcttcatcttccagtgttaattccttgtacaaagtaggtccttatcattcactggatgaatgaatatccaagttacggtgtatttagtgagctgggattggaacaatacaattgatcaaatgcattactgagtatgtgccccatctaagtttgcagctttagattgtggtcagaggctgttacaagatcttatatattctatgatgggccatatgcatctaaagcatggtggttcagtttatgaatatataaaaggacaattttttgattaatgtcagctttgagtttagaatgtatcccagacatcttagttgcccttaattatttttggagatatttttctcagccattaataaagcaatccgaatgatgcatttttctctgagcttgagtttttgtatatg

SEQ ID NO: 127117 - DNA, 1108 bp, Homo sapiens
atgttgaccgtgctggactcgaattcctgggctcaagcaatccttctgcctcaaccttctgattatttcgactacgggtgtgcgccaccatgcctggcttagaaaaggactttatgttgaacctcttttctcttacaatcaaataataaattcattgagtcatactattagcgagtcgcagtgcttggtgcgggtgtagaggaatggaatgatgaccaagacatggtccctgtcttcagtatcttgagatattgagcactcagggaaagaaaaatgggcacaaaactataatgcaaagtaaaatgtgtagagcacaaaggagaaataaataccaaaacaaggggatgagagaaagctttcaaatcatagtggtagttactggaataactttaggaattcccaggctgcttggagaatatgagaatgtgcatctgcttggtcccttcagaaaactgtcagtgtgacagatgggagggtgaaaaagagggaaaagctagaatctgttggggttaaattggagttcattttgaagcattaaaaataattgaaattctgatatattttacctgtatagaaagggacaggaaataatatgagaaataataatagtggggtgacccatcatccatatttaacgtttgttaacatttcgccacaagtgttcatattgctttctctctctttttcaaaaaaactattttttagaacccttttagatgtggcagtttttcagactttccttgtttttgataactttacaattttgaggagtatcatatctccctacaatcctcttgcatgtggcagtttttcagactttccttgtttttgataactttacaattttgaggagtatcatatctccctagaatcctcttggatgtggcagtttttcagactttccttgtttttgataaccttaacaattttgaggagtaccagtcaagaattttttagactatcgcttaattgagatttgtttgatattcttcttatgattttctgggattttgagtttttgggaggaagaccacagaggtcaagtgccatttttgtcatgacataataccaacttatcactgttgatattgaccttgatcccctggca

SEQ ID NO: 127118 - DNA, 1272 bp, Homo sapiens
gaacaaaacatttatgatgctttaatctgtatttgtatgaataaaatttgattcaagtggaattaggagtaatgggaacttagcatgttttatgtggaaacttagcatgttttatgttttcgttttgttagctatttttaaaatatggctgtgtttaaatatattgctactgcataatgcctagaagtccacaggcctctgtattttgttccttatgatatcatctgttctcaatgcactacttttttttaaagaaagatatacacattcctagaatcttttacattcccagtgaaatgccaagacaggtctgtcaaatctaattttacagaagtggaatgtatttgtcaatattttataatattgacaaaaataacttaatttttttttcttcattttatgtatcacttcttgtgacttgtgagaacaaatttttgatgttaacaagtcacatgtaagtttaaaatctaatattattttaacattgtacagaacaggaatatctaaaggctgttgttcctaaggctagcccagtttcagtccacttcacttacagccatctcctgtgatggtaagccacaaatgtcccctgttttcctctctgccttcatattgattattactaatgtaaaaatatttccaatttttacaaatagttatgtgtgtcaggttttaatgaaatgctaaaggacattactaatagaccccaagagattccgtttcttcttcgcctgtcacacttcctgcccaagtgctgatggactgtggaaacaatgactaccatggaccactgtttgaagatgtagtatgctgaattcccagacatcaacttaaaaataaattctgctcatgaaaagtatgcagggcatgtttctgcttaaaaaaatgtcctgggaaaaaatctaaattgaattcagaagatagagtaccatgtaaaagagtggccaagttataggaagtatttattttttatctttaattaggtattttaacattcaaaaagctaatgcattttgtttcttagacataaataaatacgtagatcataaatagaaatgtttcagagatgttttatttaagagagtcaacaatagtaattaaattaatactaataaataatgctagctcctgacactttaccattgacactttcaccagtatcttacatgaacctcatagcaactcatagctcatgtctgtgaaaactgaggcacagagttgcctaaagaaggctccaaagtggattttgctttaattccagtactttttcca

SEQ ID NO: 127119 - DNA, 1096 bp, Homo sapiens
ttgtgtgggtagatcaaaaagaaatgggttggtcacaaatgcttactcatacagaggtatacacaggtgtgtgcacacagccttaaaatgactgagttgctctggaaaatgacagaaattcatgtaaggcacgatgaagaaataggagaaatacatgtatgtaaatatattcctagagcagcgtttttcacatttgaacaatagttgcaaaatagctagtaatggaattgcctgcatttgagtactcactgtgtgccaagcagtgttctaagtacttaagattactattttactgttacatttgtatgtatttatgtgcctagaatatatgtgtaatagtatacatattttcacatacttgtgattgagtgtacaatccttgatctgtcaatctaccataagctttgagaagataacaatgaactcttctgtaattacttctaaagacagataatgtttctcatttctgatattcttaattcccttgaaaagttctttctatatgctgcgcaaaaccaagaagactgatatgcatgatgtctttgtggttaattgctataaagccaatatttaaatttctttgagtcctcttttactgcctggtatcatgggatgaagagctgcgcaggaggggagtgtatacgtggctctcggtcttgtgcattttgtgacaaaggaattcccctttcaatcacgctgctctcctggagcccctggagcctctggctcaagcagcgcagtcggtctgtgcagtgtccctgacgtcatccagcgtatgcataagccctgctattgtcttactgctacagcagggctggggattgcagtatccgctgttgctgctgctcccagtcctgcccctgctgctacctagtccagcctcaccgcatcccagaagaggcacgtcggccttcatttgcctagtggattttcaaaagcagctcttcggtttttggtgctgttaagagaccttgcatttcaatcacaccgggagaaaactgaagctcgtaacaggagaatctggcagctggacacagcttggactgcattgtctggcttcatgacccctgctgtgtagccggctcatctcttcact

SEQ ID NO: 127120 - DNA, 1049 bp, Homo sapiens
atacttgtttaactatctattctgtatacagtactgtggtagatcctggtaagggttaatttttttctaacttattctgatttcgtgattcttacccttgattatggttgcagtgccttacttgtataggatgcttttactttttaaattgaggtatgatttacatgcagtaaaatgcttaagtctaggtgtgcagctcagtgaatttttgcccatgtttatacccatagaactctactcagctcaaaatacagaacatttccatttcccctggaagttctcttgtggcctttcccagtcaatattatttcccctcttcatgaaaaggtaaccactattctgacttctgatgccatagattcatgttgtaagtggctcttttaaactttctttatctcccccttgctctttgcctgtaagagaaggaaatgtcttcattttcaaatattgtattgattaagttgattttatgtttcagacctttgaggtcagaaatttgcagtagcctggatatcacattataatacattctgtcttactgaaataatattgttttaaatacttgcacccttcctcaccaaaaaaaacagacaaaaaaagcctttaaaataccaaaaaaattatgtggaagagtaaacgctagttcttcaaagttaaagacttacacagctatggcaatagaattaataaatgctcttttatgcctgacactgctttcatcaatatctccaatgatactagtctcatctctttgacttagtgaatctgaatctcccacagttgtgcagattggccacagtcagtctattttgggctcactttgaaatgggtgttctatagtatgtgtagactaatcatcacaaagcaggaagtatagcttctgtaactccgtttattaccatcttgatgtatttcactgagcttttcctttactaaagtttcccatgtctaaaaatgggagtagcgtgtctgctctttaactgctttgaagatatacagttttagtttctgtggtcagaatactttaggtgtaagaagaaagtactatc

SEQ ID NO: 127121 - DNA, 1049 bp, Homo sapiens
tttgggaggccgaggcatgaggattgtttgagcccaggagttgaagacaagcctcggtaacaaagcaagaccctgtctctaaaatgaatgaatgatataaaataaacacaccagtctgtgtcacattatggttctcagtaatgtcaatgtgttaatgattcagagccaccactgggctcttctgaatgaaattcctatcagttgacaataaatccccagagtgtagcagggtacctagcatatatcaagtgctcatgttctttaaaatttgaatctgctgtggagtaaggtaatatcattgaaaatatgatgtgtgggcttgtagggtgttaatattgagtttaataaaattttctaggccaaggagtttatcacacataatgggtacatgtcagaaacatgccagtaatcagctcttgtcatccttcagagcaggaacaaatgacccaaacaaaataatagcatatggacttttattactaagcccaaatttgttagtgggtaaactaccatatactgataatttgccatgtactggtaagttgactatgtctaatctaagtttgcttaccattcttaaaggttaagtaaaaataatgagttactaataatcatcagtttatgtacagcatgaaaattgagaattgtttgcttgcaatactgatataatttcaggaactagaaaaattattttacttttttttgtgagcatttcagactgttaagattgaggcttttggcatattttgggcagtagcaagcccgattgtaaagcgtatagattaggaaatcacagtgactccattggggtattctttactacctcctccacctctggcttcttctagaacacctagttttcagggggaggctttggtagggtctggcctggtggtacgcatggatggtccaagcccggacttgtctcagaagtctgaatttctcatctgaaactttcctaggtcttgtgttggtataatgatgtttcagttacccattgctacacaacaaactacctcaaaacatactggtttaaaacaattatgtat

SEQ ID NO: 127122 - DNA, 1069 bp, Homo sapiens
aatgaaattataattcatgcatgtctgctttatattgatttgtattactgtttgtatacatgcttttttttttttttctttttggagacagagccttgctctgttgcccaggctggagtgtcgtagtgcaatcttggctcactgcaacctctgcctcctgggttcaggtgattctcctgcctcagcctcctaaatagctaggattacaggtgcccgccaccatgcccagctaatttttgtatttttagtagagactgggttttactgtgttggccagtctggtctcgaacctttgacctcagttgatccacctgcctcaggcttccaaagtgctgggattacaggcgtgagccagcacgccgagcctcatcctgtattttttaatgttctgttgtactttataatggagggagcatctcttctggtttacatgctctggagtcagtcaatagactgaaatgctcattctactagctgcacgaccttgagtagattaacttctctggcttcagtttcttaccctgtaaagtaggcttatactgtgtcatggagctgctatgaggtcgtttttattgttgttgttcttcttcctttttttgtttagagacagggcctcactctgcacccaggcttgagagcagtgacacaatcacagctcattgcagcctcaacctctgggctcttggtgatcctcctacctcagcatctcaagtagataggaccacaggtgcacaccactatgccctgctaatattttattttttgtagaggcagtcttgctctattgcccaggctggtcttgaactcctgggctcaagcaatcctcctgcctcggcctcccaaagtgctgagattacaggtgtgagccactgtgcctggcctgctgtgagttttaaatgccttaaaatatttgttgcctagtaaaggctcaatgaatgctacctactgttattaggtattattatattagtcatttatgttattgcttatccttccaattgcattcaatatgcccatttaaacatttgctgtatgaaaatctatgatgtgggaggggttaaaagttatt

SEQ ID NO: 127123 - DNA, 1075 bp, Homo sapiens
cagttagaggtttttttcctttaagggaaaattcatgcaattaaatattaaaatgagatttgacataatctctaggtcctttatgttaactgtataatatattttagcatagtggttccactctatatatattctttcatcatgattgtaattcatacataatttttttacttgaagtttttaatataattgtttaggaatggattaagtaatgttttgaacctcattgcaacacataaaacaattcacctttttgttttagaactaatgtaatccataaaggattaaatagacatgtaataatgagttttcattgaatcatcacaaaacacatgctattaataatctttggatattttctagctctctacttcctcacgtctgattacagcaatttgggggaggaaaatgtattcagtcttagtaattttttattttgacttaaagcctcccagtggaggaataaagatgaattatttttgcttatagtcttagagttgttgttagaaattggtgttgatgaaaataatgactaatgaagcaagcattggtatgtgttgctgggacctttgagactattccttttcagtttttccattgtggcctaagaatattctgtctgctatttgaagaagtcatgtttgagccaaattaaattttcaggtcaagaaatatttacttgattaaacataaattacttttgtgacaactgcctcatattcccaagtcaacaagccttctcagaagaggtcagggagtttcctatattgtttaattgcctttaaccaatggaagcttgtcataaatggggtctaaagggagcctgacctcatctcccaaggtgaagaagtgattgtctacaccatcataagacaaagatgttgctattcattgcaatccctcagattatttcataaacgttacttcagttcctcagattttattattagtgctatcaatttttaagtccaaacttgcaaaataacatcaccacacccctgtgagatagcaagtattatttccattctcagttgcagattccagttgagtattaatgcctgttttgcctgaagat

SEQ ID NO: 127124 - DNA, 1002 bp, Homo sapiens
ttatcttttgtacttactgtcattttcccctttaaacaactttttttggccttagtctttactgtcttttctgagaatcctattagagtttaagatttaaaactagatgtagaaatacatccttgcttagtgtcagggagccactgtgaaatcccattgacaacctattctgggctttagagccagaagtttaattaccacctattgagcgagtttgatttgtcacttcttgggttctggccaggcagagctaattcctcctagcagagcaaggtcggtgggcaggagccagaattgagaaagtgacgcagtcacttcagcttgtccagcttcaggcgtagatgaagggagttaagtgtgccagattaagtccaaagtggcacacaagcatgaggggcaataagggcacctggtaaaccacagcaagagggagtctgcaactaagaaagggggagtgtggtgactagcaaggagcaagcgcttgcaattttcagaagtccaggcaagctgtgctggcaccagacaggaaacattgcggctgcgcttcagtcagaggctggcttcagcctttgaaggagactgacagggggtattaagtagttactggaatgagacctgtaaaaaaggcagaataaaatcagtaataacaactgaataataacaactgaagaaatcaatagactatttaaccacatctgtaggcctctacacaatctagtactgtggagtattaaatgaatgagatagatttagaaataaaaaaccattcatggtatattaaggaaaattcaaatcatagtatattacataatatgttagtgaaaggaactttgggacatggtagtgtagaactctgttcagatgaatgacacaaacaccttaggcatactttatagggacagatatactttgtttgccttttgttttcatccatctatcctgaggaaggtccacaattattgaataataactgcctaaagtggtaacatgtctctggtactc

SEQ ID NO: 127125 - DNA, 1800 bp, Homo sapiens
agtagagacggggtttcaccgttttagccaggatggtctcgatctcctgacctcgtgatccgcttgtcattccatttttcagtgatacatgttacagaaactgtccttatgtttgtgtacctatacagatagctaacgtatcatctatacactttaaacaaaagatgtcaaactacacacacttatataatttgctttctaaactaaaatggagtgatcattttcctgtcatttataacttgatttttaatggctgcatactattctatcatatagatatttaatatttaaccatttttcttgttgtatatttagtttttaggtttttttgcttttgcaaataatatatttatagatatatttttgctgaatatccttgaagataaatatttttacatgcctattattatctccttaggctaaattcccacgtgtgtagtgatttttaaagaacaacaaaaatatgctcaattcacatgtatgaacttatgggattgatgagtggatgagaaagaacccatcagattttcagaatgacttcagcaagtaaatttgaagattccaaatttcaggcttttaatttaaatagataatctagctttaaacattctgcatttaggtacttaaatattttggttgaatatatattaataatcaccatatttgtgcagaggaagcctattgtgcatattttaataccaaccttatttatgccattgagttttctatccattgattttttggaactgtgtatatcacaccaaaatccaaatccaaagtgaaaaagatagtcaaacacaggtgttgtgggatacacaaaaacaagcaaaactagattttcttggagaaaaagggtatgatgacttcccaggatgctttaaatttctttcttgtttttagctgacctcactctaggaagagaaaataaattatattagttattttatttccaaataaaagcaaaaattataacttgaaaatataaaagggtattacctcaaatgttgattaaaacaatagttatatgactagaataaaatttggactttaacatgtagaaactgtaatagctactgtttagtgtgctcatagtaggtacctaacatggccctaagaacttcttctcattcttattaatctttattaaggccaggataataatatatgcatggcaggtctgaatgcttcaattttaaatgcttctcaaattattcatctttttgatgttttagatccaggaaacctttggatgcctccccacaatttattaaattttttcaatgtgttaatcatttcctttattatttttatagaaattattttaagtgtgatttggcacgacctgtagcagaaattttaatcatttcattcatctttttactatcatagtttatctgagacataatgatttttatgacttcaatgacacctgaaatgaaaccagtactctaaagtagtttttgtttaacatgatttgattcttttagaatttatgttttgccagagtgaatgaggaattcagatataatagtgactgtacagtaatgagtttcatttctagctagctatttttatccaaggaattggtattctctaaaatgacaattgtaaaagatgactaaaattatttttgaaacatttttagacttgatataccagggttccactagagaaacagaatcagtaggctacacacacatacactgagacagacagagagaaatagagattgagagagagagagagagagaggcaatgagttgggttccaggattttgggggctggctaggcaagtctga

SEQ ID NO: 127126 - DNA, 1086 bp, Homo sapiens
gatttttacactttttattaatctacttgctttgttttgaaaccctctactaactgaaaactaaatagtttgccttaaaggaagataatatattgagtcagagaagcagctacaggccatggggtagtaaaattcaaatctgatccaaagttaggtttttcttttcattatattctctaacagttcaatgactaatgtacttctcttctgaggaaaatctgccccgcaaaagaaggcctgctgcaagctgcattaagaaggctgtcttcccctgggtgagggtgtgtaacccacggagataagaagccacaggggaaaccaccacacaggccactattttagtattcagctgctccagctgcatggttgtccaaaataagcccttggctttattattttcaattccaataactacgtttggctttgcatttgtacctaaggaccagttatttttccagaaagtacctaaaattatctcctcaggtcctgggctgtgaactccggttaaatcacaaatgcatctggctttacgtaatgtctacgggtaacagtcggtggaaactggagcactgatattttcaaatattggcaagccagtttaaaaaaaaaatctattaaaagatgcatctaaattccaggtgctttttgttaccaaacaaatctcaagctaaattcatccctaataaaaatgctcctagcccatgtaaatggcattttcccctcttaaacatctattcttattatctcaaatagtgtccaaaatggtcatccctcatggtgaataatctattcatctgtaatgcagaaggaaaaagaaagaaatttcatgtttttaattagcaattgtctaacgcctagatccttagaatgcagacaatgtttcttgaggtggatcagtaattggttaaaactcaaggttaatgaagctacagtcctaggtttgaatgagtcagtcaacctcactctaagaaatcctgtgccatgaactcagaaggtacctctggcccagttgtattacaaatgagtattaccactggaaggccaaccatcatgttactatagaaacaaacaaatgtgtatccccaa

SEQ ID NO: 127127 - DNA, 1138 bp, Homo sapiens
ctgttggggcttccccatctttgagttaaaaaggaaaacaaccattaggcctagctcaccagagtgaaaggaaacaacccacacggaggtaattaatttatagcctgtgaatctacaccacgctactgctagaataaagtccagacctaccatttgtacagcaggctagaaaaacagctgaccacagaggcagtgaaatgagtgacagagtgcaggctgcctgcacaagatggcctgggttccaaccctgctcctccattgctagctgtgtgactgaaggcaggttactaactggcctattctacctattgagcctacctgtaagtaaaaaggaaacaaccattagcaatgaccctgttgtacggtggggaagagtaaatgagttagcatgcaaagtgctttagatcagtgcctggcatcatctaagtaggtaacagtcttcagtgaccctcctctgagaggaggaatgtataaacaaaagacaaaagcctacctttcagcatcagagtgaattactggtttcagtatgaaattgtatccagaaaagttctttttttctatttgcttacttaaaaatatttccaagatgttttgaatgaaaatgttaaaatactattgtaaatgtaaatgataatcatcagagggagacttgtaatgccttcccttctccctcccacaaaacatatatgctaaaagattgccatgtttggggcatatatttagtaagaatttaccaagcattttcccagtctgaagttgcctctatttaggaatattaaggtaggtttttaatcataaaggggtgctggattttgtcaaatgttttttctgcatctattgaaatgatcatgtgattttcatttttaattctgtttatatggtgtatcacatttatttacttgcatatgttaaaccatccctgcatccctggtatgaaacccacttgttcatggtgaattatctttttggacatgctgttggattcagttagctaatattttactgagaatttttgtatctacgttcatcagagatattgatctgtagttttatttttttgttatattgtttcctggtttgggcattagggtgatactggcttcacagaataatttagggaggattccttctttatttt

SEQ ID NO: 127128 - DNA, 1019 bp, Homo sapiens
acactcaaaaatgcctccagatttccacacagcaaaagcttagtaattccacaccaacaccattaaacccatgggaaatagaaagatgtcaaagcttgaaactggctaagtgcttcttaagaattaaagtagacaatgatgtcacaggaggatagatacagtgatggcagagactgaagaaggaatacgaaactttatggcagtctactcctagatagaaagattgccaaatcaacacctgctccaagtcttcaaaaatatatctggtggtaaacagtttttttttttttggcaaaagggattatctgggcttaagaagataaacccaggcagttggcatgtgttacagtaatacctgtaacatttttagtttcttttttgatcctaaagtatattctttttaccatattgactctttcaaagtccttcctaattcctcatgacagatcaaacttttttttttttacattcttggtttctgtatattttgtttaggaatatggaatagcaactgagtgggtcttggcctcctgcttcctagatctcagccaatccctctgcagccacctgttcccctcaacagttgcgggggctatgtaaactggcactctgcccttccacccgcctttgtggccacctgttgccgagactttaagaaaacacagggaagtaaggctctcttcaaggtcaacagccaatggtccatccccacctcagtgtctctaagttcacaggatgagattttccaccgcagcattaactactatggcctaaaagggagggtaactctcctgaacaaagccctggagaccactgagaattgggaaaagccagcctgtgtcattcatcccaagccctgccagctgtcctctaggtccctcctctagagattctaattcagttggtctgggtggtgctcagaatctatcattttaaacaagctcccagataattctgatgcagtcagtttcattcattcattccttggatcttatgtgcatttgacaaatattttctaa

SEQ ID NO: 127129 - DNA, 1082 bp, Homo sapiens
ctgctgcagttggttttcaaaagtaatagcaaagctgccatttactatgttaatgatgcacatccctcccatgggcagcacacctcacatgctgccatgaggcaccccactttatgccagtctataattcaggttactacagcattttgcctgttactagacagttggtagaaagtactgtaaatcatcatgatgaagggtactgctcactgtacaatcctgaccactcaacaaggccctcaatagattcatggctttgcatttattagaagagaagactccaaaggacccagaaaattctgtgccccaagtcatttttctgctttctatattgtgctgctggagcacctgccagtccttagttcattgattccatcacacagcactacatgttccacaccaatcacaagcggtgctccaggattacagacttagcccctgccactacaagtctatgtcacagatccataatacctctcacaggctcctggcatgcctgtacccatcacacacacacaaaccctgggtttcttcagatttctcagttcttccagcagaatcataaagtgtcagcgctaaaaaggaccttaaaggactatgtagagtccacttacagatgcagaatgagaactacccatcaagttacaatgacctgaccaaagtcacagagctaattaaatagtcacttagcctaaagcccctactctctgtcactatcttaccaaggccctctatcaagactttatagctcccttgcttcgtataaacagacagatgtagcctatcattccttttttcaaatctttacttccaagtgccctctgacactgtccctctgtgctttcctagttataaaaaccaattcagaagtagtagtctatcaaatgggaccagattattcatcctaaggtaaaaaatgactcatattaactggacatttgctttgtaataggtgatagaccttctacccagtatttctaatgcagtaataatagacctcagtaaagactgggttattcatgcagctgcttggggaggaaaaggagggccttctcaggtctgtcatatcactgcaatagtac

SEQ ID NO: 127130 - DNA, 1463 bp, Homo sapiens
gaaggaaattccatacctgagacactttgcctattggaatctgagtccccgttactggaattagaattgttggaagagttgttgtcaacccctcccagaagggggcgcaagtggcttactgagacttgttcaatgaatgaagttccgtatttgcgaaaataccaccattcaaatatctagaacagaaaaataagcgtgtttatggtcactgttatcatttacgacttctgtacacatgcccataaaacatgttacatttactaattccaccttaagtatattttatttcaaaaactgtttattctaaaaattagattttagtaaatttaataataacatttaaaattctcagtgtggttttctctgcttaatactggtttcaaaaaactataacatcaatcatggataaaagaacactgttaagaactgctcaatataatttttctccaaatttatatataatattcaaataacaaaatcaccatagctgaaagacaattccagaaatgtatataaataagtcagtttttgaaatacggcttatgaaatattccagttctttgcactttatattctgataaaaaccatacctctgtaaaatgcttaagagcaaaatcggggtaggggcggggcaggaaggagtgggggtgcttggtaagacctccttaaggaaatactggttttacagaacaaaagaatgagctgtatcccgtttcccacatggatagcacccagccactgaggttcagcattattccacttgcagagaagtgctctataaacacaagcatctgttgtacaccattaatgtttcctagttcacaagcctactaattgttatgtactgtgaattacaaaagggaaaagaagtaactttcagtaatgaaagaacaatgatgcttacatgattagactgaagtcaggacctcctaagcactggaaaagcaagtgacctcccccaacccttcttacctgggatctctgcctctctacagtgaacacttcctaccactgctcaaagcggttctcccccacatctttttctctcctccctgactgggggtttccttaggcagtcacaaatcattccacagaagaaatttaagaatcaatcatatcccagagtctcataggatagctacatttttataacataaaatgtgcaattaacatagaattacctttacccttacttattccataaaaacaagattatctaccctggaatggactttgggatataattttaaaactgatgttttccctgttttgttctattaaagatttctaaaaagatataaggaacatttatgaatgaccagaaggaagtattaatcaaacgaaatgtttccaatcctataacaggacaccttgatttaatcccaggtagttactctttttgactataggttgagtatcccttacatgaaatgcttggaaccagaaatgttttggattttgaa

SEQ ID NO: 127131 - DNA, 1005 bp, Homo sapiens
agcttcattgctgtttatattcacattctctttcctgcccatagattcctaaccgcagaaataaatggcagtaacctttaatagtaaccttttttcctcctgagttcttacatatttctgttcatcagttgcttctgctcacaactttaaaacccagatgggaaacaggatttaaattagccatagtgttagcaaaggttttatcttatagatcttctacaacatggattgaaataggacaattaagaatataagttattggtgattgtatcagcatttatctcttacataagaaacattggtattggcttccagagagaaagagccatgagctcctagttatttatcttttttatattaaaataatgcctttttaaactccccaaaaaacgcctttttaaatttaagataactctttaaaatctgagacctttcacttcagtatactaaactgaaagccaatgacatttcgtgggggaacagtatagaaacaaaacaacgaaatcatttctggaattccctgagcccctcgactcatcagtttgtttgttgttgaagcagaaatttagcagtccttgtggtaagagagttaagtatttccatggtccaaccaaaatttgagagtatttccatggtccaaccaaaattcacaaagttattttgtttctcacttagtttctccctcctgaaacttagagagtagggatgtatctccttcatatttgagattataaaattaaatgttaacgttaaacttgggtttggtgtagaaactgactgcattagtccccataactaaggtgccagcaaaatctttgcattatagcctgcatatacatgagtatgtcctcacatgtaccacatcaattcctaagtttttatttttattctgcagcatatatatgctaataaagtctctaatcaccatctatgtctcactttttaataaaaaagtattttagtgtaatgcagtgcattttgaagacatgtagtaaatgtgtattt

SEQ ID NO: 127132 - DNA, 1038 bp, Homo sapiens
ctttttttgaacctggttaactttcttttaagataagattttaccttctttttttaatcttcttccttttttttttttttttgagacggagtctcactctgttgcccagactggaatgcagtggcatgatctcagctcactgcaacctccacctcctgggttcaagtgattctcctgcctcggcctcctaagtagctgggactacaggtgcgtgtcaccatgcctgactaatttttgtatttttagtagagatggggttttgccatgttggacaggctggtgtcaaactcctgacctcaggtgatccacctgcctcggcctctcaaagtgctgggattatagtcatgagccactatgcctggccagattttacctttcttgaagataaaaactttgctctgaaattcttggtctttcttctttctctttgcttcccagtgaagttcaatattatatattttaacttcctttgggcctctcttcatcctcatccagtgtggaacccgtggaccattcctttaatcattcgttcaccatcatagtccagtctcttgctccttgaattttattgaacctaattcagtctgcccaggctcaacctaatcatttgacatcttgctactgtacctgggctgctggccaccgctaggtaaaacttgacaaccatggcagttataacctctaaaattcatggtctccatttgttaggccctcaagacagccttagcaatcctttttttttttttttttttgtcctgagtagttctccactgtgtggctgtttttcactttcaccccatctttaagcttcttccctgccacctattctcttagtctcagaagatgatcgtggcccctgttttatgtaggccaccaggcagaaactcataaaccttcctctttactaccacccccatcactacctacaaattttcttttaacccgtgtcactttctagttatttttctactttttctccttaactttgccactaggctgcttgaaagggtaatgcccccttgtttacccttctacagt

SEQ ID NO: 127133 - DNA, 1068 bp, Homo sapiens
actgtaatcctttctaagttgaaaacagccttgcaaagaaactcgcagggcattccaggggcaaagagttcctctaacctagaatgaattttgcagcatctgggaatggcatatttttacctgttctgaattaaggtatttctgtgtcatagtgtaaatttggttgcaagtattaaatactaactcctattctggaaagaatgcaatcataatttaagaacacatttttcacccaaaggggtgccctctttgagtttatctactctcacttgtaccctgtgctttcactttcctgtaaactcattatctgaaccccacacccaccctggcccttctgaaatttttgtaaaattgaaaggaactgtttttcctgatgacaagtgaggcttcatatgaaaggagatttatgataggttttcatgagcaaaaattgtgtagttttctaaagatttcatacatataccctttaaaagttatatatgtttatttatatattagacatatatataacttggacttttacatttttaacaagcactattaaaaattgaatgtaaacttgaaatttaatgcaaaggaaatttagtttaaatctgtccactaaagaatcattcatttggctaagtcttcttttaatctagatttttttcttcaattagcatttcatatacctgttgagaaatttttgtaagtgacaaagacactttcatgtctttcacatcaaggatattcatgtgatatctaaatgtatatatttatagctatactctgcttaaactcaacatatgaaaattcatattttaaaatagaaggtgattgcttaagagtcagcctgttggacatgaattattcacaaaaatacaaactacccttagtttcacataccacgttgatacagtaaggaatagctgaaattcttgtgtaatgtctgtattaaaatattcttcatttatgctttattgcacttaaacgtgattaaaatgctagtgtattgaaaatgattgctctttgttacctgcaaacttatgtgttcctactttctttttctccaacagatataagcttacc

SEQ ID NO: 127134 - DNA, 1021 bp, Homo sapiens
atcatagcctcttagagttgaaagggacctgaagcaaattgcctttaatagcaaccctgagtggaggtcacctagactcatcttgaatactttcagtgatggggcactcacatatttataaacatcaaagcccatttgattattggatgactcagaacttttccttgtactgtaaaaatctgcctccctttggtttccacttattcctattctatattgagggtacaccaagcagccctccttcctcttgcaaattcttaggacagctcactcattcatggccacctctaaccaactacctgctttttcctccaggtagaatatcttacatttccttaagtcttctgtgcatgacatgatttctacacccattatcacccatattgctgccttggatgttccttagtttatgggcctacactacttgttattttcttctactccctagccaatctctgagtaaaagtagttgccaaaactctgagtagagtgtgacttagtaaaatttaaaataagaatatatttacattaaacaattattgctcttttatgttttctgtttttctgttaaacatttttagagcatatttgtaaaaatatgtcattagtccagtattcttcattaaactaactgtaatagcacttggtgggagttttgaatcagtagagattcccagcctccagtctatatattcacctggccgcaccaccagaaatccaaaatcttgagtattagcaggaggtatctgtatttttcacaaagcccccagcatattctgaggatggagattgatggcattctcccgtctccttccagggacactgcttggaaagctgaaccttcgagcagccacttgcagctgcatggtgtgccatcacagctgttcaggtggaagcttttcaggaatcagtggtttccctggctctaccttggaatcatcgaaaaacttaaaagttactgaggcctgtccccacaaccggaactttcttggtctggggtccgcatgggcaactcagttgt

SEQ ID NO: 127135 - DNA, 1017 bp, Homo sapiens
taaaagagctataactcctctgaaaaatgcccttcacttatgtctggagagcaaaagacaatatagaccagaaaccaaaaaaaataccagcgactgaagatacggaaatcggattccttattttctactctctgacttttgcaattttaccaaagtattttatttatttattcctctcagaacttctgaattacttttggtagaataaccagtttctatgtcatttgcttagaagatgtggcttattaagggagaacggaggcactggaggccttgagtcattcagcaagtgtttactgagcacctagactgggaaatggaagtgtgattacacttacacaatgggggtgtacgactctacaactcaagtataaatgtagttcagctgatctttccaaataagatagaggatttcaactctgttttgcatttagattgcccctattttcgccactgtgaccattgcaactaagaaacaccagagctgcctccaccctgcttactaacctgtctgtgcctggttgagcttgtgcctctccaggtcatgagccctttgaaggggattaaccttccaaacagccactgattccattgtgattgcccaaagcaaggcacagggacaacacacatctgtcaaatacctggcaggtgtctcttccaatttcagtgatcaaacaagcactgaactaagtatagtaaggcaggattagtccatttctgcccctttctaagtatcaccctagagagctaattccctctgagccattagctttttcatttaaaaacaaaagcattgctggctgcagtaatcatacctgtaatccaagcacattgggaggccgaggcaggaggatcacttgtgcccaggcgttcaagaccagccggggcaaaatggcaaaatcccatctttacaaaaaatataaaaattagctgggcatggtagtgtgtgcctgtggtcccagctactcaggaggctgaagtgggaagatcacttgaattcgggaagtcaaggctaca

SEQ ID NO: 127136 - DNA, 1083 bp, Homo sapiens
gttttcaattcccaattttacccctcaaaatgtggatgacaaagttctgttgacactttgaagaagtctctcctaccatgggatcttagtggttggtggagattgttggttcaaatgggagagaacttttataattacaggaaggtttgaacagttgttatatttaatactttgaggggagagagagaaaagcaaatagcatcatatttgctaattatcaggtgatgacagcagtacactaggatttatttgtccaattataagctatcaacttgaaattaaggtctttgagaggctttatccatattttgaggggcgaaatagggaattggaagcagcatggacttggaagttagatctatgttgaaatctagtctctgccatttacaattgtgcatttttggtgacttcttttgctactcatatgggggagggtggctgttaggaggattggatcctataacctgtcagcttggtattgagcttagaatagcatgagtaatcaataaatagaggtgatattactgcttcaatgatattgttgcttacagtatttttgagaatttgctatggaattgactttagtattattttgagatgtctttacaggcattcagcattctatatttttgatccaaaatggtattactgagttgaacagcttttctcgtggcctaaaataattttggctgtttcttacaaattaaatccaccctcagagaggaattttgctactcaggagaatagagaatgtactataagatctttgggcagtcacaaaacacaagttccagaaatgtgtggagcagtggcagtgctattgccataaatgcatagactgtaaagtagaaaacacttcctaggatatagaagttttgtcacttaaaaaaaatacaaagccatctttactttgagaccttgaggctttgccacttgttgccttagtcattactgtggtcctgggtttagctgcatgtgccctttggtttcggcagagaagctttaaaaccaggatctatgactgaggaacattttgtcaacaggattgaaaagttaacggattaaaatctgttaacttttaaa

SEQ ID NO: 127137 - DNA, 1055 bp, Homo sapiens
aaattttctagcttttaacctgagccaatcacgtcaaaaatgatttgttagataccaaagtacttgttcctactattatttttgtatatgaagaactggctttggatttaactgaaaacttaggaaaacaatctaatcgctgttgtctatatcattgatttaattcatcaaagttactcaaatgattgatatttttacttgctaattattttaggagtgattttgtgaaatttatttttaatacagtcctagaattgaattgaaatatggtttggaagtttgagggttttttactgtgtctatccttgtgtgtctgtttcctttaaagattcatgatacaatcactgtgtacaatgtgtcctttaatattggttcctgtaataatgtgccttcaaattatttcttgagttttgtgacttaaatatgcagttcactgactcacgccaatgttgtttgctttttaccttaattctttttactgtgctctctcagttttattttttggaagaatggtactcagtgctttgatttgattagtaagatttttgaaacacatgtaatttatttcagaaatgtgattgttttaactctgacttttttagtgcagtcattggagaaatcgatgaagaaacagattctgcgcttgatttggggaatattcgagcagaacctttaaattctgtagcacactgaggaaaaactacatacttggacatctgtaaatctttgtacagaaactgattattctgaggatgatatatggagtttttatgagtgtgtcactggattttgactccttattgattcattgtaatatgtaaattaaaatatttctacattttattgaaaaaaaaacctttttttttgcctaaatataagtttggtagcttggtttcttttttttattaaatagtgtgaaaatataatgggcattttgaaaacttttagaaaaaagtagtactttttgatactttagtatttatggaaactagtggaaaagagaaattagtgtgctatataaatcaggcattcaagtaacagtaatacaggatata

SEQ ID NO: 127138 - DNA, 1033 bp, Homo sapiens
cctgcaacgttaacaatctggttttgaaaataaataaaaacagaaagaggaaatgcacttaaaaattccgcgtcggagctttgcgggtcttgccttccagtcgcccccagaagacaaccaattcctgcgcattccgctccgctcaccctccttcccagcttctctcgctctctttccccccattttcccacgctcgccttgaaccgggactcgagaggcagaagcaaggcacgggtcccctttctcctctcctccaccaaaccaccgcagcccagcacgtgaagcttccctttgttcatccgaggctcgcttttctccccagcagatccacctggatgctctccctcggtgacattttgcgccggggttggtgggtggctggggtggagcgagaggagcccgagggggcgggggcggagaaaggtcaagccgagggaaaggcaggagacgcctttcctaacctgcgtggcggggcgtgcgcgcggttatttatttattttctccttatttattgatcgcactagcagagcagcgcggggagcccggggagatgcaggaccacccactggcggggaagcagctagcagccctcccgcgcccccgcgctgccgagcgccttctgcctccgcgctcggacgagagcccgtgccggccccggccccggccccaccgcgccaacgccgcccgcccggccgccccgcagccccgccgccccgcagccccgcaccgcgctggccaggctcccgcgacagtggccccgcagtaagttggcaggagcgagtcccctccgttctcgcctcccccgcaccttttgaacttgttgctgctgctctgctcgcctgcgcctggcttttggaaggtgaaaaggaggagggaggcacggagggatgggggaagggaaagaagagctcgcttgagctttatttatgctctctcggcgcatcggattcggctgctcgcgagctgctttctctcctcttccctttccgggtgcacggcgaggagaaagtctctatgcaactaagccccggcg

SEQ ID NO: 127139 - DNA, 1039 bp, Homo sapiens
ggcttctttaaatgacattgtggttaaagtcaacttaattttattagacatattgtgttgtacagaatttctcatgtcatgtggccagctaatggaatagtttatatatgaagaattttaggctaggttaaacaagaaattggggtaaagaaaaatacaatgatttatgatttttatttagtctcatttttttaaagacctactggtacatttaaaaaatgaattagtgaaaatccatgttctacttcttatatttcctttttatcttgttggcaaatttgtgacagtttataaggataaggatgatgcagaatgccttcgcagtgtaggtgctgattctttatcaaagaggtttgtttttgttgtcttgtcattttgtagcaggagatccttattaaggacaaatgggtagtgcaaatcaccatcatgacgtcaaattagaagtacacttgaataaaaaagattctgttttaataggaagggagaactattaaaatgaaatacactttaaaaatttggtatatatggctgtgtttcttgaggtatcagtgaatcattttaatgctatatagtgtctatatgattgaatataggtataaaaagaatgttgatgagaattctaatttcatatagctaatagttctatactagacttgagaagttagcattattttaaaacttgtttctggaaatgactttccaatttttattttattttgaagcttatttttgtttcaaggaaaatatgagacaacattaaacattagtgacaattttttattatgtaaataaaatacttaaaagcacccatttttgaaaatatttaagaaattgaattatattgcctgagtaaaatctatgcagtggatttagttcacatgtttcataggtaagtaagtggattagaagcattgaatacacacgctttctcagaacttggaagctaagtggaagttactttaaagacttagcttcactgaatttgaacattttaattttcaggaaattaagctaattaatgatcctgatggaatagagc

SEQ ID NO: 127140 - DNA, 1039 bp, Homo sapiens
ttaacgatataaattatatgctgatttcagaacaaatttgggaaagtaaaaatttaatttgtattatatatttatctaaaacaaatacggtggcgttacatctttgctgccagaaaacttagcataattgccatatttcaatttttgtgcgtttggtgaattactattttaaggaacaacaaaaaagcagaaaagttttcacttaaattttcatagcgatgtatcagggaaattccttttttagaatggcatactttgaaataatttatcatatgcatatatatgatcatatctatgatatacgataacattatgttataattatatattattaaagagaaggataaacttttaaatactattctcctgatacctgtcagtattctgattatatagctttgggtaatgatgggagtatatcttgcagaatcatttatgtagagacttaaagtttacccagctgttactgaaatgggtgaaattatcttcccttgtgccaacatctatacataactattgctagtgcattaatataaaactctttaaaaggtaggaagtaccaaaatttatctttctggtgaagtgccataatatgagtaacatctatttttattttgacatactatgacatatttgtgtaaagttctttatagaaaatgttagttgatggaagttgaaaatgaacttttaaagaaatgtagagaaatgtggtatgtattcctcttttagccttacaagtaaccaaatcttatgtgtcttcattttgttttagccatcacttgaattagagacaatatttgatgtggaatttaaaaatatgtatgttaatccagcctgtagtacttcagcatttacttggttgccagacagaggtatttcagaaaaggtttaatatgtgttatttcaacatagtaccctagagaaaacgctatttttaaattttcagtgggtctgttatgctattcttttttatttttaattttcctttagactactgataaactgtcttattttatttttatatttacatcatttactt

SEQ ID NO: 127141 - DNA, 1332 bp, Homo sapiens
tttctctatgaaactccatgtttatgtgtgtatatagagctttttcaaatattgacttctataccgttatcatatttctcttgagcattctctaactgcatttaatacaattgaatattttttttaaaattcaagagaatattattagttcataaatgatattcagtatcaaaattagtgaaacacagatatagtgactatccacagagtattggactatggtctgtcatacagattgtgaacccaagcagctcttctgccctgactctggcaaaagataagatatttattctttgaggaaattaaactgcattttaaattgtaaaaaagaaagattattcaggcctaaatagccttaggtcactctaaggttttgattaatgtaaaagtttattcatacgtttgcttttaaaatttatgctgtgttagattacaagtagattttcatgtctaatataatattttccccaatctacaatttttttccaaactctgatgtcatttttttctatctaatagacacaaacccctttgtttaacttcatttttatgtagagaaaaaaaaaccttcacatcaaataaggggaataataactagtatttttctagtatttatttattttttcagtgaggggaattttcagcataaagtgaaattttttagaaaatagcaaatgagagcttttttgatgctgttttacaaggtggtaaaagtatacaaatttggggacagtgatatacctacctgtgactagcttacaggttttctgaaacttgtacaaaatattttgaacatagtgtattcacagtgttgtgaaaattggttaagaactacagcaagcaagatgcctttctcttcttgaaaataattccaagaactggaagttccatatccatctcatttctgaaatgagaccgtcttctcagtaatagaacagtgttcaacaagtaaagtgtttagatgtgcctgtgtggtcagatgtatgttgtatcacagcatgcattactcatgttgcatattctattcagaaagcatgcctcagccatctgagtggaacatatcaacgtgtaaaattggaattactctttagaactgaagcaagctttaatagttgctgcacaagcttctgagactagacaccgtgaatattctctgggctatttcattaacaaattgtatctctgcagcctgcatttctctacatatttattgaacagataataggaaataactgcttttttgtgaagtcgtaaataatatggcagaaggatattaaacccactgagatgtgacagaagaactaaagcttgtgggttttagaattttatgat

SEQ ID NO: 127142 - DNA, 1021 bp, Homo sapiens
taaaatattcacttataattttgttctattatcatcactacaattcaacagatttgctcagttttcctttcacctattacttctcactcctctccttccctatcatagttttactacatggaagcatcagagcgtttaattttatattttctaagctgcgtttccttcccattaagctagctaatagagatgactctattatctttcttcctgaatgaactctaagtttgctatttggtttttttcttatttcctctaaagccttctaaaataatctcaggcatccctccagaatcattgtggagtaacaagggcatagctatggaggtactttttatttttaatagacaagtagaaaaaattacacattttcaaacaaatatcaagtaaaaaatgggacacataccttgcatttactcttctatcacatatactttctatattagaatagacattcttattaacattaggcacaggctctgggaattgaaatttattcatacagtagataatcttttagacatattggttatgaaaaggaaggagaattggatacagtaacccagaagcaagttctttttctgcttctaaaggcaggtcaaaataaataacactcttgccgatatatctaaaacataccatgtttttacctcttcttcatttaagccattgaaacaacacagtaatttcaaacatttcggaatcatttcaaaaatattgttaagataattagatagccaagaagataagttgtgtcaagaaactaaagatacaatttaatgtaattatggtattttttccattcttaatataaacattttgccatccatttaacatagtagaagccatataatcaatattatattttatgtttttaatctatatattctaattagtatcatgctgcttttaaagccatgcagttttttgttttttgttcttctttaacatgcagagtttagttggttagcattgaatggtagagaacgtatattagtttaggcctatgaaaatgcaaaag

SEQ ID NO: 127143 - DNA, 1082 bp, Homo sapiens
tgattctttgttctttcttaatcattgtgtaagatttcaaaactattattttcttaggttttgatatattacattctgaaagttaatcagtcataatagtataaaacatttgagaatatgtttttccaaacttgtattttaaccatatgttccattcctttttcactctcataattagaaagatagtcatgttgcccagaacttaaattaaaagaaagaaaaagaaaatcattttgaagcaaattaataacttttggttaaaattaattatctttgtgattttaatttgtaacagaaaaggatcaaggtaaaggccctttgcttttcctttcttccttatctcttttttttgaaaaacaaattctttttaattttgatgtttgtacatttttacctaggtagtttttaaaattattttatccttatcctgggatcccagagatgcattttaattacaaaaaaaggaaaaaagacaaagagtgagagagagagaaaagaacttgtgcatgcattatgtttgagggaggtatgagaaaagtaaattttgctggcatataccatattagcagaaacgatgagatgattgattttgtttgtgttagttttcataaccccacaagtaagtgaagaaattaacagtgattataaactaatatctatacttttaatttatcttctagaacaatatatgaaaagttgtcatattaaaggaaaaatgtcatcataatgaattactttgtggctaacttgaaatttcaagtgaaaatctccaaagaactctcaaaaatcaccctgatgtttgctgcatattgtgtcatatcctaagactttaaaataccttcattttatcccattatttctagtcataggctccccactctccttttctgtttctcttttaaaaattttatttgtattttattctcctgttcgactttcaatttattcactccattatcaccacctctttggagaaggggatgttgtaaaagccttcttctacattttcctcttccctagactttcggttggctttaaaaatatcagtatctgttctcccctgcaacctcattcaattgaaa

SEQ ID NO: 127144 - DNA, 1057 bp, Homo sapiens
tatgctatcttgtacaaatctctggatatttcatacaagtaagttatgttttcacaactatatgcaaatattttctttttttactacctacattgcttagcattgcattgtgcacaaaatgcatacattgtaaacttaatattgactctaacagcagaagctgttctgtggcataggtcagatactttaaaatagagagaaagagaaacccttacaggccacaggtggcattcgttgatctttatagtgtgacccttcctattgtgctttattttggattgatattaatggtattttacaaactggaataagtcaggttagcatgttcagtgcttcatataaggaaaaagattgagctctgtatgaagcctaccttttaaatggccatttttggaaagattttgtgctctgtgcacaatttttttcttcattctcttgccaaagaaggcacccttcctctcttcataacaaaacttattctgtatatgtaataaagataatacatgtgaggaaggaaattgttataaatttgcctctctgatggcctttgaccttttcattatagcatgacttggaccaccaccgatatgggttgcaaaatgggtgacatctccaaacatttaagataagactttataatatggtaagatcttatgtgtccttgcaatgtttaatacatgtacaatttgaaaaaatctcatgttacatctattttgtataaatggtaatgtaaatgtagttcctcgttattcccttatcttttccgaaagaggaattaccaactataaattaagaaggtagactgtaagaacttcttttgataataaaaaatacttaatatgggaaaagtttctgcatcaaaaagcttttgagcaggggatctgatatagttgggctctgtgtccccacccaaatttcattttgaattgtaatccccataatccccatgtcgaaggagggaccagaagggaggtgattggatcatgggggtggttccctgatgctgttctcgtgatagtgagtgagttctcatgagatctgagggttttataaggca

SEQ ID NO: 127145 - DNA, 1076 bp, Homo sapiens
ccataagagaaaggtcactcagttattctgaacgcttggccttcaaagccaataacttatgtagataaacagaaacaaaaataaaaccatatacagtttcaaaggacatgatgttttcatttgcagactcattaatgctttataaatagccaaactatgaatgtctagttcaagacaacattaaaggttttgaggaaagaaaaatgttcttgatatacagagttttctctgccatataccggtatttttgtaggatcctccttcactgtacaactgtagctcagttggcttatgcattggtttccagccgttcttcattgagctcttttcattccagcccatagttattttcaggctcaactggaaatgagtgcagtgatcacctgatgatactaattccatctagacttctttgtattctgagactgaacacacattatttttggcttgacacttttttgtattgatcctaagaattctgtgcaaggctcaccttttctgtctagcctcaggagtctgtcaggatgatacagccattgaaatgcaggtttgatgatagggcagacaaaagtcagaagcatttgtatagtgcattatttacctcaggagtcattgtacttggatttcaacttgaaagaacacactagaatatttcaggatatggaaacattttgctataataaaaatcatatttatttttatttttctcccacaccattttatgaggttcactcttaagtggtctgctttatataattatgtaggagtgatgcatcccaggttaatcatttatcttgcccatgcatttctcctctctgcccttcttgcctcttccccctcaatggtgcttcggagcacaggattatcttggaactcaacagacattttttttgtctgtctgacaaccacaggtgtccatgaacaggccccaaaaaggacccaacaacaaagagtaaatacaattacaaatattctttggtactcaattagcaatgcttcttaaaaagccaaaagaattagaattatgacatccctttcttttatatttagaaaaccagaaatatttgtgagatcca

SEQ ID NO: 127146 - DNA, 1048 bp, Homo sapiens
ttcaatgtaaaaatcttgagtgttttaataatttatctctatacatttcatgtttttagatgctaccataagtggtgttttttaatttaaattttcagttgtccactatccttaaagatcatttatatagaccccatgaggaaatgtcattttttttttcatttttactttgtttgatacctggtcactagttcaacctattcttttgtcatgactttttttctagaactttacttcagatccagattttggtggcctcaatacatttcagttcacatttaacaatgatacaaaagtttaaaagaagaaatatttcctttataactatagttttctatcaaattaggaaaattaattggaaaatagataatgagagcctgatatcagggcactcagatctacgctttgagtgactatgtgtatatgtgggggaaatataaggaaatacataatttaaaaactttgtaagaagaggaaggatgagtaccaatatgcagaaagtatatgaaaatatactagaaagaacataacaactaatatttgttttttactccaaaactttcacagtacattcttgagcatcatgtaatctgtcagctatgttacttattattttacagatgaagaaattgggtattggaaatatagtacattttttaatattatggaaatagtaatcagtgcctaggccttgtgagtcttagctcttttgactagatgggtttcctctcagtttacctagataggacttttgcaactcatgtacctaattgcatctttcaagatgtatatgtggatgtatttatccctggctaagcaccatctagcaaccagatggtcagataggtaagctttcattaatatatattcacttcaaacaatattgtactaccttttattttttacttttgttccatctgctccaaaagtatcttaaaaagaaggcttccctagcattgttcaattttctcataaacaataaagggactgatttataatagcttaattggattatagctaaactttataactgagtcactgagaagtt

SEQ ID NO: 127147 - DNA, 1021 bp, Homo sapiens
tgtgtgtccagcatgataatttttgttaagaacattggttgtgaatgcctttaaatgaggcatgctctgcctagttttacggcagtcttcactgaaacagattatcttaagtttgtgaatttgagattgcaactcctgatataaaataacttttctttaattgaggaagaaaactagaagtagagactttacagaattctataaaatacaaaatggcatgcaaaagtaagtggtgacctaaaagtcaacagactgaaaaaaaaaggaaaataacaaattatatttgaagcaatatataaataaagtattgaacatcatgatttatgtagttagaaattatttgctgggtgcatttaacataacacataaaatgatatttacagacacccatctaagaagtcacacaaaaacattttccagaacataaaatggttttgtgattaggtccaacagcatgtgaaatgtaagccatcaaagccctttgtacaaaggtggccagtgtggttggcatggtgtggccatcatttccagcccttgctttaaagcaaacaggaaggaacaattagtttcaagctatttggactttaaactattaataaaagtaaattaaatttaaagaagaaatttaagatctacatatgttctcataatcactaatggctacttcactttacttcgttctaggagatagagtgcaagagtttgcatgcaggtatgtgcttgaatttgtctgtgtatgtttgtcttactcattccatcactttcaagtgtttctgggctggtgccttctagtcatgaacaacctaagaaatggagtggtgtcgactttgatagagaacctggggtgtgttctccactaatcaggatgagctgtgctactcaacttgcatttgtggcacttgctttcccactctgtccctcaaggcaaagttactgtgacagaataaagagtgagatagaagaataaattctggctttgaaatattagatatggtttcctccccttttctggtttcaaacc

SEQ ID NO: 127148 - DNA, 1078 bp, Homo sapiens
attaatgctgttatcatgggagtgggctagttatcttgggagtgggcccctcagaaaaagagagctctcatgcgcttgcttcttcctctcaccttccaccacaggatgacccttgacagatgctggcaccatgctcttggatctctcagcttccataactgtgagcctaataagtgtttgtactttgtaaattacctagtctgtggcattctgttatagcagcaaaaaaaacaggctaaaacaacactttaagaattttttttctaataataattgttgctagcactatgttctgaaaacaataataaattgcttatgattaattgcgtcacttattactcatgaccctactattgaccctgactactcatgacccttattattatcttcatagtgcaggtgagaaaaccaaggcttggcaaggtgaggggacttgagaaacttcacaaaatttctaaaaggtattgttgggaatcaaacccagggaagcctgacatgaaagcataggttcttaatcaatgtcctatagggcttttccagataaaggttttatgctttatcgattatggactgaacttcaaaaacactcaattagcctttcttcctgacactatcagagtctttaaaaataatgtgttatttgtaccagatcgtgaaaggtatatggctttcaacaaagggaatgttgaagaaagaaacacacaaaaagggaaacatggtgatttagagtttgtacatatcaagtttgagatgccagaatgacatccaggaagaaaagctcaataggcaactgaatgggaatctgggtccctcatcaatttaaaaggtcagagctagacatatagatctgtgagttgtttgcatggaagtgataggtaaaacaatagaaatatctgaaatagtctgcaaagagaaatcagaagctaaaaaacaaggctggtgaaggattcctgaaaatatctgcatttggagaaagatggaaataaagaactcagcaatggtgactgggatgattcatcgaagtgagaggaggaaaatcagaaacatgaagcgtcaaagtaaccaagagtaggaacag

SEQ ID NO: 127149 - DNA, 1037 bp, Homo sapiens
tcttattaaaacatcttctaatttgtttaaaaatctctaacagcttatctagcaggatgaaaccatctccctttaatttaattattttctcattcactcacctaacctatattaggcaccactactgagcctggtacttttctgtgtgatggggagataggccatgttctgtgccctctactgggatgagatggagggacagaaacaagaacaataggataactgctttatgaggtatttgcaaagagcattaagagggaaaagatctgtaggtaaggcgggagttgggagagaatctttacactggacttgatgttcaagctgggcttgaaggaaaagtagatgttgctcagcacatgagaacaggaaagctggggcaggatggtattccaggcagaaggcactgcaggagtgaagatgtataggcactgggaggtgtgcatggtgcattttggagatgtgcaagcagttttgttgttttccatatatagaatgtgtctaggaaagagctggcaggaagcacggtttaagaaaaagtttaaggggtagctgaagagggcctggtgtgccctgctcaagagtttaaactttgttctctcagaggcagttgagggaagacgaaataaatggtagttgaagaagaaccataaagggtagctataagcagaagaacttgatctatgttctataaaagtaaccgaagggtgaattggaggtgaaatctgtgagctgaagagttctattataaagtaattatagttggatagcaaaagaggatgaaggcctgaactagccagttgtggcagaaaagggggaggaattcacccgacgccttgccagaacaatttgaaggacttgagactaattagatatagagctgaggaaaagggagaggttcagcttccctgccaagtctctagtttacatgattgaaggattgattataccatttacaggaaaaacagtgggagggacatacaggttttggaggaatggaggtaagtttagtgttagagatgttgaaattgaccgtgata

SEQ ID NO: 127150 - DNA, 1068 bp, Homo sapiens
cccgccccgccgccccagtcccttgcattcacacccgagctgcgggacggggtagaggggtgcggagttggagtgcccaggaactgtcctaactagaagggcgctcattctctcgggcttgccggtggcgcctctgacgtgtccggggtagggggcagtgtggtttctcaccttcaggacagtgccgagcacagctgtcctcgaggaggggcgtggagtgagggaggttttcaagagcgtctcatcagaatgcacagggctccgccgcgtgtcccctgagaacgcgagtttactgtgcgacttcattcatccggatagttgctcttttcttttcccagcaggtgttatctgaagccggtttggaacttttgggagtttagttaccattatgattttaacaaatgatttttgatgaggcgatgtctcgaatgcactgggcctcgggaccctctggaccctgctgagggcgggtggaggagggacgggcaggctgtgggaagcgtgatggtgagatgtcccgtgttctctctcccccgccccctgcagatcgctgccgttttgcccttgggagtaggatgtggtgaaaggatggggcttctcccttacggggctcacaatggccagagaagattccgtgaagtgtctgcgctgcctgctctacgccctcaatctgctcttttgggtaagtaagtttcactgcaccaacaggtgggaacggctggctctggttttctgcagccaccggataatgcgccaaagggcatggctaagcattaattaattacatgggataacaccctttatttttcagagaagtaaaatttgaccttcttaaaatgcctttgatctagctcaagttccatttgtaattagaacaaagaaatccacccctggatactactggcagtaaaattagacttgaagttaatctagggatataaataaatgcacgtgcttctactcatagataagaaaattatgacatactacttagggaactgcttgtttgcgggaattttagataattgtgcaagccataaattgtttctttacatctctgtcgcctgt

SEQ ID NO: 127151 - DNA, 1067 bp, Homo sapiens
tctcgctctgttgtccaagctggagtgcagtggcccaatctcggctcactgcaacctctggctcccggttcaagcacttcttgtgcctcaacctcctgagtagctgggattacaggcgcccactaccatgcccggctaatttttgtatttttagtagagatgaggttttgtcatgttggccaggctggtcccaaactcctgacctcaagtcatccgtcctccttggcctccaaaagggattacaggcgtgagccactgcccctggcctctaacaggttttttattactaaggtaggatgactgtgataacaagatatgataatgaaaatgcagttgtatgtcctgcatatgaatattttaaaatgattaatttatttttgaaatgaaaatgttttcattcaggactactataaagctttggaagatgcagatgagaaggttcagttggcaaaccagatatatgacttggtaagtaaaagtaatgtgcatactgtgccataagtacttgaataacagattatatcttaaattgtattggcttaaatgtagtaggaagaagcaactaaaactgaagtattgctctcttgatcacatctaatttgacatttcagtgtccattttatggtttctttgtggaaaagtcagagtggttagttaatgtggtgagaactgtacattttagcaagtctatacggcggtaaggtggtttctgatgttagatattttttaaacaagaattaatgtttaactttattttactaatccttgtcttcttaaggtagtgtgtttacttgccttatacatcattttgagattgtttctgtggtaaaatacacctaagaagactgctttgacaagagttcttggtagtctgattaaaatgaagaagaatcatttgaatcagtgtttatgtgagtgatgttaaaagatcgtatgtaacagctgtgtcagttgtttaagcaatacaagatgacaaactttaaacaagattctttttttgcagcagcacttctaaaagattgaaaacaccaagaagatagatagaatattcactatttctcatattg

SEQ ID NO: 127152 - DNA, 1041 bp, Homo sapiens
ctgtaaccgttcagaatcatgtaggttgagggaatgcacatgatggatttcaggcaagttcacagctcttattatggctgtttaatattgtttaaatatcctagtgctttatagcttaagttaattcttgtggtcaatgggactttccaacttctaatttgatttagtacagcagtagtaaatagaagaaaaataatgctcattgcctaataattgcttataatattaatcaggtcataatctcttttacatatgaggaagtaagaatgattggaagccgtcttataaagatgcctaccacaagtggttaaggcttttctgtctttgtttattttaactatgaatttggtttttagagttattaaccctttaggttctagtgccttttctgagctatctagtattgaaagtcttgtcattatttttaacattttcatatgtagtgaactttatcaataatatatttaataaaatgaaacaatccttaaatgcagaggtgaagtgagttagggcaaggtgtatggtatgaaaaagaaaggtctttatctcaccctaacactaccccctcaacctaacattcttgctcactgtgctttatatacatattacacgctacatcatactttgtttttctctaagcatactgtttgtctttctgtctctacattttttattgtgattccttttttccttctatttgaatacaatccatcttcaccgtcttaattcgtacctccttcgtgtctaccagtgttacttttttatgtacaacttctgactctttttgaactgttgcttatttgtgacatctagactatatttttatcccttattatattaaaaatcatatataaatcttgatttgtcagctaaattctaattcctatgaaggcaatgattctcttccattcttcatatatcctccatttaatccagcaccaagcacgtaatagctcaatatttattattagtataattgtaggtacaaaaagcaatggagtgttttcgttgcattagtggtcttggaacttaaatatgaat

SEQ ID NO: 127153 - DNA, 1074 bp, Homo sapiens
aacatcttctatccacacacaaacagtataatttcttcagttaaaatactgagagaataaatgagattcatgttaatgtctccttattgctataagaggtgtcttttaaaaatgactaatgttcacccaccattattgagtcctgtaactaagttccatattcaaggatcttatcctgagtatggcaggcctcctggcataagggatctttcctgttatttcttgcttaggaaacagattatcttccttgtatgtcaatatatattccccaaatcatcaaaaggtgaatataaaccttttcaacattagaatcccaagaaatccacatgattgatgggttgatcagataaaggaaaatatgtcgatcaggtaagggaaactctcaggtccaaggttctagggattccactgcaagagtcaactttactagcgctgcacagggatgggcacctctctggttgcaatgccattgtatattgctgaggcatcttgcccaaggctggatggagtggttacttgcaagtgtggacatcagtcatgctttcacacctcctgcaacggacatagcagcaccagatgaacttacactcacacctctccacgtgcctgaccacatgggtgttgtaacctcggccacagcagaggaggttgcagccatctgcaccctctgatgtacggttgcattctctgccttgtgtccctgggattcccagtttcttatcttctacacagtagttgggagacttattaacatagagcagatcatccttatggattggtattttcctctgatctttttctctcctgcgcattttcctctttgttttgtctgatatctggatactgttttcatatttatccttcaacaaatggccaatcttttcaaaagaagacatggttttccagcatgttttcacagcacaggagccggaaactccgtggcagcggcagtctactgacatcaacttggcgacagcctgaaaccaacagtaattgtgttcaactatcaatcataaagtgttttactcaacaacagaagcacagttaatctaatcaattaactttctgggtcta

SEQ ID NO: 127154 - DNA, 1606 bp, Homo sapiens
tagtaaaatttaaattaatttcaaaaaggagacatcttagccaactttctttaagaaaggcttgtcttgaggagtatttgaggtttctgaagataggattcaaatttttcttccctcaaatcacctaaggtaatcagtgttccagatcacttcctgcctctaaatagtgagtcgaatttctcaatctttgatgacctttgggaggtgatgcaaaaaggatgagcaactcactaaattgcctagaaataagtattttgatgagacgcttttctgtttctactacgtatttaaacttagtacaaataaacttagtacaaatatttaaactaagtacaaatatcatattagtactaacagtcctggagaaaattaaaatgtgttttaaaatacttactgtgcatatcacatagttttaaagctgccaaaacataaggtcacagcatctaatgtgtaaaattaaaattttgttgttatttttaatataattatcatagtctcttaaaatagaaaacaaaatgactatcatccgaattgtgaataaagaaataatgcagttgtttatactaaaaagaattaacatgttgttaatgttgtgtaaagtaccattatcaggaaaatgccttaattattcaacttcctaatccagatgttacagataatatcatttaatatgtttttcttgactttgtttcaggatgaatcattgcctcttaccattgcctttattaggcagttccaaatttacaaagaatttgaactcctaaattgaaaaataatccactggagcacctcccttcgccctttaacattatgcaaggtatttaaacaaatcaaagcactttgaacccacattcataatccacagtgcttagggcttgctttgtctgttgtgagctccatgtaatatcaaaagctgtttcctaaacagctcactagaactaaggcatataatgtctttgctgcccagcgtccaggtactccttaccagtaacataacaccctggttttcctttagggaaaccacccccgtctctgttctcacgctgtgtaattttagttccagggaatcccacttccacttccagggtcatgatggccttaagatggttcaatgtacctatggctcacccaaaactcccaatggtcatggtgattttttcagagagaggcacatttaatcaattagaaccactgagactcagaagacctttgctgaatcctctgagaaagaaaaggttttctttccatctgtgtgagcaaaccaggagagaacctctctttcttgaggatgggacccctctttccttagaatgagtggcaggtaggagaatgtgaggtctggaagcatggcagccatgttgctaagaaaagtagagatcccagagatgctaggggtgggagactttgaaagaggttaggacacagcactgcatgaaccctgaagtagaagacttggccagtagccagcctaaagtaatagagagacctgagcccagggaacatggtgtgagcttgtggatcaagcttcccctgaaccagtcacaagtttgaagtttttagttactgagtcaacatatttaatgtttaaatcagtctgggttgagtt

SEQ ID NO: 127155 - DNA, 2459 bp, Homo sapiens
aatgtattctttcagctgttatttgaaggtctgccatgtatgtgatacagcctgagggtcactcatttaatatcttgaccagtaatttaaatgaacttattgttgacatgagtattactgaaatgagaagtgtgtaaaatgttacggcaaatcagcagtttacaacggttttttaaactgtatattattactgtgttccaatagcacataaagaacaataaggatacaaacaaatatgaaggatggcctgaagttgtagaaatggaaggatgcatcccccagaagcaagactaatggaaatgtggagagaattgaagaaagcgcactttcactcttaatgggagagctataaatggcagagctatgtgtaaatattttaagagcatgcagccatcttggtgtgtgcatgagtattgtctcttttgatatcaggattatttattgctaacgtaaatagatagcattgtaaataatcatcacaatgatcaaatcactgaaccatgtctccgcacatttccctaaaagtacaatgtttagactgctatggtaatacatattttaaattctaaaagcatacacaatgtgtaactgaatggtttgtgaaaaatatattgatatatatactagttgctatgaaaatatcatggaataatagggattttagggtggatactttattttcttttatgtttctatatgttgcgttgtgatgacattatcttttaaattaaaaagagatttggctagttgtgtgtgtaatgttactttacagtccgactctcctgatgtacctcttttcatgatctttttctttccttcccaagaaactgaggaatgtttaatatgaaaacatacatcggatatgtgaaaagcacaacaaaattcttaatgtacacagtaaaaaagtaaatatataaatgtagatggcatttaggaccacagcttgctggatttgtgttagctatgggaataacttgattttgtataagctatttagagtgaggctggaggtggcagcttcacagaactggagaaccaggccaagtcccctccccaacctaattaggtcattcaggacagctaagtcagtatatttagagcaatactagcatacgtttttcttaattgttatcagcattgaccaagtggtttggaaggaggcatgctttaatatcacaataattttgatttgtaaaccaagaaattaatcctgtgtttatctaacttcataatagcaattattgcccgaagctatagtggcatatttacaaaagttcttattactgggcggactgataacatttaaaaaataattgtgtttgaccccaaatgactttatacccaattctacataaaaatatagaagatctatctttttttgttaccttcagatgttcactaaataactcagtttttaagcagaagttttcagggcattaaatatatgttgtgtatgaagtatctcaaactggaacataaatttagtgatcaaactgccattcacagtgtaaggcagcacttaaatttcgaacctaaagtttagatgcattgtataaaaaaacctaaaagcagtatctgttatttagctgtaaaccaagttggaagctattcggataatttcttaaatattgatgaactttggagtactgtttcttccttcaaactgaatgtaattaattcatgaataaatgcaccttatatgtttaaacaatctttgtatacttttgggatttttggtgcttatatgctaaatcacattcagcatgtgtattttgacatttaaaatacttccctcaattctgtaaattaaaagaatagttattttacagttccagggattgtgaaataaatgttgcagttttttaaaataatgaaaataaatactcttggttttgctttgtgaatttttttttttttttgtattatctggcaaagtaatatacctacagaacttcacaaaaactcacacaaggtttttcaagcatttattatactgcctaacttggaaaaaaaattgttgctgtggttaaaaatagtaatatcctagatgtgtcttaacatgtaagaagctaagtatctagatggcggaaaaagcccttttattaagactgtaaaaggatagcttttccagatatataaaatgttaaaagaagacaaagattggttatgttaactggtgtggtttccttttgtctcagttcaatcttgtatagattgtgccaacttaactttgaaagcaataactttatactacattttcagatacctctttaaaatcggttttagacatgaaacagtgctcatttaatattaagaatgttctttattaaaatcaaattaacattgacatagtatttgaaatggtgcttatgggcttatcgatgcatattttttatttgtaatccgatgctgtcccagaataagtgtattgtaatgtgaatgttaaaattgaacaagag

SEQ ID NO: 127156 - DNA, 1042 bp, Homo sapiens
tcacacttagtagcaaaagctgtttctgtggcttttaataattttatgagtttcatctcattctgagcactacaggtcttcctggttagtagtattaaaaattttgtcattagtaatgtggtttgctttgtatttttgcacacttcctttcttaagtttgagtccatcataaaacatccctatgatagcactaatttagaaactatgctccatttttttctggaagtgttagcaattatatagtgaaaattatagagtttttctgtttgtttgtaaagagtcgtattccctcataaaaatttctaatccgaactttgtataatatgttctctttaaagtctaggctgggtcgtcatttatgccttatatagttagcatttcttactcttcaacgccctgaggtaatatggcgattttcttccagactttctccttcccagcttgttcttccctattaatcagaattgagccattaatattgtccgtcttgctttctgtgcttccagaaaggcagcattggcttggtttgatggtgcaactgtaggactatccgatgtgcctcctttcccagcaaggattgaggcagaacccacagattcctgtgtccagttcccacttcctccctttctagtttagattgcctctgggcagcattagattgtcttctagcaaaacctgataccgttctctgtctatcctggtttatcacaggataattttctgttcattttgaagaaaattattcactaaaataatatatttgacataaatttttaactcagctagttaagaccattagtaaggattaaaatatatgtaacaaactcagagtgccctatgtggaataaaaagcttgtatctccaacctttatgctatataaaaatatatttgctgccctggcttttttaaaaaaggggcattttgacatttcctgtatattcaattaaatactggctatgttacatgattttaaacttttgaaatataaagattttttttacttagttacacagaagatatctaaaaataataataaaataa

SEQ ID NO: 127157 - DNA, 1029 bp, Homo sapiens
tgagattggatttttttcacaagtggtttttttttcttttgcctttttatgtaaattgtcttttgaccattcgagttggcctatcttgacttgtaagaccccttcacgttttaaggatattaaccatttctaatgtaaaaagaaatgtatttattgtacattatttgcttttaattttgttagtgtagggtgctttttgaattttagaattttagactaatgcctatatagtctatgtatttttctatcactctccttgtatacttgagaagtatttttccacctccaggttagatatttagtagattttctcttccagtgatttcactgttgtcatgtatttttaaaaacccatttgtaatttccccatgacacacaatgcctatgttcttatgtagatttggctttatctctggaatttctgttctgttccattcacttgacctgtttatctctgttccaaaaagacactatttcaattattttaaaattgttttataaaagtaattgtacttcatgcctctctggttgagattaaatcccctttaatgttcttctttctagaaaaaaataattttttctctgacttttcttcagatgacttatcaaggataaaaaacatcctttatagattttaattgacagagctttaatactacaagatttatagattttatagattttaattgacagagccttaatactacaagatttatacagaaatttgtatttttatgtattgatttttataaatgtattattttatagctacattatcacagatttacatgaaaacagtgatactttataaatggttgtaagctgaagtaatttcattgacattgtgcgttttatctggttcaactaagaatatattaaatccataaattgaaggttaacataaaactcgcctattcaagcattttcatctacctaaatagaatgaaacaggatgtaattaggctctcatcaaaaaacaggtaacttgctatttgcttttgctgagagaataggctattacgtgtaaaa

SEQ ID NO: 127158 - DNA, 1515 bp, Homo sapiens
gatgtgagtcactgtgctcagcccatacaattttacatacacttaaggagtccacacacctcccatgcctccttaagcttatgcatggaccccagaataaggttttcaggatcccaattattcaaatctgagagatctctgaatttcttacttcgtaagtcatgctttactttgctatgatttttttcacttagccccaggaatatcaatacgaaagacacaggataaatcaggaatgggaaattgtaagttgatagtgggattatgttaagggacaaatttaacagtttttaaactctttatgagatttgtctgtcttttggattactttacattggaaattattgctttacagatacttcatgttttataatactactttcagagattatcgtgatgcttattcagtcattttttaaaaccctaaaccctttctttttcttcagatgtggcaccatttattgagtttctgaaggccatacaagatggaacaatagttttaatgggaacatacgatgatggagcaaccaagtatgtaaactttacagaactttttggaactataatttgtaattataaaagcaatacattttcattaaaaaaaaatctgtaacatagagcaaagtaatcaaactaccaggtaaacacaactaacaatttttgtttttactttgcctccttcctggttttatatgtaaatgtttatcacacatatattgtcatgaaattagaatcacatcatatgtaacattttttatacttttatgttttgttttttaacattctgaaattgtttttcctagcattaatattcttcaatagcatttttatggttcatcagcagttatgggctcacctttaaagtttccctattattatgtcattagggtaaatttcaagaaatggagttaattgtcaaagatacaggtgtgctatattttaaataattttaatatatagtagttttataactttttcttaaaatagtatatgttgtaaaaatttggaaaattatagaaaagcgcaaagagaccaagttccagtccatctcactacccagtgtaaacattgatgatattttagtttctattccagatgacttaagacacattttttggcattaaatatttagaatgctagtatttatagcatatctcttcacttacgtggtgaatatttccccttattattaaatattctttataaaaaattgtttatgcctgcctagtctggtttttaaaatgtcatgatttataacctgtttaatgggttgcctattgctggacccagactagttccaatttgcatacttagcacaatagactatcttagaaatgtttgaacagtccatgtctatgtctttaagatagacttcttttttttaaagtggaaatgattaattaaaggatgtgcatgtttttaaaaatggattttaaaaatttttttaccaattttatatttttctcagaagttccatggcaccaattgttaatttttttaagtttcaattttaag

SEQ ID NO: 127159 - DNA, 1407 bp, Homo sapiens
aacttctatttatccttcggcttaaaagattaatgagaaagttctattaagaaattaccctttaaaaatatatttcaggtgcatatgattcagattttaagttctcaaagtaattctttgagatgaattcacatctctctaatgctaatgaattcacatcttctctgctaatgaattcacatcaatcattggatgagattattggtcttacagtgtatgatatatttcagatgcataatttgatatgaatttaatctcttttaggaaaaacaggagaagtattagacactaaatattttgacatgtggggaggaggtaagcataaataacatgactgtgttcttttgctggcactgacttaatcacctcaatacaatgtagcccattaatgagagaatgatgatgctatttgcgttagttcattttgtttcccttactttctgttcactaaatgtccagctgtatttaagttatcattcatgttttatatactttcttcttcttagaaaaaaatttttgtggtgtataattgaagatagtaatatcaaaattgagatttttttaaaaaaagtcatcttgttttctacaggacaaccaattcaaaagttttgggctcctttaagtgtgtctaaaatttaaaaaaaaaaagtaatttgaagaccagaataaccaatgtaagcattcctaagtgataggaattgatttttttttaaatgtgattttttagtctcaaaaataaatcattaggagcattaggagcattagaaagacaagataaactatcagttttagaacagcagtcctattattcatcacagttctaccctctgacttgcagctaattttttaggtagatgaatatttgagggaagaaatagaattttctttcttgtaaagcaatccacagatattttccccttccatatttggaagtcccacaaggagtgggaagaagttaccagcacgcagaggcaagggactggcaccccaaagaagaacgctgcccggaagaatgggtttttttcctccagtttgaagggaggccaacactggtttatcttttgattctttaatttgggagattgatcagtatgaggatctcccctgcacctccccattccatttatatattccctagaagccaacagctattaggcttcctgaaattcatgttaagagttctcagataatttagcttttccaacatatcttcagcttgtaataagatggtatgtagccggacgtggtggctcacgcctgtaatcccagcacttcgggaggccgaggcaggcagatcacgacgtcaggagatggagaccatcctggctaacacagcgaaaccccgtctctactaaaaatacaaaaattagccgggcatggtggcatgcacctttagttccagctact

SEQ ID NO: 127160 - DNA, 1063 bp, Homo sapiens
ttaaatctcagtggattttttatttgttagagattttctgtttgaatttcagtttttaaaaattgataagctgctgccctcttgtgggaagcctatgtcattgtgcttctttgttacctttatttctttgctttatgatagatttcagtctgtaaaatgccacatcatactccttgatgatctttacttggaaaagtcactctggcacttaacccgttaatcacagcagttacttcttaatgatggagtttacttattgaatgtatttctgaaagaaacagaacagtacattttgaaacttccttctctttgatgcagctgagccaatggttaagtagtaaagcatagaaccttttaaatgtatatgctccaagctagtacttttaaacagctttgagatataattcacatgccgtccattttgctcatttatattatacagtcagtggtttattatattcacagatatatgcaatctctgccacagtcaattttagaaaatttttatacctcaaaaagaaaccctgtaccccttagctaatatccttctatgcctttcttgtcctgccccacttccccacccccaaaccctaagttaaccattagtttcctttctgtctttatagatttgcctattttggacagttcatataagtggtatataatatttggtcttttgtgattggcttcttaccataatgttttcaggcttcctccatgttatatcatgtatcagaacttcattccttttatgtctgaacgatattccattgtatggatataccacattttgtttactcattcattagttggtagacatttgagttgtttccactttttaactataatgagtaacatttacagaaacatttatgtacacattttatgtggacatatgttttgatttctttatactcccagggagtggattttgttttaggtggtaactctgtttaattatttgaggaactgccagatagttttccaaagtggctgcatctgtttgcatttccgccagcagtgtatgaaggttccaatttctccacatccttgccaacacttg

SEQ ID NO: 127161 - DNA, 1844 bp, Homo sapiens
agtcaatggaacattaggccttttttaattatcctggaggtgacgattttttgtgcatatatggactagaagtgcaaagtaacattcagaaccccccacatcctaaaatttaaaaataaactcatagttagataaaatatatttgccctaatgcagatcatattacttgactcatttgcatccattattagtttgtttcctaggaagatctggtgtctgttgtgggtttctttgttgctgtttttttttaaaaaaattttttgaggttctttgaaaccctcaggggaacaaattagcttgtattttaagatacgtgtatcttgatgtttttcttaatgctctttgtggtttgagatttgaagtaaagtgaggtaaagtctgttaacttgttttctaaaaaaagacatcatgttttctcccccaaagctacaaagcctcccagatataagtgtgggatctcaaaagcttgccctgagaagcattttgcttttaaaatggcaagtggagcagccaacgtggtgggacccaaaatctgcctggaagataatgtgtaagtctttgttgacttgagacgataaggtgtgctattaaattgcagccaattgaacctgagtttaatggatattttgaaaatgtgttcggtatactttattaatggaaagtgatttccatttttgttatgtagtttttttctcatgaattcaagggaccttaaagttcttaaattttatattagagagtgactaagaacgtaacacttattcggctttatagagataagagatttcctctgagtaaattctctagatctgcactgtcccatttgctagcaacagaacacatgtggctatttaattttgatccttaaatattaggaagaaagttaattcacttaaattaactaaaaagttcagttccttggtatctgtcaccgcagttcaggtgttcagtggccacatgtggttcatggtcaccaaatggaacagcagagagagcattttcatcgtggcagaaatcctatttgcaacattgccctggacaatgaatgtgttctctttattttaaatgaaatccaacgtctttcatttaaaatatttgagtgctacttgttgaagtgtgaaatgatccagtgataacctcagttccattgcagcacaaactgcttgcctctaagctgaatggtttcctatgttgagatgctttctaaaggatggtttttaggatttttgatatcctacctcagtgtcaactgttgctcgcaagttcctgctgctgaaattgcaaatcctacttttagttggttgcttttaatatgctattgcctagaaaactagacatgggggcttatttaaatttaatataaaataataaatttgtcacgaattatatagaataaagagataattttatagcaaagaggagacctaggcagcttttcctagctgtttatgtgcctcttctttttaatattgaagctcttaaatttttatcctagcctcttttgcaggcagttagctgtaagaagtttattgagcttcatgggacaacacttttcttgtaaaattaagggcttgagctagatgatcattaaggtctgtactgatttcctttattttcccgtattctaatgatgatttattgttaatccatttgtcttctgatttctcattagaatagtcctgttttactgatgcataataaggcacttgcattttagaagtttgtaggtttttgaaaacattctcatttccactctttatcttgtttggttaaatagaccccaaatttgattctaaatcacaggaacaaagttcttttagaatacctaacccatggatgatttt

SEQ ID NO: 127162 - DNA, 1751 bp, Homo sapiens
tgcacatctttctcattttttagaactttgcataaattccccttctttggaagaaattgtgtttgaacctccctctttaagaatgtattgctcctttttctgaacatttgttctgattgcatagtacttatatttcaatttggcactgattttaatctgccttgcattatataattttttttctttttttcctctttttcctgtgtctgtcccccttcacccaagagtgagtcttaaaggcgctattttggtgcttcacccagcatctagcactgggtgctgcaatcagtaaatgctgattgagtgaaaacaaatgtaggtaacagagaattaggatttctacatggaaaggaagagtatttccaaagtgggattcacataaagctgtattagttggaatatcactggtagtcagctatgaacaaacgttgagttactttattctcctactttttatttcttgatttttcctgatgttaagaacctgcaaagtgtttttgtgtgcattttagctatttgatttagacattatgagggcagatggttattttgatgtcaaaactgaagtgtagtactttgtaaccttactggttgccaatctgttgaattggccaaaatttaattgtgtggttttattttaattctcatttcagactatcttaacgaagatggatatatggttatcttcgtcatttgtttaacatcttagtatatgaaaggttaacatatttaatccagtaggaggattcttgctataatcactatcttaaggacccataagattaaatagttcttttggtgattcgttttccattttttaaacttacttgacaatttctataaattatgtagctttatatttattatatggtattattttagaaaaataaaacacatttctagaaaggaagaatgaaaattttgcctacaattagtagttgaaattaccaatgtcgattatgaatttttaaaaacaattttttataaaactttattttgagataattgtattgttttttacaaatccatttgaatatacagagagatggtgcatactgtttactcagtttctcccattggtaatatcttgcaaaactataatacactatcacaatcaggacatcaacatggatacaattcaccaatcttattcagcattgtggtgtaatgtagtgttgttttcagtttgaatacttagctagtaagtgaactgaacacagtccaaattatttttgtctatattgctgcaataagtacttaatgttctttttttttttcttttttttttttgagacggagtcttgctctgtcgcccaggctggagagcagtggcacaatctcggctcaccacaagctccacctcgcgggttcacgccattctccctgcccaccaccacgcccggctaattttttttttttgtatttgtagtagagatggggtttcaccgtgttagccaggatggtctcgatctcctgacctcatgatccacccgcctcagcctctcaaagtgctgggattacaggcgtgagccactgcacccggccataaatacttaatgttctattgaatttatttatttttaccttttcagatttaaaccattggtatatagtatatacataaattacttgagacattattaacaactaaagtgcaaaatagttctgattcattagcccgacttactgaaggacattcattgatgaaatgcaataacaaatgtttattattgttccatgaaatgaagtgt

SEQ ID NO: 127163 - DNA, 1755 bp, Homo sapiens
tttttaagactttattattttaaagcagttttaggttcacagctaatttgagaggaagatgcagagattttctacatactccctgtcccgctccccatgtagttatcagtagagtgtttctatacagaaatgagtaggctgtgagaagcagtagctctctgagcatcatcagttcattgaagagtctgcgcacttggagctttccatgtaactgtgttatgaagcatatgtgataggtaccaaattatatcctgcaggaatggagaaggcctgtcttaaggtactaaggtattaagtatgaagaggaaggctttgttgatcgccacaccaggagggcttatgtagctccaggagatgtgttggttagtgataggacaataaatctgtaacatgtcacttgagaattcctcgcttagtggacattgtggccttagcatccccagaagttccactgtttttgaaaaatcctatctagtattgctccttatatttatgaaggataaggaatctgccattcaacaaacttggtggtggtgttccattagtcatgacacttttttgttgtcagcaactaataggtaatttttttgcatataaaactaggcagatggttcaagcagtcctttggatagctagataatctgagaattctttgatcaggaaaattctttatcttgatgaattgtttgtataatttttatgtatctcatgtaaaattaagatctaatagatacaaagtagaaatgtattgatcttaaaaaatttataaacatttttcatagaaatgcaaaataaaagttctgtgggcttacaaagttatgctgaaatacttctgccttttaggtgctgcaaagttggtggtagctgtggcagtgtttttactgacattttatgttatttctcaagtatttgaaataaaaatggatgcaagtttaggaaatctatttggtaagttttatttttttcctttcttaaatcttatttttgatgtggcctaaagttttatcagttatcagcactgagtcactcagtgctagaaaacgaaatgtgattattatatatccataaatatgatttgttagaatattttacagtatataattagatattttggaattaatttagtataaaacatgaatcttctattcaacattttgaacatatgtaatgagtctattttatacatttttaggggcattaatcatggcattctaagtgcacattctaaaacataaaatacctccaggcttaaattgttttcctgtttaagttggctgctagaaaacttgaagccaaatctagccctcagttagccatatgattaggagtcacggtaatgcattttagataccagccatagaaatccgtcttgcagctggctgtggtggcttgcacctgtaattccagctactcaggaggccgaggtgggaggatcactggagcccaggagttccaggctgtggtgagctgtgatcatgccatactgcactccagcctgggtgacagtaaaacctcatctcttaaaaaaaaagaaagaaatccatggtgctttcttatccttattttccctctgtggcattttttttttctaacccactcatttaatgttgccatactgtaaatgtaccattataaggtaccttaacccagttttttaacagaatccttacgttcataaaataacatttgaaatgttttcatatgaaccagttatacatagtgctattgtagatgattgtatatgaatatcttatt

SEQ ID NO: 127164 - DNA, 1024 bp, Homo sapiens
tgctgtaaatgcttatggtagtggcacttgaattatgtcatatcaaaaatgaagtggcatcatgtactggagtgagccagctgacctcaattccagccccatgtctacaaataatttgttccacaactagataagcagcttaacctctttggacatcatctgcaaactgaaggtttggagctaaatatcaaaagtttcttatagatgcataatccatgagaataagaaggcattctcttctattcacaagcttgataacacacttttactctttggtcattcagttagctgaagacacagcagggtaagacagaccctccttgaggtcttatggtccagtggaagacaggcccattttttttttttttaatgccaatgttggcataatacttagaaatgtcataaaatttactagtttatatgccccatttcaaactcaatctaaggaggaatgtttgctctagagctaatgatatttgctttttgttttgattttttaggagcatattaatgaaaagtgccataaactgaaaaaccaaacatgagggtagcaggtaagatatttaatttagtagaagtaattgtactttttgtgtaacctgtttgttaaagaataactaaaggagaggttaaataatctttatattgagaaggttaaactgaaataaactaaatcattcagccctttgtttttaggtagttggcaaatcacaaattggacatttagtcagtatcacataaatttttttttttgttcaagtcttttgttgaaattacacattgagcttcttaaatctgaagatctgaaatgctccaaaatctaaaactttatgagcagcaacacatgatgctcaaaggaaatgctcatttgagtatttaggtttcagattttcagatttgggaagttcagctggtaagtatgatgcaaatattctaaaatctgaaaaaaaaaaaaaaaaaacctaaagactgtatataatgcccatataaagaatggtttgacaacctagggaggctgattttt

SEQ ID NO: 127165 - DNA, 1051 bp, Homo sapiens
acctttgattttactctgttgttcctgaagttaatttattctagaacaatgactccttattcacatagtagcttgatttctacctgagtaataaaacttcactaaattagatcagagtagatagtggggccaaaggaatgtttaaattgtcaaccatgtaaagaagtttagtacgtccatctgaggccctagttcaggcgctctttccagctgcagtgtttcattgtccagcgacattgtggtggctgtccttgctgttgaatctcaggtgattatgaaccttacatattagcaactggatttggttcagtgacatatatttatcaaaaacactaaaacaaattttggcctatgtaacactttttggagcaaatgtataaatgtactaagttgagttttggggttttttttccatcctaaaaatatccttctgtgactcattttctggttttggtaagtggctctaatatctatatttctaccttttaatgaacatacttatatataagccctttcgcctgttgcctctagatttagagttctgaatttctagcaaaggcctttttctccctttactattgtgctccttttctctggacctgttcaatccttgtttaattattgatggttttcagcctgaagtttccattaagtttttgcttccctcacccatacaagataattgtatgtaaatattttctttgcttttacatgccccctctaagaagacaaataggaatgatttagaattagcacattatcatcatacatagatgctccttgatttgctctcaaatatattcaatactcctatcctgatgtagattcttgaatcattaatttgcttcttaaggaaattaattgaggcatgttatggctgagatttaatttgatgagattttaatttagaaattttactaaatgtgaattctctgagacattttaatggaaaacagttgtattcagctagacaatcatcattgcttatattgtggtcttagggatgagtttagaaacaggtttgttgggagatacaaatgggtggcaggta

SEQ ID NO: 127166 - DNA, 1021 bp, Homo sapiens
acctgtcaaagccatgtggaagttgtatgtcctacacgtagcccagcaaaaaaagttggactgttagagcctggttgggaaagatgtttattcctttatttttaaattttatatttttatttctttttattaggggttgacaaagtacaacccctaggcctgtatggcccacaagccaaaactggttttcacatttttaagtgggttgaaaaaaaatcaaaagaataattttgtgacacatgaacattttatgaaatttaaatttcagtgtctataaagaaagctttattagaatataattagactcattcgttcacatgttggctatggttgctttctagctacaactgcagagtggcgtaattgcagtagagattgtatggtccataaagcctaaaaatatttaccatctggcccttttatagaaagagtttgccaacagttgccctgttttactcacataaaagtagttatttatagcaaacacagtattttttaaaaaataccatgcttttgtttgtaaatgcaacatcggagtaacctaccctagtgactctttgagttgtagcattcttttgattttagtattatctcatttttctcttttactttaaatgctctggggataaaaatttaattttttacattctgttcttgagggggtctgtattagtctgagttctatagaaaaacagaaccaattacatatatatatatatatatatgtgtgcgtgtgtgtgtgtatgtatagatatagctctagatatatagacatatattccttataatacatgtggagatagcttcatttatatacaggtatatgatttgtatgtgcgtgtttgtgtgtgtgtgtgtatatgtttattataagggattggctcatgagattatgaatgctgagaagtccaagatctgacaagttggcaagctctgacagtccaggagaatgaatggtatagtctggtctgagtctgaaggcattgtctcagtttaaagataggcaaagaaggcgaattct

SEQ ID NO: 127167 - DNA, 1035 bp, Homo sapiens
gatctgaccatctcagctatctcaagatatataagatgacctaactggcgcatctctaggatgggtgggtcatttaaaatgttctgcccttgaggctgggattttgtgcgtgtaaacggtggggagacggcggtgacacatttttctccctcccgtagtgccacccggcgcagggccgctgcggcggcggcagctcccacgtggcaagttcagattgtgcagcgcctggccgggggcggtgggcgggaccgcagacccctccctccgctctccggcccttccctctggccggcccgggcgcccgcttggtcctccaccgccagggggcgggcgcggcttcccggcggcgggggcccattggtcgcggccgggaagcgtgggaggaggcccagcggcgagctggctttctcctggccacttgccggggtgaggggcagccggaggagtccgagaggaagcggaggcgcgagctggaggcggcggctcccgtcggcctccggcaggactgagcgctgggaggccggaaggcgggcgcgcgcggcggagaggcgggcgggaggccggtgagacggctgggaggcggacggagccggggctcaggttcggggagggatggaggaggccggggaagccagacgcccacctacgacttcagcctccgcgcactgcggtcaccggccgggggcgggccccgggcccggccgcgttgtcacggcgtgtccggacgttggagagggcgcaggcgggactggggtcccggagagccgctggccggggttcccggccgccgccccggcgtgggcatccccgggctccgcggagacggggcggcgtctgcacctggcgctggcactcggcgccccggcctggggcgggcacctgggtcgcatcttccccaggttggctgtggctcgcgcccctgcagcgtgtaggctgagagctccgagaggtggggacggagttgggtgttgcattccaactccatagggggccgttttgactcacttgtaaagttttagtgtcgcctatactaga

SEQ ID NO: 127168 - DNA, 1094 bp, Homo sapiens
atggcgacaaaagtgacctctggtcatcctcactgctacactcccaccagcaccataacagtttacgaacgccacagcaatgtaaggaatttaccctatatggtctaaaaaggggatgcataaaaattccacccctggcttagcatataatcaagaaacaaccataaaaatgggcaacatgcagccctcctatgaaatagccattcttttattccattactttcttaacaaacttgctttcattttatggattcacctcaaattctttcttgcatgagaaccctctcttgagacgtggatctggacccctttctggtaacacaggtactcagggccccacttcttttctcggtttcagtgtggatgtcccacttcatagcctcaagctatggagccaatactgattgctctcctgggcagtagaaacacgggggttgtagttccacctggcttcaaacccccaggtccgctggatgtttatctaaatgcggtccttacaaacaaggttcttttaaatggaaatctagcagaaccttctcctttaggctaaaactgttccaccaggcagtctcctgatgccaggatctgatgactcactctctgcttcccggttcctgtgtccataaattccttgaattagctaaagaatgcagtccaggcaaattctagtttcttactcagacacttgactgaatatctcctttactctcatttcttctttctgcttcttttatcatttccctaaatttatattttctactcctacactttataagttgcttttctctctgtaaatacaaatttcacacattttcagaacctaccaagtattatacataggcttctgggggtgctacagcccattcgactctcacaattaagactgtggtgctgttcaaaccaaacaatgtcaggttgttaacatcacttacatggttaacacacttgattaggagtcagtgtcttaattgtggaaacaattcaaaattttcttgtatatgacacaaccagtgaggtattctttggaatttccatgaccatgtttcaggaagtacaaactttgctgctagcatattggtccacaaatcgctatg

SEQ ID NO: 127169 - DNA, 1026 bp, Homo sapiens
attttcatacagttatttcaagcagttagcatagtcgttcattttctaaatggaaaaatagcatagaaattaaaaaatactaccaaactttaaatatttgtattaaaaataaaaagtgataattcactttatagtgaataatccacgttaaaggtttggttttaatgtaatttgcttgggtgaaatacatttatttggataaagaatttcatttatttgttttctctttgatagtctagtaattcagacaaaataattatgtcatctcagttttgagctaaacgaagggttgtaaaatgtactcatctttagtttcttcctaggatcctcaaatattctaggaataattttccaaaccaatgggaagcactaatataaataaagcaattcactctttaaaaaactttggtaagcttccatcctcaccctgactctggaacatccctttttgagatctgccaccccacccccctacaacaaataccacgctttaatgagtctatccctttgatcactagactttcctgaaagaagctaaagccaataggccttaggttatgagcaagatgattcaacttgattttaaagcaaagaactacacattgtttcttcaaagacccatctgtcaaagcctagccactctataggtgctgtgtctatactcagcccattaaaaggagcagctctgtggttgcctcctaagataataagatattgcacaatggtatgtgctgttgctatcatatctgctgaaaccctggtaaaactgttgtcttctcctgaccttatgaggcacacccaagatgcatagggtccctgggctgctgggaaacacacaccaccatcactccattagtcaacatacatccacccttgcttggagctgagaactataattttcttattccctaggcagtaggtcctctgttttctaactctgggtttagggagagtggagggtgcattaaagtttgtttttcattttactcatacatacttggtaaatatctgagttctctgtttgaa

SEQ ID NO: 127170 - DNA, 1027 bp, Homo sapiens
agatctgtaggtgaaggagaaatcactgtgctccagcctctaccgcattcttcctgcttttggacagaaaattaggaatgtgatgagacaagcttcttggggcccactgaattaattcccatacacttaccctattgaaaattctggataacaagatttatgccatagtttgattggcaatggcttacattttaactgttgacttctttgcatttaagagatgttaggcatgattttacatcagcacactagttaggaaacgaaaggaaaagggactagtaaaagagtccaaaagagaggggtatgagaaaaggagctttacctactccaagaggggtacagcttcaagttgataggattaatcaacattgtcacacatagttctggggagttcatagtgagataaagactatggacttggatgtattttaatgaagcaggttgtagtggggattcttttgttagtttgtctgatgggaatacaagctccagagacagtcctactctttccttctaatctgggctccatcttacatgtcatcttttttgtcccaaagtttttcacctgtaaaaagaactaatgttagtaccaagctcagcaggtgctgcaatgattacatgtgtaagtatatacaaagcagttagaatagtgtctggtgcatataaagtgctcaataaaattattatttaaagtcagataaatcttctgtcatattcaggacttctgacaggtttatgtccatcacgcaattatctttcaatagtacagatataattatatgattctccccatcacctgccaaatgaaaaaaaaaaaagggctctttagcttggcatataatggctttaatgagctggcccacctatcctgtttcattcctcatgattaccttccccctgcctgctgctataccagccttttcaaaagcaggtctctccgattctgtttataatcctgcctgaatagcagactatgcaccttcttcaagtgaagccttctttcctgactcttcttttctgcaggcca

SEQ ID NO: 127171 - DNA, 1093 bp, Homo sapiens
ctatttaccttgatgcctgatgaacaaagaaatataaaaacaataaaataaatgccatgttaaataacactgtcaataaataactacagtgtgtcttccttttaaatatgtggtatctattcatttaaccacttctttccatagcattaaaataaaggcggccataaattaggtgttttcattacgtttaattactcccctgtagagcggatggtaaaggttgtaggttagaggtatgcattgtacagaatggtgttttatgaggatgagaagttcccaagataccacaagtgatgattggcagtgtaagatatgaagattttctttttctcttatttccttatgactcattaaatcttgtttgcttttcaaaggaggaggaagagggaaaagacattgaagaaggcgctattgtgaatcctggtagagacagtgctacaaaccaaatcaggaaaaaggaaccccagatttctaccacaacacactacaatcgcatagggacgaaatacaatgaagccaagactaaccgatccccaacaagaggaagtgaattctctggaaagggtgatgttcccaatacatctttaaattccacttcccaaccagtcactaaattagccacagaaaaagatatttccttgacttctcagactgtgactgaactgccacctcacactgtggaaggtacttcagcctctttaaatgatggctctaaaactgttcttagatctccacatatgaacttgtcggggactgcagaatccttaaatacagtttctataacagaatatgaggaggagagtttattgaccagtttcaagcttgatactggagctgaagattcttcaggctccagtcccgcaacttctgctatcccattcatctctgagaacatatcccaagggtatatattttcctccgaaaacccagagacaataacatatgatgtccttataccagaatctgctagaaatgcttccgaagattcaacttcatcaggttcagaagaatcactaaaggatccttctatggagggaaatgtgtggtttcctagctctacagacataacagcacagcccgatgttggatcagg

SEQ ID NO: 127172 - DNA, 1828 bp, Homo sapiens
cctttcaggcttctgatgttgacaccttgcttaaaactgttcttccagctgtgcccagtgatccaatattggttgaaacccccaaagttgataaaattagttctacaatgttgcatctcattgtatcaaattctgcttcaagtgaaaacatgctgcactctacatctgtaccagtttttgatgtgtcgcctacttctcatatgcactctgcttcacttcaaggtttgaccatttcctatgcaagtgagaaatatgaaccagttttgttaaaaagtgaaagttcccaccaagtggtaccttctttgtacagtaatgatgagttgttccaaacggccaatttggagattaaccaggcccatcccccaaaaggaaggcatgtatttgctacacctgttttatcaattgatgaaccattaaatacactaataaataagcttatacattccgatgaaattttaacctccaccaaaagttctgttactggtaaggtatttgctggtattccaacagttgcttctgatacatttgtatctactgatcattctgttcctataggaaatgggcatgttgccattacagctgtttctccccacagagatggttctgtaacctcaacaaagttgctgtttccttctaaggcaacttctgagctgagtcatagtgccaaatctgatgccggtttagtgggtggtggtgaagatggtgacactgatgatgatggtgatgatgatgatgatgacagaggtagtgatggcttatccattcataagtgtatgtcatgctcatcctatagagaatcacaggaaaaggtaatgaatgattcagacacccacgaaaacagtcttatggatcagaataatccaatctcatactcactatctgagaattctgaagaagataatagagtcacaagtgtatcctcagacagtcaaactggtatggacagaagtcctggtaaatcaccatcagcaaatgggctatcccaaaagcacaatgatggaaaagaggaaaatgacattcagactggtagtgctctgcttcctctcagccctgaatctaaagcatgggcagttctgacaagtgatgaagaaagtggatcagggcaaggtacctcagatagccttaatgagaatgagacttccacagatttcagttttgcagacactaatgaaaaagatgctgatgggatcctggcagcaggtgactcagaaataactcctggattcccacagtccccaacatcatctgttactagcgagaactcagaagtgttccacgtttcagaggcaggttagttacggatcagaaggacagattgaggtgtggtggtttgcttgctctaaaagtaaaatgaaaattatagaaagatagaaatttggtaaaatggtacatcatcatttttaaaatcaaaacattcaacaaatcagtctccagtttctgaagtataattttatttattatttcaaacaattatttaacacattttggtttttaatttaattctctccaaaatagacaaaacaatttttatttattgtcaatatttcatactctacaggatgtcttttatgggtgggggcaattctgtttgcataatacatttttagtacactgcttttaaagcaagatcagagtatgctattttagatgattttaattttcatacttttgttctaaaataagttgtaaactaattctatttaattataaaatgaattattaaatctgagagtaatgtgacataagcacttctctctgacacacccctgtagaaaggaattagttaatttccacattcatatcagcttggggagctttatttattatt

SEQ ID NO: 127173 - DNA, 1099 bp, Homo sapiens
gaatgttctgtgttccagtggaaagatcaagggttggcatttcatccctgagtggagaaggcacagactacatcaatgcctcctatatcatggtaagtcagagaagtcactgaggagactgccagcttgtgttacagggatcaaaaccagaatgggctgccagaagcaaagactacaggcatgggcaaatgagtggtaaatttaagttaaatctgttgactgcaagcccacagtccacagcaacagttgtaataatggcatgcttttatgtgtgctgggactgaagaaacctcaagcaagaccaattagcagatgcaggaacacaaactcaccatttagggctgatgagtagatataaaacttatacctgcttatctaaaaggctttatttccttcactaaggcagaacccctgagcaaacccgggattcactggcttcagcaaagcctaacctcactgacatcactacttcaggtttgcagcatgatttttagcctgcaaactgggctcattttaggacctggatttctaaagatacaatgcttttcttctgcatttacatcttttgtgtgagggatgagtgttttagtagctgttgtgtgaccttcattaacatttaaggtcaatcaatcacggagcttggcttctgatgaaaacctaattcttattccaaaacctctgttctatttatccagcaaagaaaatattaaggaatatctatgcaggaaacacagggatgtgtggtagtggcatctaaatacattcacatttcaaatgagccactgggtgataggaatgggatctgaaagcagaaggggctagaagagccaggactttagtaacagtataaatatcacagttaatacaatagctctagcttctaggtatctgtagcaaaatatgcaagatgtctccctggttcctctcttgtagaggcaaccaaggtgtctggacaccaaagtgggaaatgtaaactctcctgtagatttcccactctctgtggagtaagagacagtatccacaaagcagtttggtaagtctacagctagaggtgtgtttttaatgaaactgttcaagtttctctatcagcttagctgat

SEQ ID NO: 127174 - DNA, 1044 bp, Homo sapiens
gtttggagaacccaacaagtaaaataaatatttcatttaggctttacatgtttacttagctttgatattcagttcttatctataaagttattgtgtgaccattacacatgaggctggaaatttctgagctcttaaaatcacttgaatcttctgtactcagttgtcaattacagaagcaataagcttatcattgttgataagctaagagcataaaataataaagcaatagtttgggttcctaagtgtgatattttattcagcacatcaatctagttgaaggcacgagaaagatgttaagagtaaatattcagattcaaagaaaaattggagttgaaatttctgtgccaaccaattaactttatttcacaatctgacttattggtcattttattaaaatctagactcttctttcatttgcaattctgcaggcagaagatgaatttgtttactggccaaataaagatgagcctataaattgtgagagctttaaggtcactcttatggctgaagaacacaaatgtctatctaatgaggaaaaacttataattcaggactttatcttagaagctacacaggtaaggatataagttaaatgacaaactttttatcttaaacacatgttaaacatattctgacctaaggatctgtcctagaaatgaaaagcatgattctgattttttccccattgagacaaatacacaaataatcaaattaccttgtcactttcattttcaaaatgatatagaatcattaaacaattagtcatcactacgtcattcctgaattttacacacacaggaaatcaaagctcatttactccagattagtggttgacagaacttaggtgaaaaataaacacagtaaaagaataaatttattaattttaattctcatgttttaatgtaatcccttaccttgtaagtaaaatgggaaaaatactacctacctaaactctcctaagtaaaatgggaaaaatactacctaccgaaacttactattctctaccaatgtagaaagttgatgagtgatagtgatgtagtaagt

SEQ ID NO: 127175 - DNA, 1054 bp, Homo sapiens
ttccatgtgatacccattgtcccaccattatttatgaattagcaatatcagttcagtcattcatatagtgtgtgtgtgtgtgtgtgtgtatatatatacatatatatatacatatatatatgtgtgcttgttctaggacatttattttattccattggtcactttgttcatccctcagccacaatggcagtgttttacttcttatagcttagagtaattcttgatatctgatgagttaatttcctctattgtttttcttatttaccagtatcttggctattttggccctttgcacttttatgtaaaatttaggttctgctacttgtttttaaaaaaggtatcatttttttaaaaaagtacacttttggaagctggaggcgagaagtttaagggatttatcaagtcacagtcttgttggtcacttaagtaagaatcagaattgggatccgagttgaacctagatctctacctccttgtcggcgttttctccactgtgtcatgcaatcttttacttaagcctgaggattactgataagtgaagaaagtgtatgctattttcaaaacagattttaacaccaatgatttccttttataaatttgaatttagccgtgcaaatacatctttgatacatagtttcatggtttgtaagcattggcatatttcacccacagatagagtttatttttagaataaaaaaagaaattatgttttttgattctactagtaaatctatgcatgttaaatgtggcatcacaactgtttcttccttctatgatgaagaatgtgctgcaactactgctgctcactcatgcctgccattgggttttattaccttactgtaattcctgattttcctcaatgattccactcctggtaaactgtcactaactaacattactttgtgttttcttgttataggatgattatgtacttgaagtgaggcactttcagtgtcctaaatggccaaatccagatagccccattagtaaaacttttgaacttataagtgttataaaagaagaagctgccaatagggatgggcctatgattgtt

SEQ ID NO: 127176 - DNA, 1034 bp, Homo sapiens
tttcacataaattacctccactgatcttcagaccattcttgtaaggtgggcgggatagctgtccttttccccactttactgagaagtacaatgaagagagagaagcaaaatgacttgacatttatctcgtagccagacagcggcagagctgcaacttgagccaagaagtaaattcatcaacaggctccctgcctctatcttgctttgtccctcagcaaattcatcaacaggcttcctgcctctatcttgctttgtccctcagcaaattcatcaacaggcttcctgcctctatcttgctttgtccctcagcaacacacatgtgtgtatgcacagactcactagcaagcaccaagaatcaggtgctgggctacagcctccatggttcaagctgtctagtaaccatagcaattgccgctgtcctcgtggcaaatgagatcacccagtacacacttgctccaagatttgagttacaagagatgaggcattttccacagagggccattaagtttggaattccctttccctggtctgacataaccctagagtattcatcttctgggtccttgcaaactacatcaagttgagttagccagtcatgattggtaagaaatcctaacaggcaggaagaaagtgctaaattaacttctacatgtgagcaattcgcaattttgtgggtggattttttttccctaggcatcctttaggatagctacccaagcatacgttattctcattctttaaaaatgcacttatagttcacagtcagtctgcatggttttgtttctgtgttcttacatcatgtcgcaaatgatgtgatggagaaacctatagggaagtttttgtttcttttgcataaactattttgtagtaattgatcagccataaagaaaagattatctcctatgcactcacagcgagttctctggtcaccagagaccaataagctgtgtccctagaactattatcactttgttgaagaagctgctatgtgaacaaaaaccagtcttcgttaatttcccttttcctattgaaaa

SEQ ID NO: 127177 - DNA, 1007 bp, Homo sapiens
tctctatgaatttttaaaataagtttattcacttttaattgacaaataattgtttatatatatggggtacaatgtaaatttttaaaacatcttgacattccttgctggagattttactgggaatgccttcaatctataggtcagtccttggaaaattttggaaaactgacttcttaatattgagtcttccaatctgtgaataccatgtatcacttcatttgtttaggtagtctttagtttctctttgggatgtttgtagttttcagtgaacagatctagcacatcttttgtcagatttatttctaggtatttcatctttgttgctttagtaaatggaattttttatttcagtccaattgttttgttatctttgtgattgctttagaatttaaagtataccctttaaatttattatatatcttcatgtatagtatgcacactttacaatagtaaacttctatttctcctctcttggcttttgcactattcttgtcatatattttacttctatatatgtggtaaatcccacaatacattgctattatgattattgccttagtcaatatcttttaaataaattaaaagtgaaagaaaaatgttatgtacatgtccattttgtacatgtccattatgtacatgttatgtacatgtacattaccatttccagtgcctttcatcatctaatatagatattttcacttcttggaggacctcctttgacttttcttgtagtgcagatctgctggtaatgaatacttttagcttctttatatacgaaaaaaagtatttattttaccctcattttgaagatatttttcttttagtactttaaggtgttgctccactttcttctagcttgcatttgtttttccaatgagaaatgtgctgctattttggttttttcctctataaataatgtccttttttcctctagctgctttaaagatttttctctttaacactgtttttgagcaatttgattatgatgtgccttggtatagttttct

SEQ ID NO: 127178 - DNA, 1086 bp, Homo sapiens
gattacaggcgtgagatctttttttactttgttaaaagtcttgatataagtatgcttgaaaatgtggtcccatgtttatgtaaatctaggactactcctaatcttactcttagagatttatagcctacgttagcatattaaaagctgtaagaaaccatgaagtgaaagaaggctatttatcttcttaataggctaatgatcccaaacgtatcaacatgaatacttatttatggtgcttctattaatatagaagcttgagcaccaaatcattgtcttggggaatgctggatcataggcatagaagacccaacaaatgcaagctgacaaacgaaaggtgcttgaatctctgagctaggttttgaaaaatgctaaaatttaataatttatgtgcaaattatgttatatttttaattgggaaaagagtattttgataaaaaaacgaaagttaaatttggtaaatttaatgtgactaatctgtaaactttttttttctcgagcaggttagccaatatacctttgctatgtgcagttatagagaaaagaagtctgaaccacaagaattaatgcagcttgaaggctatactgtggattataccgatccccacccaggtaaatcttaattgaatcacttttcctgccatgtatgtatgcatggaattcttataaatatcctttgtctgttctacaatttaaacccctctcgatgaatagggtgcatatttcacttatatacctgggcaagactttatgagattcaaattatctcttttggagggcttgtatttttagccatatttcatcatatttgttattattttagcgcaggattgaaatgtgtaaaattcactgtaatggaataattaggtgagatattacaatgttttcagaaacttctttgcgggaaagcaaaagttatagcagaaataggcaaagaaatggcaaatgaattattatattataactactaattttctccccaacaatacatgcttgtacttctctctctcccttcatattaatactggaaagagtattggacacctgatatttaaaaaattgaatgaatgaatattaatgacattaata

SEQ ID NO: 127179 - DNA, 1020 bp, Homo sapiens
cattttggggtcacccagctggacagtgacccttcaccctggattcttggctctgcagctggctgctcctcagggcgcactactcagctccagtcatctgagaactgaagcattgataaccatgtcctcaattaatagcctttgtctctcctaagaattgcatgtaagaataaaattcctactggttctttgattatcctttctaattcctactttgctcaatttgtggtaaggactgacaaattgataagtcacataaatcaattccctttcgagaacccagaataagctaactcattttgtatcacagaagctgcaggttgtctcactttccaaatgagctaaactttgcctttagcaggctggtctcaaaaataaatacctatggaagaaatgtgattacatggaagcacaacattattcatctgaagtattctttggcttttgtttttctttccagatatctgtatgcccttggacagaaggtttggaaaagatggaaaaaacgttactttgttctagttcaggttagtcattttttcctgttaaataatcactctaagatagcagttctcaaaatttgtttatgtgggttatatctatcaaaatttactgttttagaaattaaaatatgtttaagccactttaaataaaagcagtacattcattacatgctaacactaaagtttttatgtaaaataactgttttccaagccaaacaatttagtgaaataagtggcattgttttatgcttttggactctttaccctctggcttaatagaaggtaactgttttcttgcatcagcttctgcattcaattttttgcaatatcagataaaatgtaacctctggaaaactcacctttatactaatgggagaaaaagtgtgaaaaagacaaataacttctgaatattcttataaagacagttttgacctcgtagaccctctgaaaagatattggagatctctgggattccaagactataccttgagaaccactgcatcattctatattttat

SEQ ID NO: 127180 - DNA, 1028 bp, Homo sapiens
cagtttaaaaaatattcttaggtatatgaaagttaaaagtgctgctttttctatttcattctgaaccacagtatcacctatttggtgcacatatttttgtttctctgtgtgtatatctttgttatattaacatactcaatttacagtaattttagacattttctatttccaacactaacattttctgccagcattaagtactctctatgtatttatagtgttcagaccgtaaaagtcatattatgaataaatgggttaaaaattatttcttaattaaaatcattgctataacttacatttctataaaatcaattggtttttataagtcatataaaatgaaaactggaactttgtgatacagagcacaaattgcgttaatgattgataggtattatgagtgaaatgaaaaattactagacaaggagaagaaagaagaaagtgtttatcctgctaccaaatattcagtgaatggattataactacaatcttgtctttaatgtttcccatggtaattgtcaggaagaggtatgaagaattgtgggaccttaataatatgccttgccgttttaattgctgagagaagcaagagaattttaattgccaggagatacattactaattaaagtgtcattctacatttattctgaaataattagtttgaatatttgtaagagccgagatataaatttagttccaaattgaggagcatacccacaacagactttgttaaaatgatctatggttaagaaaggttaacaatcataaaactttaaatgtttctttaatttgataccatttaattttttattggattattcaacttgaaaaatggaattcacagtattttaaaacttagtattccttttaaattactataatactaagttaaagtcctaaattgctttcagatttctggggtatcggtattctaaattttttagttttagcatttattacagttcagggaaaatcttcttttgtaaatgatgccaacatgagtataatgtcatatatgaattataaattct

SEQ ID NO: 127181 - DNA, 1008 bp, Homo sapiens
tggcaattgttttctatttgtacttttgaaaaactagaaaagaaacataactttattcaaacagtctttgatttctttcctaacctttgcatttcaatccaccccttgtcttgtgtctttaactctgccttttgctggctgacatctacttcattactcttaagagtatatgcctttttgatacaataactgttactcagggccataataatttcattacatccctggatcctgactttcaggtgggtgctgaaagatgtcagtcaggtaaacaaacccaaacagacaagctccacagtattttggcaatggctgctaaaactatggactgtgattctccacttagagggaaaatggcaaaattttttgtcttactcaacttcatagaaatgtagtttcctgctctgaaactgaagatttttttggctcattatttttcctttaaggacctttaatttttttttttttcctgaaataagaaaatcctaggatgctatttttggtttgcgctaagtaaaaatttttcttctaaacaaacgtatgctttaattatgttaaccttggtgctttcatttatttattgatttttcctgtttttttcctcccctaaactctggtgatgaagattagtttaaaaacgttaatggtttgcagctatcactttggtttttaatccccaaggctttcatggtagaaaaataattgagtgaatgaacccagtactttctaattctgaaaggtagcttagcatctgctctgaggactgcttagggaaaggccagtaaatgtatgcaaatcacttcttccttggggcttttgaagcttttgctctatgtctttgtgtatctgatttcatattctaagaataatagagatgatttgatatgatgtgcctgtttaaaaagtgacaacagtttattttttaaaggtatagtattttgaatacagctcaaaaatattatttcacataatcatggtgctttacatcaaatataagaggcctttaaa

SEQ ID NO: 127182 - DNA, 1272 bp, Homo sapiens
atgaagcaaccacataaacaagtctgcaaaataaccagctaacatcatgaggataggatcaaattcacacgtatcaatactaaccttgaatgtaaatgggttaaatgtcccaattaaaagacacaccatgttaagctggataaaaaagcaagacccattgatatgctgtctttaagggacccatctcacatgcagtgacacacataagctcaaaataaaaggatggagaaaaatctaccaggcaaatggaaaacagaaataagcagggattgtgatcctagtttcagacaaaacagactttaaaccaacaaagatttaaaaagataaagaagggcattacataattgttacagggctcaattcagcaagaagctctcactatcttaaatgtatatgcacccagcatggaagcacccagattcataaagcaagttcttagaatttctcaagagacttagactcccacacagttgtaaacatttttgaagatattataatgaaaattggggtctgatcttcaaaaaaggaattatgttcaaaaataggggctggagggatgcaccaaggagtttcaatcaatggaaatgaaaaatgaagagaaacaacagtaaaggaggacctgaatggtccttttacacatttgatataacaaatcagtgtttcttttagaaaggcttttagtgcatgtaatgatatggctgaaaggtacagcattttaattttttcatttgcactcaggactctttgaacaaagatccaatatgaatgctttaatttgtacaaatatgtagttggtggtgaattaaattagagttgcacaaatcctattcagtatatattgaactagaagttgccagaagcatagtgctattaggtgagcagttagtctggagagaccagatgctttgctgttagctgtttcttggcctagggtgagcagtgtacctttctttgttcactgtattcatgtttaacagtgaatatcttataattggttaaatttctttgctttgctttataaagaaaatacactattggaaagatcagcaaatctaatgtacttgaaatctataatgacatactactaaataagtttgttaatcttataggtgtatctctaaagtctgttgcattttttaaaatagtgtcttagtctgttcaagctgcaacaacaagataccataaactgggtagcttataaacaacagaactttatttctaacagttctggaggctggaaggtccaaggtcaaggtactgaagatttcacct

SEQ ID NO: 127183 - DNA, 1045 bp, Homo sapiens
ttctaatagttttttaaaaagtgattctcacctgcgcagagtggctcacgcctgtaatcccagcactttgggaggctgagttggttggattgatagagcctggggtatatagtgagaccatgtctccagaaaaaaaaaataaataaaaattaaaaaaaaagattctcttggctttttcattttcatgtagttatataatttgttcaggaaagacaatttttacatttttttctttcctacatatgcttctttttggttaacattttcttttctcattgcatttactgaaagttccattatgtaactttatagtagcaatgataataggtatccttgtctttttcctgatctaatgggaacatgtgtaatatttcttcactattacatgtggtgatttgtgctagatattttttattaaatgaaggaccttgaatactgttccttgcttgctaatacattttgttagcaaagtgatgaattacttagatcaaaatctttcaagcacttactgatatgatcacatgggttttgtcctttaatctgttaatgtaacagatttctttaggagtttttttaatacatattggaccacttaagcatatctggtataaacattagtaggtttaggatttttgcagcatttcttataacgtacattggcttttggtgctgtctttgtctgattttggttagtggattatgttagtcttacagttgaacattctgttttggtctctatctctccctatatgtacatatttttgagtattgctttggcttatagcatttctagttttaaatgtgctttctttgcccagtttttatgtacaattttcattttaattttctctttagcccaaatagtgtttttcttaattaccccaaggtaagaagttcacttgaattttctttttttttttttttttgaggcagagtctcgctctgtcgcacaggctggagtacagtggcacaatcttggctcaccaaaaatctccacctcctgagtccaagtgattctcctgcctcagcctcccaagtagctggg

SEQ ID NO: 127184 - DNA, 1038 bp, Homo sapiens
ttaaagtattttggcaaaattacagttttcaagatcaaggtcttaggtaaaacagagaaaaaaaactggagatagacaaatacaaaaagtgtgtaaaaaaaaaaaaaacccacccatgtgtgcacacacacaatagtaagtaaaacttttaaaaagtgtgagcttagagacctggtcttctaagtgacccttttcttgtatcaactgtgcaagaaaaatgtggtgacattcaaaaagcctaagttaatcttacgcagccatctctgtccagcggtcatttggagatataagcgcatatttccctgggtctagtcttccatctgcattaaataatggtagaatacaactagacctcctctgcctgtgctaccagagacctaccagcatatctgtgggagtggatggcagtaatgttgtctggctttaccactgaaaggtaacaaaagtaaacatcacatatgttaaactgagcagatgttaaaatgctggttacaaatataaactgaagtaattcaaaaatgtgtctgacaaaactttaatagtggagaaatcacagtacaatatgggaactgccataagatagtaagatccatgcaagtatcacccaaattcccctttttctatgaaatgaagcaatttttatactgagaatgagagactgctggcttttttttaaaaaagacagcttaattataatgaaatagtgcatttctcttcacttttgtttcccttcccagattatgtgaatacatttctcgtctttaactgcagaacagcaatatggcattctaacatctatttcctatgaaaaattgtgagaaacaatcatctagggaggaaaaaagatagattcactatccatgcacaactactactaacatcttcatatttccttccagcctttgttctgtctgtaacatgtttgttttacctaattttgatcacatgagacactattttcatggcaacatgacaggtgattacagaattcaaaactttgtctaatctaatagatggaaatggtatttagttgtttgc

SEQ ID NO: 127185 - DNA, 1035 bp, Homo sapiens
tcctcttttcccttcgaattacaattcctcttgtcatctcttagaagtaactatcatactgactttcatggtagtcattttcttgatttttcttcatagttttaccacctctgtataaatctttaaataatatggtttagtgttgcttattcttgaattttatttgacagaattgtactgtatctgttattttgtaccttgagtattttgcttaaaattaatttgtaagatttaagtttttgttgtatatagtacaatactatatatacaacaaaactatatataccacaaaaaatgaactattagttttgccaatttatactcctattgacaatgtttcatttctttaggaatgtagattttggtttgttttggtggcaatttgaaagtgaacttagtgatttgtaaaattttataccatatatttttgtgttttatataggaacatgaatgtaaactaactcaggaaattctagaattgattgacagagaggttgaccttatgatgagaggagtcaaacatcataaccttgaaggactcagaaaaagaattgcgacactcttttttcattatatcaaaacacctctgtttaatcctgaagttgcaaaataccttaaggtattctacatttttctctatattcctgtttcaaaatcctaagatgtggtatagtaaattgaagtatattcaaattttgctttaacactttacttgggagtccatgtggaataccatcttattggtagtatctcctttgaatgatattttgttatgttggtaaattaaacttactcatttgacttatgtgtatttgcaaccttcaattatttcctaatctcttcaccaactttccaactgaatattgcattacgttgaatgtattatgatttctcacgcctccatggctttgtacataccgttggtttcccctggaatgctattcactatttacccagccaattcctgttcattttctaagactcaattctcatctcatctcttctccttcatgaggcctcacagggagttaaatt

SEQ ID NO: 127186 - DNA, 1046 bp, Homo sapiens
tggcggccacctgtaatcctagctactgtggaggcagaggcaggagaatcgcttgaacctgggaggtggaggttgcaatgagccaagatcatgccattgtactccagcctgggcaacaagtgaaacttcgtctcaaaagaaagaaagaaagaaaaatactgatttggtaaatgattcgatttcccaaaaggtccttagcaataagttagttttgtttctacttgttatcatacctttgacttatctagaacttgttatacacagaaaatacagaatgttcccatgtttatatacaggtttttcctaagttataaagggtgtagatagggcacagacataaagaagtcagagcaaagaagagttaaattaaaaaaaaaaagcaaaaaaaaaaaacagatgtgagttttgtttgttttgtctttgagacaagtgttccattaagtctttggtaatattttaacctatggaaatttgtatggtttgtcttttcagaggctaagaatattgtacacaaagattcttgatgttcttgaggaaatccctaaaaatgcagcatatagaaagtatacagaacagattacaaatgagaagctggctatggttaaagcggtaagtagctaagtcagttttgttgtcttgtgtaacatttaaccaaaaaagtttagttccttattttttatatattcgacacacttttcttctattctccttccttgaatgctcttttcccatcattcctcccttttattcagcaaactcttgtttattgagtgttttctatatgcaggcctctgttacatactggagtttgagactaggatcagatccttccttgaagtaacattgtagctgttccttttacctctcttcactatttagtcctttattgatcttttgctttttatcttggatatatcaatcttgatctcctttttctaatcttagagaacaataaaagcaaaacaaaaaagggcatttttttttcaaagaaacctgtcaaaaagactagactgttattaagtagcagttaataaaagtctagactg

SEQ ID NO: 127187 - DNA, 1783 bp, Homo sapiens
catgcgctttctttactgggcttcaggactcccccagtctcctgattttttccccctactctttggctttctctttttctggttatttctcttatgcccacttttaaaatttgagttagtcaggatttagttcttggaccttttcttttggacctgtactctgtcaccaagagagagcaaatccaaatagagaacggttttaaataccacctatacactgacaacagatttccatgtaaagcactgacctcttcctttataaaagtcctgaatatttaattgcttagtgggcatctctatttgtatgtgtcagacaggcaacccaaacttaacatgtccaaaatggggttcctgatcttctgcctaaaacctgctcttctctcagtcttgctcatctcaattaatggcagctcaattattttgactcaggtcagaaacttgaaatcatctttgattccttcctttctcttacactccacatttgttatttcagtaaaccctctaggttccaccttcaaaatatatcttgattttgacaacatctcactacctcctctgctactaccctcttcctcagtcaccatcatcactgatgtggataattgcattcacttcttaactgcctctcaatgcttgtcacagcctccatttggtctttttttccagccaggctactagagttagtctgttaaaatatgaggtaggtcagatctctcctttccttaaaactaatggctttccatttcactctaaataaagacaagtttcttactgtgaccctctggttcactattctactgatttattttgttatgtctctactagaatgtaggtttcatgaaggcagggatttgtaattgtttcactgctagaactctgtcacatagtatgtgctcagtaaatagtgttagttgaatgagtgtcttgcacttcctatgatttcataataactttattgtcattgatgtaaagaactgaactcatggtttttcccttctaaatatatttcttcctctgtgggctgtatttttcttgatagtttcagatctttctactccctaggctgggaatttggacatcatagttggtatttctcttatacttgtactctcatattcattccaatgatgatttttatttttattttttttgctgatccttttctataacagctctccagtctgacttctgtttactatttctattgttactaccatagttcaggtccttgttcttgtttagagaattgcaacaacctccttactggcctttctgccttgtttctccttcagtccttttaactcactacaatgaagctaattttcctaatctaatcatatgattttcctaaatcttttaattgtccacagaataaagcccgaatgctttaacttggaatgcagaaccacttataatgtgacattttctctaactttatctcctatgcatttccttatgtgtcctgtacagcagtatattccaaaatccccagtggatgtctgaaaaccacatatagtaccaaactgtatatatgctatgttttgtttcatacatacctataataaagtttaatttatgaattaggcacaataagagataagcaggctggacgtgctggctcacgcctgtaatcccagcactttgggaggctgaggcgggtggattgctttagcccaggagtttaagaccagcctggccaacatggcaaaaccccgtctctacaaaaaatgtggaaattaatcaggtgtggtggtgtgcacctagtcccagctactcgggaggc

SEQ ID NO: 127188 - DNA, 1063 bp, Homo sapiens
ttagaagagccctgtcttcatgcacacacaagggtcagaggaagggaaggcctgccttggctttctgttctaaattcacacacctgcacacataaatgccttttaaaaacgtacattttaccttttatttccttgaacaagaatgaatgtaattgtgaccatgaggtgaaaatagtgaagtctctaccaagggaaatgaagatctccactgttctaagaacagcaaaccttgggaggctaagtctgggtggaagaagagaggtgcagtgacacggaaggagcatgagctttacagtcagagacaccagccttaccctctctgtacctcggtttactcaactataaaattgcaatggcaccttttaatgttgttgtgaaaacatgagacaacttagttcagaaaatatcagtcacctcccttccctcacatggaatcagggcaccaactagctcatgggccactgggatcctttttaagtgattatgtcagttgttattctgtaaaagaatggctgaacagcagaaacagactcaaagagccaggccgaaggactatgggagagattttctagtgaaacacaatcctcttgattggagataatccaaagctctgtatatgaagcaaacaattacttattgggtgactcagagagtttgccaagatcactgttataatctgtaggacacaaaggatacatcgctaatcatagttaatacaaaggactttagagggatttataactttcataaattagagtggagcactagagtgaagtaaaggtaattcaatatgtctttctcttatttgaattcagacacttcttgagcgacaggagtagaaggatagctggaaaaaatgcatgtgctccatgtccccatgtctattttgtgaatgttagcatcatcgtgatttgtgtagagacccactagactaaggcttatccaaggagagctcaaagagagacttgaatggtccatccttagcatcagccaaaaggtagctttgaatttaggggtcttaccttccagcattcctctagcacttatttccttcctaccaaga

SEQ ID NO: 127189 - DNA, 1467 bp, Homo sapiens
cctctctacactacactaatctgcctaaaggtggttgtttcatatttataatgctaattatcatacctacctactttaaattttaggtagaaaattatctgatttaaatacaaacatatttttctcacattgagtaatatgcataatgtagttccaaatgtatttcattactatagtcacaatatccaactaaaaattacgctatctagaattgtaccaaccaaaatctcgtattggcagatcttgacaggctggacctgcaagatgtggcttgaattttaaccatttattacataatctctagtgatcatgcatctagttatcataagaaataatttaaaaggttttgttgctgaaagcagtaagtggtgcagtaaaatacttaagttattcaaagaatgttatctttcttgcaagagtaatttaagcacatgggaaagattctagactttttgtttcttgcaacaacagtgccctctgctgctagaaacctttttctacttactatcatttttattgtggcttgagctcagtcaatctggtgcagatgaggctggacaactactaaccaataaaatcaggagtttgtacaaaagttaaatggaacattataattattttaagtaatgttaattgaaaaaattttttctttttgacaatataaaaaacattttaaatttcctagaaatgtcttcagggtaatgccaatttaagatctctcttaacttgtggccaagaaattctagattttccagctgactttggtataatatatatttatcaggaacttctctcagcagagagtacccattcttcgagttcaaagcacaattttaaacatgtaaaatggatatataatttgccaaaggtaattaatttattctttttttcttaaagaagaaaaagacattggttgttgttacaaaaagtctaaattactgttggttgaaacacagcagctgtggagttcagtccaggcatgaagactaaatctgctttaccaagtaaggtgtaaggttgcatgtttcagtcctctaccatcctgcactgtgagcagcactatacctgtgcgttgtctgaaagccttccgtatattctccagctaaatggtcgtctggtagcctttgcatttaacaaactagcatgaggctttttatatctaaatgctacgtgatagacaatttcagctagccacatattgtatgtatgagattcataaagactttcaatcatttcattttcagacaactgaaattttgtttagtatgtgaattctttttttgaaatgtatagtgaataggatgttgcactggtggcaattcatcatggagcataataaaattaatttgacccaaatagaataaaataatgtgtttcatgtgtttattgttaagagagtaaaataggtttaaaatttttaaactgtatagtgaagggtacagagcgatcaatgataatggttgatgt

SEQ ID NO: 127190 - DNA, 2288 bp, Homo sapiens
taattatcgttttaaaagtaacaacttagtttagggctaagagaagataatgttgcttctcttgggcttctgttaattttcaagttctaatactagagctccagtacttcttcaaatactaccttcacacaatcaattttacatgagaaaaatagaagaaaaagattgttctgtgttctgtacatgtaacccacacgtatgtcacctagtcttactggctttttatcattatcaagtacaattactcagccactgtcccactttatatacttggccttcatgggtcctatatatatatttatatacatatttatatatatttatatatttatatataggtatatgtatttatatatttataggtgtatatatttatacatattttatatatagatatatgaagaggttaaatatggaaagtcagtataatatagaagtatgcttataaaatctgataactaaatattccttcaacaaatatttattgaatggctggtgtgtagtgctgttttggtgttgaggatacagtgagaaataagataggcaaggtccgtgctgtcatggagcttaatagataaagtacaataattttagatattagcaagtgatatgaggaaagtaaaatgggataggccgttactgattatggggaagagctatactttacatatgatggtcaggaaaggcctctctgaggaagtagtttatgaatggtttctaaatgatgaaaagattcagtttaacgaagaaatagctactgcagaagttctaaagccagaataagattggtgagtttaagggacagaaaggagaccatcttactagagagagtgacttgaagggagagtacatatgagagaagtttggggagagagagagacaataactggacaaatcatgtagggtcttatggagggaggtagcatcagatttcattcaaatagcagtggtagccacaggaggactttaagaagggtagcaacatattttttaaacttgaaatttaaataatatcactccatttgctctgagtcaaatagactctagagttgcaataatccaagcaggatgtgatggtggtgtggagagtagcagtgaaagaggtgaaaaagagcaggcttgataattggatcgtgaaaaaggaggaagtaataataatttctaggtttttggcctgattatgtgacaggatggtgatgccatttattgagatggagcagcagaccaggatggagcaggaaaagaagattggggaaggaaataaaagttagaagttttgagtttgagaatccatatgaagagtacaagaaggtagttggatttgtgacagaaaggtcaacccagatgattttatacattaacaggttgaaatttgtcacatagatattaaggaactagaaccattgtcttctaagccctgttttaatctttagtttactatcatactctatagatatatttctttagattcactttaaactgttttagtaactagattcttctgggagtcacattatctgtgtttcaggagttaaataattggagaaaccacccaagaattatgtaatgtcattttatttatgcatatgttttaattgtcttgattttcttgtagatgaagatgaagatgaagatgatgaagaagattttgaggatgatgatgagtgggaagactgatctatatattatatatatatatatatttttaaggtgaaatactaaacactactttctgtctgtggattctgtaaaattatcatgtaaatgttctaccaatttgctgtatatttttgttgccttttttgcttttttttaatctgtgcaatacctcatttaatctgtaaaggtttgtcgtaatcctctacaaagctactccctgttattgtgtgcaagtttacaccaggatgctcacttgatttgtgaatatttttcattccatcaacaagggagtttaaatactatatgtgagactgacaaaaaccttaatgtaatttacttataatgccagaaggaaaacactattttcataccctactttttctgtacctaaattttcttaaaaaaaaatctagtatagcactacattcttttttaagtgatgcagaccttagtttctttagcccctttattttgaatacaatgctacatatgaatgttgaagctgatacattgcacagttctgtagacatcactacaccgatgtagtttctcaaattttagcaatatgctctacataaaatcactacagagatactagtggggaagacgattaacacacctcttacagt

SEQ ID NO: 127191 - DNA, 1603 bp, Homo sapiens
agtatgttttcaaatcatatacgttataactgtatgtggaaatgtgttggcctattttagatttttttaaattcatttttgtggtttctagtatctgtttgaatgtgcttgtgttttatgtatgtatacaactgaggtttaaaaccatattattgttctgtcattcatggctaagtctctaaagacttagactaaggttttgtgtaccttggctttatacactgtataaataaaatccttgtgctttgaaagccaagagaagaaaatcatttctgccaagtgataatttcaggggagtgtataccaaattactagaaagtagtataatcaaattctgaatattcagttgttgaattctccagatcttttcattctcctgttctttttggcagttttgccgttgttttatagcactgtgaaactgctggcaaaaattaatcagcgtttggatgcattattttaaagagatattatttgtgattggagtaaaaaatatttttagttatttttgttatagctacaatgttaactcaacaaacatactgagcacctcttgtgctgggcattgtgcaaggtgcttgggattacaggaagatccttgctctcagattttcaaattaatttactttttttgtgtttattcctgatttttacatacttacttaggacaaggtagaataaatgagcattggagatgtctgaatcatgaataggctaatagaaatctaaatgagatgccctctttttgaaggcagggaacaaaaaagaagaataaaatagggaatatatctgttcagttttttttaataaaatattttagttagcacataagtaatataagcatgttaaaagtttaggcaaaataatttcagaaggacacagatgagacttaaaattatgttttttaaattgggatatatttttatagttagcagttactttcttttgtagctgaataatttggatccagaattgaagaatcttttcgatatgtgtggaatctcagaggcacaacttaaagacagagaaacatcaaaagttatatatgactttattgaaaaaacaggaggtgttgaagctgttaaaaatgaactgcggaggcaaggtaacttttatctctattcagcgttctgttttgttttaatcttttgaggtcagtttcatggaaaccagttaacattcatacatgtgaacccttccttgagcagaatgttgaagtctatggacaactaatgtggcccatcacactgtgtcttaacattatttcattataactaaaaaaactttacaaggttttgtttattctttattcataaaaatccatacaaaatcttcccagctattctattttaaagtaaaaacttatagttgcctaaatgttatacttaaggaatcctataaaccaccagattttattgtaattcagaagtaataatttaaatataatcactttctaattagtaatatacgcatttccagaatataaataatgtaaactttctattttgaaatacaaatcctttttcttggataaagtatgaaattttcttttgtacctgagagcacaatttataaccttttaagatttgatatttattttaaa

SEQ ID NO: 127192 - DNA, 1942 bp, Homo sapiens
ctgtcagctgggctgccacactagctctctgactggtcttcctgctgctactcaatcctttttactatctcttttctatacagtagccagagtaaacttttagaattgtagattaggttatatcactttctctatttaaaattctgtaagagcttcctatcatatacacataaaatctatagtccttaaccatggcctgtggaaccctacatgatctagtccctgactttccttcttgtctcctttcactgtgccatttgctcactgtagtccagtcttcatgatgttctttcatgttgcaccctccttggggcctttgaatgtattgttcccttacttattttatttagatctctacttaaatgtcgggtcttctgaaaaatcttccttagtcacacgtatgtcaatttaggaataagacagtttagtgaattaatttttttatgttgatgttgtcttacatatatttaataatattcttctaatttattttctaacagagaaaagacgagatcccccaaatggtaagctttttgacaattattaatcttttaagattttagatgacagtttaatccttgtggaaacatgtaccatacattagtaatatttagtatcttttacatgttaatccttgtggaaacatgtaccatacattagtaagtaatgtttagtatctatgatcaaattatacagtttattgtgttcctatttttaattaatgattgacagatgagacttaggaaacaatattctttgatatttttctaacatgaagaaagaatacatagggtgaagatcactaatacttattatattttaattctggattcacagttgactaagtatacaatcggaccttaacatttttcctagaggcagtacattttgtctagaatatttgttaatgtcctactttaagatttacctttcattcttatttcaaaatattatttcacattgcttatgtgttatatgaagcccctttcaaaatgaacacctactgttgtggtgtatttagaactaatttagctctgtataatgctctttaatttgataatgaccacttgaagtattatgaattcattttttaaaaaacattgaataccagagagtaaaagcagaataccaggatgtaaaagataaggtctcaggggtagaaattcttactctagacttcataaactccctgaaattgtgtgctaaatatgttcttttctctggagagagaggatccatggctttcatcgtatttaaatgaggttcctgactctatgaaggtaaagaatcattctccagcacactttgttatgatagagaaaatggctgctttttaaaagcatatctcaaatcctcttatcagaacctagaatgattattcaaggaaaacttacataatacagagttcttaatatatgacagctattggtgattgttggggtttcttttaaacagatacgttgccttttgattttgtccttaaatttctttttctgatacagaaacatgaaccaaatgttgctgtattaaattctgggttgtttaccttattattaattttttaaatgcctgactaccttcagtagtgcttaacaggtaccaaatattgtatagtttcactttttcttttgaatagaaatattaatactttttagggctgttacggggattgaagtaatcaaagcttagcatagtgcttaataaatattagttattctgatgaagatgatgacaacaataatagcaactactagttaatgatcttttactacctgccaggcactgtacagcaaccttctgaagtagctcctattatctcttttatagataaggaaaccgaagcacagataggtaacttgctcaaggtctcataactagtaagtagtgaagcaagattcagcatcagatgatttgaccctagagactggccctttaaccacta

SEQ ID NO: 127193 - DNA, 2588 bp, Homo sapiens
actcttgggcgctaatatgacctgatagataacagtgaagagatttttacacctctggtctcagctttatttgtaaaatcagataaccatcttggtttgttatgaggtatttcactgagattaaatgagatctcagttatggtatttggtaaattagtgcttcttttgttgttgttgttgttgttttgagacagggtcttgctcttgctctgtcacccagcctggagtgcacagcttactgcaaccttgatctccttggcccaagcaatcttcccacctcagccttctgagtagctgtgactacaggtgcatgccaccacacctggctaatttttgtattttcttatagagatgggttctgctgttttgcccagcctggattcaaactcctggactcaagtgatcctcctgcctcaggctcccaaagtgctgggattacaggcctgagccaccagtcccgggctaaattagtgcatcttaatgtctgcttccaagacagctgagagatatgacatgcttctgtcactagcagtggcttactagtaatcactagcagtggctaactatggcagtgattctggggggtggggaacacatacgtagtttgaaagaaacccccaagtgctttgacatatttctcataaccattgagaagcactatttagaaatggcatacacttactactccactaagaagaaagggattccattgcagtggttataatgtgtgaacagtgtattttacatatttttaaattgtggtctaggtagaaccttgcatttctgaatagggcaatgactatctttctctaaccacttatttccaattgctggacactcataattcgtcacctttggtattaagattaaacatattttttatactatggcaatagatatggcagccatcatggcactcttatccatagtttaaccttgatacattttaattatcagtctctttctgcatcatgattaatactacttatactagtatataattagaaaggtactctgcaaaagttaagaatttgaagatggttaattagcagtacaaggaaggtatatttgaccctcccacatctataaaattgaggaaaagaacataaagtattcctgcagtgtttgatagtacattgtctaaatattgctggtggaactgtgctttggtaatcagttcatgtacaaaagtatcctattccttctatgtaacattgatgacctagtaattattctggttattatgtatttgaccaagtagctgaatttggaaatggttggctagtgagattatatcttagctgaattaaactgacttgatatgtaggttttatgaaagatacgttatccagtgttttcagttttaagaaattactgattagattatgtgacactatttatatattataaatatgttacatgtgtgcattaaaagttatttttaatataaacagttttcttaatatgagtcatcttctttgttttattcctagagattatgttttggtagttcttattttaatttttaacttttttctaggatgggaaactattgtgggaacaagagctatacaataactttgtatataatagtcctagaggatattttcatacctttgctggagatgtaagtcatatttttctttattgccatctttacttttttcattgcttgccttttctaatccaaattatttatagaaccttattgaaagatcaaattcaatttgctattttatttttttgctgaagatgaaatattcaaattagtatatgtgtctgctgtgataggtaacttctctaatagtaatcttttacttgaacttcttcatgcttttgtgttaagttattcagatcataaaataatgtcttatctgctagtaaaattaacctttcgttctttagaaatatacttcttttcctcattgtttttatgatataaagctaaattcatacattctgttgtttcccctttgtgatgaaaatatttcagacttgtcaagttgctcttaattttgccaatgaagaagaagcaaaaaaatttcgaaaagcagttacagaccttttgggccgtcgacaaaggaaatctggtaacccttttttaattacttaaatcaggccagcaaactaatgctcatggggcaagtgtggtccatttcctgttttttgtaaataaaagtttactgaaacttaactgtattcattggtttacatgttgtctttggctattttttgtcacaacacagttaaatagtgatgacagtgatatatggtcctcaaagccaaaattattatctgaaatatttactatttacaaaaaaatttggtggtccttaccttaaaataaataatatttttgttgagaactattttttttagatttaccgaagggcccaatacaataaccttttttgttgataaaatttcatatatattgacttttaattttgcatttgtgatagcattttttgtaaagttttaaaagtattttatactttgtaaacaaagactttaggtaagcttagaagcaaataagcagagttgctaacaagatctgtaaacattgccttgtctttctattttgttcc

SEQ ID NO: 127194 - DNA, 1057 bp, Homo sapiens
gaaaaaaattattcaccatttattcgttctctaacaatattttttctgtatgtatgtgtattcaagtttctgacctctatcattttctctaaagaactttaaacattttttgctaggcgtatcagtaacaaatttcttcaattttcagttgaaaaattatttctctttcgaaaatgtttgaaggataattttgctggatacagaatgttaggttgttgtatttttttctttcaacactttaaatatttcactcaactctttcactatactctctccttgtttgcatgatttctgaagagaagtccaatataattcttaacttttttcttccactggagagaaaattcctccaataggaatttttaggtttattgaaggcacacagaatgaattcttaattttttgagccttgtttcatgctcctaattattatttttttcctatttttgagaaagacctaagaaagtttgagaagcttttaactttatttgattaaacatacaccggattatcacaatctcatattaagggagctcaaagtaatgctcatagaatagtcgtaactattgaatttaactgtcagaaattcactgttagaaaatctggaaattagaaattggcttcatgtgtacacccacatacgtatctgtaggaagacttattttagtgctacattgtagattgatttttatgttgttgtatctctttattccataactttacatcaacctgttcatttccaaaaacaagaatcttccatggaatgctaggaacagtttggagtaatctaaaacattatgtaatacacagctgcgagactttgaaaaaagctctgatagcagtcaggtgacttacttaaaaaatactgtgtcttactcattaaaaatatagtgctgattattaaagacttagtccttcactgtccagtatggtacttggtagccattagccacatgagctattgagcaattgaaatgtaattaattcaaattgagatgttgagtaagtgtgaaatacacactggatttctaagacttagtgcaaaaaaaaatgtaaa

SEQ ID NO: 127195 - DNA, 1062 bp, Homo sapiens
actttatgcctaggtagtcttctataatttttgtaacttctggctcccagatcagtgaatacttattgattgattgaataattataattactcgtttattttttaggagctcattctgcgtttcttattgcttgattaggttgttaagcccttcagtttctaatgcacatggtatctggactttagtcttcatttattaagcgaccgaaatggtttagttgtgctgctgaactaatataggtggtaacagttgtctaacagtagtttgtttgtgttctaaatcagacctgttgggtagggattcttacataggcatacagggaaggatatgcttagagggatcattgtattgatgatggcctgagtaaggcactgttggtggaaagtttagaccgggaatgtatttcaccttgagtagtaaggaaagataaaagttaaaattcactggatttggaatatacaaagatgagaagatacctttgtctagtatagaggaaaaagatgagcacaaaaatgtatgtgacgcagcgtagctgtaagcacaagaagagattcagaaaagtccaacagggttgggttatgaattttacttctggttattcttagctctatatatataatacagggacatttcttaactagtctcagccttcatgtctagatttgtaaaatgggcttagtcaaggatttcaaagagtaattcaatcattatggaaaatacttagagtccatgacacaaagtattctgggagtttggaggagcatatgaaagaaagttgttatgaatactattcagtgctcagtttagatttcctgttactggcagggaggatttagagtaaaattttcagctctatattgtatttgttttgacttaggtaaattaacaattttaaagtcagttaattataggtgtgtaaattaaaagttaaggagcagcttgaatgtatctctttggggagtgtctgggcagcctgagcctccctggctgctaattgaagaggaagaaaggggtcctgatgaaaaagttaggagttcctgaattttagtccatgctctgct

SEQ ID NO: 127196 - DNA, 1150 bp, Homo sapiens
ctaggcctggtttctactctccttcccactgattttttttttccccccattggtgggagggggtgctgctctccccgcagccatgcgcagggaaacctcaatctctggtagctcttggcttttggggccgagaatgattcttagtttggtgctgtgcggccaattccaaccccagatggccggttgggagcgagcagttctgctgtgggaaggggaatgtgtgttgttgacggaagcattcattacattggctgctggcaattctgggggtggggaggttctgctctgtggtgtaggccttgtcgggatcatactgcggtgactgggttgaagtgtggtttgttgaaatactggctggatccctttctctccactttgctagcacctgcagagtatgtgccactggaacccagaaaacacggaaatttcaacaaagcaataccattttataactcctttaagtaatattaggtatgccaaaccagatttcacctgcttctttaagaagttaggattagacaatttctggaaagttattggattcattgttaacttcataggagtccaccctttgtatcttgtgccatccggttggagattgaatcgttccattcaatttcagatgtgtttcatatttcggaatttagaccttagagaacattgagtttcctgattagaaggatgaaacaagaggagtggctcaaaacgagaattttgggtaacaactttaagcccctccccattcacacacacttttttcaacaaatgagaaaactgatccagtgagcccaagtcatacagcaatttaataatgtaaccagaactagaaaaccaggactcctcacacctagtcctatcccattgtactttgcactacatcatgttgttttagaagggtatttttttttcctgttactgatttatttctaaaagtggtgttaaagaaataaccactttgcctttttcaccaaaaactaattaaaatacaagattcttaaagcaccactaatgtttgcatatgctcagtttaggaaaatcttcagcactttgaatgttagttacctccaatgaaaaaaattcagttgctggtttagtagattagctatgtaacctgtatcaaaaaggaagtagttgtgctgtgttctacata

SEQ ID NO: 127197 - DNA, 1080 bp, Homo sapiens
aaaatgctgacagacacacagagagtataagtattttcaggccaagagagttgtttgcacaattccagtagagaccatgtaagcccatgttccatgctgctgggaacaggttagggtgatggggggcaaatataagtttaaaaaaaaattgggaaccaaacataaaatctgtttaaatatgatttaaggagaatgaagaaacgacctatgattttaatgactagactttatgtcattggtgagtacccttcaatattggacagccaactctttaaaagactgatgagaaaatttcactggcgtgttaaatgtctaccaaagaaataaaagtatgctaagttaccaccacataaaatagcttttggtcactccctttcaataaaataattgtcataaaatgtgtttgtaatctaatcttactattttagcaagaacttcctccagaaagtacttagtcactgtgtacatgcgtgtgtgttcatgtaacagcaacagagtatatgtgtaaaagagagtttaattctgttgtttgaatatccttcagtttcccatctgtatagtaaataattttcctggtattttaaagtacgtctagtcttgatttaaaaagaaactccttaatttcagtatatttgttaaaataaggtgttagataagtgagttcaaactatgtctaacaaacatattagtcagaaatttagcacagactttgtatactgcataatagcaatatcataattgtttttcaaaactcttgagatattgataatctagaactttacatttttcaccagttgagaagttgcttaatacaactagaaaatgtgacataagcctcacactgacctcacttaatgaccagccaaaggaaaacagaagtttagaggcttcacagctgctgacacagagtccttggaaagaattattttggaatattcttactgttgctaaagaaaggaatgagaaggtcagaaataggaaaccaggaagaaaacaagcttgtcagcattcaaaactgattaccagggaattactttctggttaaaaatccacagtgttgcagtaactttatttagcaat

SEQ ID NO: 127198 - DNA, 2009 bp, Homo sapiens
tctatgatcaacctttgatgaagagagtggcagggataaaatagttatgaatcataattcctgcagtcaaaagatttttaaaatatttttaaatataggaaagggagatagttttgatcacaagcacatttgacattgtcatgctacaagcattttagttgaaattagaccaaaagtgatgaattgttggcagtaaacattttctgtaacaaactccaattatccaatttaattcatggattaatttttttatttattgttaactagtttcagattttacaagcttttgttttaccaattttttgtgagctttgttttctgcataaacatttgattaataaaccagatcttcctcatttcaaattgtactgcttatacctgctgccactgaattttccttctgtgactatatttgtacttatgttgaaacttgcagatctaagtcatattaagacaattttgatttttctaacaattttttatcgtaggaaattttaccagctgcagatttagcagctggtttaatttttatatactatttttaatcaggctttactctccctggtcaatctttgcatcttataatagttacataatgataggaatttgtgttgatctctaaccaagtttaacttgaatacctttatttgttgtcagttttaatttgtgttaactgtttggattcttttggatagatttctagaagtaagtctttatatccaaaagcatgggcctggtagacccattgtaaccactattttagatttttaaaatatataccaaccattttgaaacccaagatgtactcactgttacctgcttgtggcaaaaaattcaaattagtcacaattgctccaaaacaataacatgaatctagtatgtattttgaagagagaataatgttaaatttggaagggacgtttacttacttttcaagccaaaataaatgttaatttttctagctcagtggtaagcttaggtacctatttcagagttatttattttgttttaatggttaaatcgctttttttgtttttgtttttgtagatgcatatccgtggttggaatgcttcatcaagtcatacaatgtcacaaatggaacagataatcaaatttgctatcagatttttgacaccacagttgcagaagatgtaatctaatattgccatccaatttagcatacataaaatgttgccactcaccttccctgtttgagcttcttttcctgacctgagttttgtatcagcaatgttgatgatgttagcatgggtatgggattagaaaatgtccttaccttaaatctcttggcttttactgggtgcaaggtaaataatggctatggattttgttttgctttctgttttgcttttgtacaaagagacctgcttaaacaagtactgctgagataagtgtctgatcaagctacagtgtactttaagtagaaatggcaaagttgctttgttggggtgctgatactgatgattttaggataaattcatttctttaaacttgtaatacatggttttattgcttgtttctctccaggatagtagagatttctctatttcacctcaacctaataaaagtggtcagatttataatgttaatgacttaatattatccttttctaatagtctcatgtaaaatatgccgctattacaacttacaactaattgaatgagatgttaacttagtaaaatagtttgatttttacctgacagtgtttgtcaaatttaaaatcatgaatattcaattttatacaaacatttatatatatatatatagatttgtgtatgttatttgccaaagacagatataaattacctggtttaatattagtgaagaataaataagtgcacacatttcaactgtttcatttatttgccctaagttgagctgaaaaatgatatgaggcaaagaatcgaaataggtgtggcaatgcagcagatgtttagggctgtctacatcccaggtactgtgctaagcactaaacatgtatttgatcctca

SEQ ID NO: 127199 - DNA, 1979 bp, Homo sapiens
taagttacttatttcttcccccaaattatccagcgtttatttagtacacatttgttgagtacctactgtgcctggcactatgctagtgggccttgggtatacatcagggaataaagacataacccttcctttcatggagtgacacttaatagagcttaaattaattagattttatagtatatatttggttcaggaggatgcatgtcataaatatgattcttgttattctgattgaatataaaaattctttacagtacttacagatcatcagtatttggagaggacaccactatgtgccattttgaaacaaaaagctcctcaacaataccgcatccgagcaaaattgaggtcatataagcccagaagactatttcagtctgttaaacttcattgccctaaatgtcatttgctgtgagtattttccataataaaacaaacgttttcatattatttgtgtgtatatgtacacatatgtataattttgtgtcttaggaataagtaaattgttaatatatatattatattttgcaagaatggtaaattttttaggtaaagtgctaaattcttagagaataaattattctgatagtaataaaagtgggtgctattttcagatctaaaattcagcttagtcactctgataaaggcaaatgagaaataataaatgatgaatatatttgggcagactcatttgtcacagaagtatcttctgaaatataaacctttattaactgaaatttttgaaaggagttgtaattacttgaaatatctaattaagtgataaagagagccttgttggtaaacttctgtcctgcttaataactagaatataataaatataatttaaattttctttagtaattgagaatttctcagtgcctttactctgaacatcagtgattatataaatatgtaataaatgtatataactgttttgtaatccttttactacataatcggctcaagacatattctgaaaatcatttttaaaagctcctcatctttttgcaatttgcctacttttcctctgaatatctaaaatgatgttttggaaaatgtagataattgatggttatatgcatttggatgccctaaattgagtcttcactaaaatgtgctacaatgtgtaaatatctatgtacatcgccatgtatttgtgtgcttataaattgtgagtatctgtgttcattaatatacatatattttccaatccaaaatttgggtttgtttgaagaaattttttattttaaaatctctttaaataaaatgtgagggaactgtttttacccatttgagcttgaaatggtggttgggattaaaatgtatatataaggattttagataattcttcaaatattatcaaactttggtttattgaattttgtaaaatcatacagctttgtaaaataaaaccactctccgcgatcattttttaaacaaataaggatattatctcagaaattaacggaaactgtctaaagttacacagttaactggcaacagaaccagaagaaagccatacaccttttgattccaaatgatgccatttctgctacatggtacctaaccatatgacttcttaaaattattaattattaaacagaattggaaatattattagtttagaagtgcccttctccctaagtgtggtaagtggatatttaactggagtgaagacggggccactgcatttttttctcctactgggaaatttagcattctttacagaggagaaaaaaattgatgctagaaataattatgagtaactttgtatcacaaaaccaggcatagaaatcactggtagttaatgtaaatatgatttggatatacttacccacaaaatatcaaataattatctattgaaaaaaagttatttgttctgcaaagtgaattatctccataatttacataatttaagaaaaagtaactgactcatctacatgtaagaatgatactttttaatttgataacttgttaaa

SEQ ID NO: 127200 - DNA, 1048 bp, Homo sapiens
cctccttctgctacatcagctaagattaaaaaaaaattttcagaaaaatatttttaaccacaaatttattaaatgtgctattgtaaaaattttaatttctcaaattggagaaggaagataacaaatgtgaatggaagaaggattgatgaaatcttttaatgttgtgttgtaattggaggtaccattatgtactcatgttttctaggtaaatacagaagtcgatgtagctgtgtgtatgtatgatacgcatatattcacacgtgtacacatttgtttatattataggggtgtgtgtgtgtgtgtgtgtgtcagtatgaatgtgtgttcatatgtaccctatctctctctccatgaaaaagcatagaggcagcagcactccagttgccataagcacacctggtgctcagatcttggtttataaataatatttctctctaaaggaatcagagctccttggtgaaacagcagatttctgaactagaacaagggaattacaagattagtatggagtaaccttgtactagaaagtaagggggttctcagttaatgatgaaactcgtcaaatggcttaggatagaacatgtctaggaacatttgagcatcaaaacaaataatactaattgagtaaagcaggaatgcatgagcccatgttgatgatgataaaggaaaaataaaatatatggggttaagtggaaatatctttcttaaagtaaaataacaaatataaaagggataatgaaattagaaaaaaaaaagctaccattttgtaaccatgatagtcattgttgagttagttgtgaatctgtggattctaaactatcaggatatttgatgaaaaataagatatttacattttctctagtatattcttgttaaatacaagggggaaacagtaagtttttagtagagaagtgattggacactacctttaccagctgaataaagtttaggtctacagtaatagaaacactcactttgtatgccccttgatgtgatgcactgagaagcatacagtatcacttacgcattattcctgccaaaaatgcat

SEQ ID NO: 127201 - DNA, 1048 bp, Homo sapiens
gttattagatctacatgttaaatatagtatgactgatgcatttttaaaattttagtagtaataagatgtagacttgttttctattatttcatagtttgtagtcctatacatgaatatttctgtttccctgtcaaggtcaccttccctctcatttatttacttttttgtcccgttgatgttgggttctcttcttatgtctttcactgcctacttcatagtcataccatggacagttttgaagcattttgcattactgtgttttgcttttaaatcagcaagataaaaaaataacttaagacccatcaaatctctgtatatacctatcccagtttagagagtaacttctggagaagctggatgtttgatgtttttcttgcctggacatcctatggaggatacatttgaacaaatgcctcttcaggcctgctcctatggttatttctctctatactatctttggaataatagggcaagaaatggaatgcagtggcacttggacaagtcatggagtttagcattattatgatttacaccttgcccatattaaaaaacagagaagttagaaatcattgaataaaatacaaagttctagcagttgaaaatagcacactcatatacacatggaatattatgagaaagtcgtaaatacatgccctgcagaaagttaaataagtcaaatatgataaagctgaagctaaagcaatataaaatcaaacaaacttagagcgaatctaggtcaaccagtcatactctggcaaaagtgacattcttaacaaatgagcatttgctaacaactgaacacttcctatgacaaggactctactactatgcactgaggcatattctatcttttgactgtgtttttagaaaattcttaaattctaagataaaatgtgccaacttttagctgaaatagttgagtctacattttctctctgcagaaacacagcacatacctgcatcccattgtaacagataacttttttggacaagtgaaaaccactgtcacgtaactgttagtttaaaatacaatattgaaaagtcaaaa

SEQ ID NO: 127202 - DNA, 1050 bp, Homo sapiens
atttactgtatcatcctgatttttatgacagttttcataaattctttatgcagtatggatgcaactcttcatatctgctgtaaatatcttagcctttgttttcattctaaatttagttatgtttattttataaattgcatttttcttatttgactacatttatgtttcatgatttgtaaaccttgaagcaatagaaaaggttattttctctccagacaatttacactgaatgagatttttatttttgttttactaaactttctaaaattagtatttatagaacacttctgcaaaataattttgcagtgtgtattgaaagccaagaaaatgtctctgttttaatcctcttagaagacttaattaaaaggaagaataaggtttggtgttttgaagtaagcatattcttattttatcaaatgctttaaaatattgaaagtcaggtaaaatatttttgtgttttccagattattgctcagttgtaactattgtggaccagacaaatgtaaaactaacttgcctgctctttagtggaaactatgaagcccttccaataatttataaaaatggagatattgttcgctttcacaggctgaaggtataattcatattgtctagaacttatatttatttgaagagaactctgtattgttcactgaaactagttagcactaattatatagttgctttgttagaacatgacagcaagcttttcaggagataagaagtaatgtaaatattatcagacttcaaataatttacagtaagaaacatcttcatttgaacaaaccactgctttcattccccagaaatgtattacatgccatgattaaaactggttccattctgtcttctgtttctaaatacagactaatgctatagaagttttatctgtagattttgataaagaacatttattttttaatgttttaaaaaagagctttaggtcaacaagaaaaaatgtatacaaagattaggagattatattattctttcccatttcttgtgttaattcaagttcaatgaaaacattgagatactaagtataaaatc

SEQ ID NO: 127203 - DNA, 1003 bp, Homo sapiens
caccagaataacgtttatgaactcatgcaatgtctaacatctatctaatctgtgtcactgtatatatcataatatttattatatcataacatatattctttcttctttcatcttccatgctgtcatgctcttgcaatagaatgaaagcacaagtggaaattatgtaagctcacaccagaaaaataaagagtgctcttatttttgtattgtacagtaagtttccttgtaaaagaagtaagatgacagcacataatgtagcttgattcagtgatttgccttcataggtattacttgaatgttttaatgatatacttttctaccaatggaatagtgttgctcaaatactgattggtttaaaaacagcagtgttttagtagataaaaaggagatgaagcaactttcatggaagaactttttctggattgtgtaatttatgcatgcatgcttctttgattaaaaaccttgctaagatgaactaccagctctcccttataataaaactccaaggcaatttacacttaatcatactgagtcaattcgttgaattgctcaagattgcaaaatagaaaacttaatttatcatttgttatcttttccagatttatatcaagctatgtgaattattaccaaagtgttaaactagttaagtactttgtcagcagtttaaatatgaagtattactaaagcattaaagacaacactttatcaatggtttaaagatatacattataagtactgtgtactatttatttaaagtacgaatgctgatttattaaaggattttctactctttccactttccctgttaatgttagctaacaagaagatagacttctaaattacctttagctttgtaccttcgtttgggaaagagcaaaaaataaggcatggggaaaatatttttatttgtgaagtcattactgaaggatatttttgcgtgtgtatttggtaaaacacttcacttccttggagcagttaaataagacatattttagcagtttgc

SEQ ID NO: 127204 - DNA, 1416 bp, Homo sapiens
ctaatagacccattctaaagtcagaagattgtaagttgaaccatcataagtcagggactatatgtatatgctgtttgctatgtttttattgaagaagtataatgttttaattagattataggttatgcctttatgagctagtgtgcaaattgtaccatttataaacaaagttctaaggaaaactagttggataagctaagctgtgtgcattgccttatttcaggttataacttcttttagacacttaaaaggataaaatagttacatggatttgctgctaatatgattataacatgattctacaatgtaaatactttgtataaatgtattcactgtcttctctttctttaggttccagcaacaaattatatatatacacccctgaatcaacttaagggtggtacaattgtcaatgtctatggtgttgtgaagttctttaagcccccatatctaagcaaaggaactggtaggtattaaaactggtggagttttttggagtggaaatgcattattgatttaggaacacggttccatctgtaccctaagtcctagaatagaagctcagttctgacctataattgccaaacaacactgatgcatattctttggctagtttaatttgtaaaataaacgtgatctttagattctagagtctagttaaagacagtaaggacaaagaatgaagcaaaggatgccaaacagcaacgtgaaaccatatgaaaatataaaattcactggaaaaggtaaatatataaacaaatgcagaatactgcaattctgtaacattgatgcataaatcacgtttaattctgttatagaagttgaaaggcaaatatataaaagctataactatagaaatatgttaatggatacatagtataaaaagatgcaaattatgacgtcagtaacatgaagtgtggtggggggtagaagtaaaagtgtagagtttttgtatgcaattaaagttaaattgtcaggttaaagtagattgctataaatataaggtactttatgtaaaccccatggtaaccacaaagaaaatacctataaaagatacacaaaagaaaatgagaagggaatcaaagcatgtcattacaaaataatgaaacacaaaggaagatagcaagagaagaaaatagggaattgagtgtcacaagacagatagaaaacagtgaattaaatggcaatcgtaagaccttcctaatgaataactactattattataaatgaattaaattacctaataaaaaatcatagagtagctgagtgcattaaaaaaaacgagatacaactatatgctgtctacaaaaactcaccttagatttaaggacacacataggctaaatgaaagtgaaggaatggagaaagatacttcttgccaatggtaaccaaaagaggagaagtggccatacttac

SEQ ID NO: 127205 - DNA, 1087 bp, Homo sapiens
ccattgaactatgaagagttgtggtaatttggcattatcagcatacactcagttatgtttgcaatctcatgtgaagaaaaaaacgcaggaattgcagagctacaatacctggttagggcaagagatttttagaaaaggcaaaataaggtctttcgtttgattcatagacagtttgttttgggagggcctgctttgtgccaagtcctgtaaatacagagcagaattagaaatgaccactatcttcagtatgctctcagtccaattattaaatctgaatagaggattgtgagaattgacaccaggcccttgtatgtgcagagcacactgtggtaatgcagaagacttccacttgatagagttttaaattattgaaggaagatgaccaaaagcccagacattttggtgtatcttaaggtttcgttgttaaaattaagggagtaagacaatgaaaaatatatatgcagcaatgcaaaactcttttagtatttctgttttagtatttggaaaataagaaaaggaaatttaaagaatgagagaggaagggataaatggagaatggcttcttactactgttacaaacctaagtagaaagaaaatatctttgttcttattagtatataaatggaaatttcttattatgtccatgccctgtatttgtatgcacatatattagttttgtaatatgtggagtttttgcactgtcatgcctttctcaatgtagtttctcaactttgagatttagtttcatttaaattccatccttattactattggaacatctgagtttcactacataaaactttcttagtgatttagcattttcctggtccatgaagtgggacgttattgtcatctgtggctatattgtagctgtagatgttgaagatgttttagaggaagtggtagtctaaataatgtattcagcaagtgttaaacaagtttaggttaaccagttttctactttatagaggtaatttttattctaaacataataatataaataaggatttatatgacattccaaattatacgtattttggtgattgattcaaaaacttttttttttctatgtaggacaccattgcag

SEQ ID NO: 127206 - DNA, 1127 bp, Homo sapiens
cctctacccaacatgggagaactcacattctgataagtccataccatatatttctttattgtgccaagtcacaatctcctttatttgagcgtattaattctcatttgacctctttggatccttcagatgaagactattttcattccatagactacctaaaaaatatttaaagatagatgccatgtccttctttagttttcttttctgtagacgaaaaacatcatttaaaaaaatgttcccttcttctggtataagaaattgaatatccagtttgtctgtttctttaaggttcaacaccaaaatccatctgcagcatggaattaagttatctttggcaaggagagcaggcctataatctcacctctctgagaaaattttatttctattattacagaaatttcttgtttctattattgtacctaaaggtggtatagcttatgggtagtcataccatatggttggttcatattgaatttattgccaaccaaagtttctatgtttctgtctaggtagctgccaactattttttttttttagcattctgcacttgagaattattatttttgatcttatgattatctctgttaaattttgatttgttcaacttgacccatatctgtacactaccatatctattttggtttatacaacctatttattatcccactcagtgtttttgtcttaacatttttaggaccttgttttctatctaagccattgataatatttgagaacagaaagaggtccagaacagaatcctgtggctcaattctttttccaggttgaggttcttctcttattcactagccttttgggtacaaatgttcaacgagttactagttgcgctaacatccagtctacatttttccatcttttctgtttgggtatgttgttttctgttttctgtcagatgttttgctgtaatgcaatgcatattattgactgcattttataaccaaacagactaataaccccctcaaagaaagttatgaggttgatgtacataatatgatatattaagcagtttagtgggataaaataggtaccacaaataatttccaaagtcagtcattcacaggtagtaaagtcaactgtatttatttaaataagaataaggtctggatgga

SEQ ID NO: 127207 - DNA, 1113 bp, Homo sapiens
tagaaatagtgagttgagtctcaaagtacagcacagatgctgacatgtttttccagtgctgggtaagtttgtagctgagcttcggtaccaggatttgaaagatctgaataaaaaaatatatcccttcagtggaaagagagaagtctctgatctgtcacaacctactaaatttatgttttaaatatcttcacattttatgttataaaagttctgctggcttgtgctttataacacacagttgaatggtactattatggatactagcttccttccaggaggtagaatgaatacaacataatccattctgccataacgtgagctattagaagtgatgcttctggctattaggggtaaatcatatctgtggaatgaattaagagttagactattcgcagtgtattggatttgcctgtttcacaactgcattcattaagttcaaatttgatgagagctgttcatattaaatttgataaccccaattctagcaagttacacatattataaagctcctttgaaaattctgtgacattcatgttatttttgtcctttaataactaagccatttttaaattaggtgcccatatgtagccatgtgttagtgaaagtgcttcataattgatgacttttattgaattagttcagaattcagtgctcttgtctgattttatcttaatgctttggtattgaagaatctaagattactgaataatttcagtctttcaattgaatttgatgaacttctgtgggactcctacaatatccagagcattgtgcaagatgtagttggtttgaagaggaaaaataattctcaatttttagaaattactatctaatgaaataataatagttaagatctatttgccagaaatcaacaacctccttggagcaaaccaaatggagaaaatgacctatcttatcatatttaaatttttcttaggaataagaaaaacgattgtaggcgaatgtaaatataatctctctgcccaattgcatgtaacagtttcatgcccggtttatgaaaaaaattactcattaattctttttttttttttttttttttttttttttttgagacggagtctcgctctgtcgcccaggctggagtgcagtggc

SEQ ID NO: 127208 - DNA, 1017 bp, Homo sapiens
aatttgttgtctatatataattataattaaaaatatttttctctgtatctctggttattgcttctttctcatttctggtctttttagttacttttttcctttcttttattagacttgccagtctttttaaggaaccagcacttgagtatttcatcagttctattttttctatttgttataatattaatataacttttcatctttaattccttccttatttttaatgtttattttgttgctttatgaatgttttgtactaattgatggcttagttcatttattttcattttttaatttaataataggacacgtaagactataactttgcctttgggcacagctttgactgcatctcaaaagttttggtatgtagtctcttaattgttgctatttaaaaataatggattatattactgtttttattttatttttgatgtattatttaggatagtattgtgaggtttttgttatttgttaatcctactttctttttaataaagaataaacttattaatatttatgttgctactttaataaagagctgattttgtttggaaaaagtgaaattatatgtgaagtggtctcatctgaagttgtatacaagcaccatggagagttccttgtcacacgattctaccaatagcatcagctagtggcagctatactaattattgacagcagggacttggtatatcactaatgccaataatttacaggaattctgattttataaagtcctatttttccatatgaaagttaagaaagaactttaaaaatgtttattggaccagaaatcctaaagtatgataaaacttaaaaggtcatctgctaactagagcaactcatcaaagtttatgaaatcaggaaggatttgaatattgtgaaaatggactgtgtctcaaaatgttggcattagaacaatttttcttttagacttggcaaaagtattttgaaaaatatttgttttttataattacagatgtaatttatgtacagaaataaaataaaaataccctg

SEQ ID NO: 127209 - DNA, 1021 bp, Homo sapiens
tatttagttgttgtatcatcatttattgaaaactcacttttctactgttttaaaaattccacatttatcaaatactaaattcctacacacacttggagcggtttctgaatttgttgtttgtttaatttttttatatcctctattccttaaccatgctgttaattattgccattttatcatttgctttactgtgtgttaagtttcaatgggggtaaatgttactcttcttttttaaatatttttggctatattttttcatgtattctcgcagataagcttcagttatgttttggtcacattccaaaagaaattctattgccattttgtttggaattgctttaacaatatagactaatttggggagaattaccaactttgtaatattaaatttcttattcaggaacttgtcatgtgttaaggttactgaagacaatctccaaatgttctttagtaattttgtatgttttgcatatttttattaattgtattgttagatatttcatttctttgttgcatttgaatgggatcatttttccatcattttttattagtggctactccttctggggtcaagctatttatttttgtgtttgataacttttttgaactctttcattaatactccctagttgattctcttctaagtagccaatcattcttaagtataattaatggtgatttttctctcttcctttataatatttatacctcatgtgttaaataaatgatggtaataactttgcccttattcctgatttgttaggtatgccattaaattttaccagcttttaaatgttagctcttagactgaaatacaggtctttatcatgttaaagatgtggtttgatggttcaaatatactaagcattttattagaagttgttcaattatattaagcatactctaggcaactagaaatgatcatgtgattttacttctctggcctattatcacaataaattatgttagtagtttctcaatactggattatttctgcatgagatgtatcctgttaaataat

SEQ ID NO: 127210 - DNA, 1067 bp, Homo sapiens
gaactagcacatcatcagacattccatgctctgatcaccatcttcctatcctagattccttgctcactgacagctaattcgttgcttcattttttccccactgtttatcagcccctgtcttgcgttctcgtccttgcttagtctagattctgtgatccattatcatgatcattctccttgaaatgcattgctttcagcactcttgaacagcaatttcttaattttcctggcaaaatctcaactctggagaaatcttaccatctgccttccatgggccttactgggacaactgaacattttctttgagaaaagtacacagttcagccaattcatttttacttccaatccattaactcaaacctcaagttggtgctgttgttcctactgtagtctcagttctccacatctgagactactcttcataccttttcatctcctcaaaatgttctgatcttttcctccctgtttacttcacatttgcctgagaaaacagaatttactacatacagactttctcatcttgtcaccacaagatcctccaacccagttaccttggtaaccttcctttttgtgataatagagggagcttcacagattagctcctcctgtcatgccccgaatcccagcccccttgccttttcaaggacttcttccttaggttttcccctttctctcttttgcatcatcaatcctgcctcctctcaatggattattccctgcacacatgctccagtgtctttcatcttaaccacaccttccctcgtgcacgtcttctccatctgtgaaccatctctcagctctcctttagaactaaactttttaatggagttgtctattctttcctaccgggatattgtgacaccagtcccacctggtctctctgctaccactcttaaccactccaatacgtttttgatagagtggtagcaacaacctttctcacaaattgaattaagcaaattgttgcttttaggataaaatctaaacccctttaccatggctcacatagccttgcacagtctgacccttacttatccttccacccccgtctatgctcctctctttat

SEQ ID NO: 127211 - DNA, 1073 bp, Homo sapiens
ttatggcatgcttgttatatgccaagcactctgctaaatcttttcatgcataatgtccctaatcctaccaacaactctatgaagtaaaacctattctttcattatccctgttttatggaacagaaaatagaaacttagagaagttcagtgatttacttaggttcacatagctggtaagaaacttacactagtcatctaattggcgtgtaaatgcatatgtacccatagatacaaatgttatgttatgctctttttttgagttgcaagcacagaattttacttggtagcttctaaggagagttttattagaagactttatttggggaaatatgggagatataagtgatcaggccttataggattccaagagtaattgtacaactcagcttcaccattcagatttcaactaggtaggtgttacaaaatgagaaaaaaaaatcagtgcaactctagtgtctggatgttgccctctgagcagcagaagtattgcttctctgctgctattagcccttttcagactctgctttattttgttttaaacaaattacctcactctgtatcttctcaatatggtcttaactgcctcgttccaccctctgctctgtgtccttccgctactttccccttctgtacagcttgagttcaatcttctgtaagaggaaatctaattagtccagttagattcattgcctgttgggctaatctctcatgtcagtccccttcataggttgctggccagtctgtagattggctgctcttgggacagttgctctctcttggtcctgtcatttgtgatcatagtggcagagtcagtggcataaaacatggccctgggccccatagaaggaatcttttggtgggaatctcttaaaagaccatagtcctaaaatgtgatgagctttccagtatacatgtttttctttcttttgaaaggtgacagaatgaaaggcaagttgtgatcttgactgttaggtcaatgcagcatcagcaatcctttccctactgagaaaatgtggaaaatagtgttttgatcagtatctgcatttccttttctaaactgcctgatgacattt

SEQ ID NO: 127212 - DNA, 1260 bp, Homo sapiens
ttatacaaagcactttaatgatagatgcaaccttatttttcagttcctatttttttaaagaccacacatttactaatgttaatatgaaggtaataaatagcttactgatattttatggatgcagacaatccatgcacaaccacttcttatgatactagtttatttccttaaatattgctacaaaaggaagatgcgggtgtaagccctgatttttttttctcccaagaaaaatcttaaaggaccactttagataatatttgattcctactgtaaaatttagaaaatgatgaattcttgtccatttttgtaatcaagattttaggaaaaacagaagtacatctatctttatgaaattttgggcaggtttttgtgtatcaatattttgtacttttagggaatattttattttttagttatttgtgtcaaattataattataaaaggtacagcagaaaatataccatgtttttatataggttcacacctgtacttaggagggaccctgtccatctatatactttttgtataaaattttaaaatgttaaagatccacaaggtcttaataaaatgattctatagctagaaaaacatttaccttcccagtgctttgcactaaaatatactgtgaaaggaaactagaaagactgtaactattgctggaaatgttctatattgaatgtacatgctcttgttggaaaaatgtactatatgtgatggaaataaaccagaatcgaagttatttcagctaaatgtgcttcagcaaaggtgcattggttgaaacttaaatgttttattatcaaatttaaacttattcagtgactatgagcagctacacttgaattatattctgatagttttatttctaagaaatagagtaataatttctctttaatttaaaaacagatttactttcccacatattgaaaatttgtacttatagatctaactttaataactaatagtataatatatttagggaactaaatgtgtaggtggtatttcatttataagccatcttcattagttgcacattattaaacctatatgtttgacttttgcaaggtgttatcttttatgcattcctacacacaagacatattccaaagatattttccagataaatgctgataacccctgaaaagatatgaggattcctaaaaagctaggggttgctctttgcagcatcctctcatttgtatgccagcctttccctctctgcttgcttgttaaatactatagagaagaaagaaaaattgatatt

SEQ ID NO: 127213 - DNA, 1027 bp, Homo sapiens
gcagtaagaatgttctagttccattaagtaggagttgtccagtatgttgtaaatcatttgctacaaaagcgaatgtaaggaggcattttgatgaagttcatagaggactaaggagggattcaattactcctgatatagcaacaaagcctgggcaacctttgttcctggattctatttctcctaaaaaatcttttaagactcgaaaacaaaagtcttcttcaaaggctgaatacaatttaactgcatgcaaatgcctcctttgcaagaggaaatatagttcacaaataatgcttaaaagacatatgcaaattgtccacaagataactctttctggaacaaactctaaaagagaaaaaggccctaataatactgccaacagttcagaaataaaagttaaagttgaaccagcagattctgtagaatcttcacccccttccattacccattctccacagaatgaattaaagggaacaaatcattcaaatgaaaaaaagaacacaccggcagcacagaaaaataaagttaaacaagactctgaaagccctaaatcaactagtccgtcggctgcaggtggccagcaaaaaaccagaaaaccaaaactttcagctggctttgactttaagcaactttactgtaaactttgtaaacgtcagtttacttccaaacagaacttgactaaacacatcgagttgcacacagatggaaataacatttatgttaaattctacaagtgtcctctttgcacttatgaaactcgtcggaaacgtgatgtgatacgacatataactgtggttcataaaaagtcatctcgttatcttgggaaaataacagccagtttagagatcagagctataaaaaagcctattgattttgttctaaataaagtggcaaaaagaggcccttcgagggatgaagcaaaacatagtgattcaaaacatgatggcacttctaactctcctagtaaaaagtatgaagtagctgacgtcggtattgaagtaaaagtcacaaaaaacttttctcttcacag

SEQ ID NO: 127214 - DNA, 1020 bp, Homo sapiens
tgtggaggaactttatgttgctgtctggatgaccatgtctgttgtctcaggtgacaggaagttttagctattgacagaggcacttagagttggctgtgtccaattgtaagtgagcagagcaatcagaaaatggtagctgactttgaagaaagccattctgtctccatgggaaaaaataaaaaaatcttaagtggtgtctgaaactaagggaaaaacttttattatctctgtttgtggactgagacacaccttatttttctcatttgttaactatgtaagtggaattaaaaaagttttaaagtctcatttttgactcctcagttaacttcacatagatttaaaaaatctaatttttagagaaggtttttttaatacatagagctctgtagtatttcatttagcaaatatcagtcatgcattatcctgagagctggggtagcggtgagcatcaagaatatcttctctgttctaatcttccagtttaatggcgatatggaaaagaaattaattacaaaacagtggataagctagtatagatatctagggtgctatgagagtgtaggtgaaggatttttaacaaacaacaacaaaaaacaagaggttgattattgaaggcttcttggaggaagtgacatctatactgggatctgaaggattattagaagtgagtcagatcaggaaagtgggagaatgttatagtcagagaggaaaaaacataggtgaaggcctgaaaagtgagggaaagaatacatttggtgtatctgtggacctgaaagaaatctggactgcttggatcaacgatacacacacttgcgctctctctccctctctctctctctctctctctgtgtgtgtgtggggggggtgggggggtgggggggtggcaagggtaaggggaagcatttgtgattgataattaagattgattagttaaggttagaggcaaatacttttttttggatgtttattgagaataaatatgcagtccctactgaatataacttaactgtataattagga

SEQ ID NO: 127215 - DNA, 1141 bp, Homo sapiens
tggttttaaatagtaaagtacaaaagggtatagaggaaaaaataagtttctatactattctgtccttcagttcccctttgctcaggcaacgctgctacatggtttatgtgtcttcttccagagaccttttatacatatacaaacatatatccctcattttcttcttacacaaatggtagctgactctacgtactcttgtgtacctttgctttattaactgtagattcaactatttattgttgacatcagtccatagatagatgcctcattttttaagaagcctgcaggttttgcagctgcaggttttccacttggaaattcctgatgattggctgacttgagacctgctgtttgctctgaacccctggtttcttctactaccttgactgtgccttaccctttgtgtagtttggctttggctgtgtcattctgataggatcatgtttctaatatggtgtcttcaaatttccctcctctctataacactttcagtttatcttccttcctctttgacctctctccccaaaccaaaacaaaattttaaatagcagataaaaagtgtactacctttacatatttattaaatatcttttatgtgtttattaaattggtttagttgagttcaatattctttcagaatttcttagttgtgtgctagaggcaaaggaactatggaatgcccctatggttagaaagagaaaaatgaggggaaaagagaaggataattttgtctggtattcaagactggtctttaatatgaagctgacatcttctttttaagttcttgaaatatataatattgtaagaagagaaatatataatttgtagaaaaaagattctacatgtagaatatgctagagcagtacatgcagggaactctttttttgactcttagggaggaataaattgtaactttaattgtatggtaatgaaaaatgagaattagcttcatgtgatgtttgctgtcattatctttctaaatttgggtttggtcatttaacttaggcttttttttttctccttaaaacaactttaattgcaattagtttaagctctgactgaatggtgatgcttcagtcctgattctgaaggcaaagcgtagggtggacgtgatttttctgaggtacataggagagtgcca

SEQ ID NO: 127216 - DNA, 1111 bp, Homo sapiens
gaccagagcagggagggagccaatctggagtacctcaaaaacatcatctaccgcttcctgaccttacctgactccctgggccgccagcagactctcacagccatactgactatcttgcacttcagtccagaggagaaacaagtgataatgcgactcccaaccagtgccagctggtggccttctggcaagagatgatgccattttcatgaattcctggaatttctgtgcctcttttatgtgggaaagggcaggctctggtttctgctgcctcttctcttacattgtcatttatttcttcactgtgttgagctgggaggagtcttcaatgtgggaagggattttctgccaaatgccattaatgctgctttatccttaggccctagagatactgaaagtcctggggcagtatcttctgatggtgtgcatgtgaggagaagatgaggttaggactgagaagtgcagaagttggaacagtggtaaggctgttttaaaataagatgttttgttttaataatatgctcctggcacaaagctaggagtaaatgtgactccaaagggagttcagttaatctctgaaatgcacaaaacctagctattttctccctctcatcacagtctgagtctggtccattgctaccccaattctctggggacataaaaccaggctggaaagggaccaggaagtttgaaatagtgacatatcatccactagtcccaagggctaaggaatagtgagtttattctggaaggaactgggaagcttagtctaattagtgcctggggatgacctatgcaatcacaccgcttatgaccatcctagagagggccctgagcaccagcttgatcttagggatttccaaagtaacctgctttttgcctggatagggttaaaatagacctttcttgcctatccttgccttaacctatctgcctgaggttggcctgagattgtgagtcaacgactttgctatcttttcctcagtgttgaactttcattaagaaataaagtcctagcttcttacagagaggggtccaaatggtgaatgctcatcctgcctggattcaaggaattagctcagagattggcccctagcttttctgcctttgtagg

SEQ ID NO: 127217 - DNA, 1048 bp, Homo sapiens
caggaatattggataaggaaaagaatgctgtatgatttcttaataggatttgaggaagcacctgagaaacaacagtaacacacattatatgtggttaggtggaaagcagaacaatagcagatgtaccaaggtgcttcatattgttcagtataatatgtgtcttgcagaatccaagcaggtaataggaacttttgttagctcctgaatcaaccgaaaaatccctagttagcattcttgccaggccatcccaaacctgtgacccttttgctcccctctcctgctttctcagagtttgctgtggggcttttgtggatgcatttttgtctgttcccttgttttgcagacagctcttgcagaggatcaactccgtcagcaatctcaggtagaagaacagagggtggcagccctggagaatcaaatatccgaggtgtctgagctgctaggcacctacgagaaagccaagcagaaggaccagctggccattcagaagctgaaggagcgcattctgcagctggacctggagaacaagacactggctctagcagcctccagcaggtcccctttagacagccatggagaggagtccagtctggatgtcaatgtcctgaaagataagatggagaagctgaagaggctgctgcaggttgcggccaggaaaagccaggtgaccctggatgtggagaagctctgtgacctggagataatgcccagctcggaggctgctgatggggagaaggctactgcactctattaccaacaggagctgaaacagctgaaggaagagtttgagaggtacaagatgagagcccaggttgtcctcaaaagcaagaataccaaagatggtaacctgggaaaggagctggaggcagcccaggaacagcttgcagagctgaaggagaagtatatttccctgcggctctcctgcgaggagctggagcaccaacaccagcaggaggctgatgactggaagcaggagctggcccggctgcagcagctccaccggcaggagctggagcggtgccagctggacttcagggaccgcacactg

SEQ ID NO: 127218 - DNA, 2040 bp, Homo sapiens
cagtgctactggttcccaagggctaaaaccggagcccctaggggcctggacgcaacaaaccaaagcccagcggccggccactgaaaatgggggcaggggccgctgcggagcgatgaatcctttcctcagccgcgctcgggctgccggttcggcggccacaggcctggcaggcgcgttagagacctagacccgttcccaagtaagggccgcacgggacccaggccagcagcggcaactcgcggagcttcagctcccctaggagccagagccgggggaggcggggccgagagccgggggcggggcccggacgggggcgggcccgcggtgacgtcgggagggcagcgacgcgcggaggcggcggcggagcctcctcctgctgctgctgcgccccatccccccgcggccggccagttccagcccgcaccccgcgtcggtgcccgcgcccctccccgggccccgccatgggcctcaccgtgtccgcgctcttttcgcggatcttcgggaagaagcagatgcggattctcatgggtgaggcagatcgagcgcgcggcccggaccggggcgccggccccggcgcagcccttccgcccccgcgtccctccagccccgctcacctgggtctctggccccgagtcacccacctcataacgccccggggcctctgctctcgggcgggtcccggtctgcatcgccgaccccggggcctgacacccggagctgcgggcctgggtggggtgaagctccctccgccccagcccggctggtaagaagggaggattccgcccttggagacgacttttaaaacgagcgcggcctacctcccgtgccccttgcctcccagtcctctcccgctccgcgccctctttggagttggctcacgccacccgactgccctccaggcctcaaaggtagataacgacgcgcacctggaggcgctcccgctctccgccccagtcaccatcagctgttgtggcctctccctttccctggtctctagggggctccctcgctcccatctccatccctgtgcccctttccgttgcagttggcttggatgcggctggcaagaccacaatcctgtacaaactgaagttgggggagattgtcaccaccatcccaaccataggtgagcccggggacgaagcagggagcgggagcgccgcggcgggccctcgcggggtctgctcccagttctgccacttttctggagctgaccctgacaccagatacagctatttgagaagtgggtcagggtatctctacgtggataccggaggcagggtggatgtgacctagccccgccctgttgaccgccagttctggggttctgttcccctgggccttgatcattgccttctggttttgtgtccctgctgaaatctaagtagttttagtgagttcctttctttcaggagttttctcatcttttttttccaattatctgcaggcttcaatgtagaaacagtggaatataagaacatctgtttcacagtctgggacgtgggaggccaggacaagattcggcctctgtggcggcactacttccagaacactcaggtggagtgttgggaggggactttctaaccccacgggaaaaggtgttagggctgggagaacagaattgttggcctaggctgggcccccaggccaaggaaaaaacccttccccacttctaccccttctgtttggctatcccctactcactcttcagaactcaccttagtcttccccagcttggacttctctttagaagcaggattctgggaccaggctgcctgatttagccctcataacatgtctttatttccttgcacatctttggataaactacttcctctttgcagtggggtctctagtttgtgccatgactcctgtagagcttctatagagttctgtaaacttctgtagagtttactagatgagaaggattgacacaattacaaatgggaagaaaacagaaagggccacactacggtatgtcccaggcagaagtgattgcttctcctttcttccttccttcctgcccagggcctcatcttt

SEQ ID NO: 127219 - DNA, 1159 bp, Homo sapiens
ccaacgccatgcccgtgagcgagctgactgacaagctggggctacagcacttacgcagccgcacggtaggggtcctgcccacctggtgctgaatcctgcctcttgagggaagctgcaggctgggacagagatataaaggcattccttttgttcctggttgctgacctctttctttccttttccccacagtggtatgtccaggccacctgtgccacccaaggcacaggtctgtacgatggtctggactggctgtcccacgagctgtcaaagcgctaaccagccaggggcaggcccctgatgcccggaagctcctgcgtgcatccccgggatgaccagactcccggactcctcaggcagtgccctttcctcccacttttcctcccccatagccacaggcctctgctcctgctcctgcctgcatgttctctctgttgttggagcctggagccttgctctctgggcacagaggggtccactctcctgcctgctgggacctatggaaggggcttcctggccaaggccccctcttccagaggaggagcagggatctgggtttccttttttttttctgttttgggtgtactctaggggccaggttgggagggggaaggtgagggcttcgggtggtgctataatgtggcactggatcttgagtaataaatttgctgtggtttgtacacggtgttgtctgtagcctgcaaaggagaggctaggttactgggtaccaagagacaacgtgggagaggatcaaagcagctaaggctgcagggcaaccccacccacacataccctcagctcagcttctccctccttattcttgggctggaaatactgtagggtttacagtggtgcaaatctcattccttcccagctccaaggagcctttgctgaagattacaggatctcccttcatagttccatgaaccacgtaattgtttcccatcattctcgtagctacttagagccgttcttaatgtttgccttacacattaaaattagagggggagagaatgtgcgttaataatacgaatcctgaggtacatttcagaaaatgtgattcatcaggactagtctgatgcccaacaatatgcatctttaaaattacccagaggaggccgggcgcagtggctcacgcttgtaatcccagcactctgggagg

SEQ ID NO: 127220 - DNA, 2535 bp, Homo sapiens
cgcgcagagcggcggctcctccgggggacccgcggtccccaccgtgcagcggggcatcatcaagatggtgagaacgggccccggacaccgacccctctgcctgccttcgggcgggagtcaggcattgactccaccttccgccagcctgctccatgtcccagatcccctttcctctgcccccttcctcacttttcgtcgattctccgaatcctctcactagacggaagcagacacggagtccccttgttccttgcctcccggacaccttgacatcaggggtcacagtgatttccgaggttgcggcattcggatctcctgtctgtttaccaggacagatcgattactgattgattaacagagacaattcgttgatatctgtcctcccatcccccgtctttctgttcattttgacatatgctgagtagttagtagtttttcgagatcctgacatcggctcttctctactagtacttggccatcatgaaacttttctgttcccacaaacgctgttacttgactcccaagttttctcactctgtggccctcttttcctctctttccctccacctcttgtgtcgacctgaaagctcctgatctttgtgtacttttgacttctaaaaggttaggccggcaagaatcttagtaatcatcattgttctcccgtcccttaaagataaggagataggcttgaagaaggcaagtgacttgcttaaggtcacatggtggtttgggttggagccatagcaagagcccaagtgttcggattcctggtctagtgctcatagcactatagattctgcctgattttatataccctcaactttttgaaaattcttcaattttgaatttgaacctgcaaagtttatttttacaatttactcctagctccatgataatttgataatataaattcagtttatcacttgcccccagttgtcctccccaaaacccttccaaatcttggaacctgacatttcttggttttaccaattttctggtttatgatgactgtaaacttctagatgtcgtttcatactgcagttctgacatttgtatctgcaacagcaaatatcttttgtgatactttctcccaaggctccacaagttttgctgttgtagaaagttttgaaaaattctattttaggcctggtgcggtggctcatggtggtaatcccagcacttaggaggccgaggtgggaggattgcttgaggccaggagttggagatcagcctgggcaacatagcaagacccagtttaaaaaaaattctattttattaccctgttatctttcacaagattaaaatgttctgcagcttatgtgtgtgtaaagctgattttaagatcccctcgcccaattcccatgtgctcatttcttaaggtaatagtctgccaccagccaagattcttgggattttcagtactgccttttccttttgtttatgtgtaatggagggtcagaactgatctgaaactgaatgagaagagaatttccaagatccgcatatatttttcctctgaaatactgacctgacccatgaaaggattatcctaaagtggctcttctttcgttagctttttcatttgcactgatcttctcttcaccataggaacaaaaacatctcttggctctccggtgttgggtttggcagtaagaaagagtggatctttctgagatttctccttgctgaggtttaaattgttcttaaaggtctctctcatttgtggaatgggaatagaatgaggctgaacatagttttgtttccgccaatgctggaggcttttagggcatctggattctgtgcggtgactgcccacaaattacccccatggatactgaatatcaccaattacttgtttattgtcatgtcttgtgctgactattctgctcatattgtctcatttgtaatacctaacaagtagataacgattatcagccacattttatagatgtgtaatttgaggtttagaaagaatagttaacccaaggacaggtaccttatattggtaataagaggcagagctgagacttgaacccaggcctgtctgccacggcacatgctcttcaatatcatgcatgatgtctctgacttcatgactccagggtattaatttataacatggagggtggggccagtgatgcataaccacaaattgcaggaaagtgaagctgtctataattgagaaaagattagatgttactccttgtcttgtctgggagctgctattatggtaaatgacttcatttggtgcttatggtcttcacataggagtatggtgtggaagatgattgagtctgggtagtggcatatacaattcagtgatttgagccatctgtactgagtatagattgcactgccttctctgaccacactacaggggttgggtgagttacaggcagggattaggggaggaaagctgagtgaactgcagagtgacaggcagatttgtgccaggtttagaagccttgtctggaatgaaaaattgaccactggcaaattgctgtgtgtgaagctcttctgctaagcaaagttgta

SEQ ID NO: 127221 - DNA, 1048 bp, Homo sapiens
gcttgtttctaataggattaagactaagattttctgactatcagctagtcctgtgtattcccaaagtcactatttttcttctaatggagggaaaaacatggattaaaaaagaaaatgccaaaagtaggctttataagagctaaatagcatctagaacttgccattgttgatatttctcttagcattttgttactacatggaatttactgctgctctggcctctggcagtacttttttgcctagcaagctttagtgaactgtgttagtgaaaagcaaagtagcatgcttcaggggatcaaaactaattatcaggtaagaactcgcttacgcatcctgtggctcattaacatgagtgggaacttctgaggccagtgactagtgctggcaatagtgggcaaatgatttggtgaagtctatgccccagtttatttggaggatgaaatttggggagcaagtgaaaattgtgatttctgtttgtaggtttagcagagaaaattggccaggtttttgaattcaggtaacaaggtatctaaggcctgttgtccactcacttctcagcataggctagctatccatctgacaggtgtggttctaacaggggcatagtagatatcctttagagtctgatctttggatttatttcatttctccaagaagagcatagttacatactgtaggaaattttgtgcattatcagggaaaacaaatgcaatgaaggaactcaactcttactgggcttatctggcttttcctcatatttcttgctgggagatgaatacacaacccggtttctgttgctacttcctctcttgggagactgacatatgctttttgcttttacagcagaaatttatgtggaatcacaggttgtgaacattcgatatagatggaatgttacgggatttcacttactttcattagactcaatataatacattaatgatctttttcttcactctaatgtttaagaaaaaaatgaacagtggtttcagttggcattttttaaaaattaggaagttaagcaacttatgggaaaaataaaactaaa

SEQ ID NO: 127222 - DNA, 1067 bp, Homo sapiens
aagaggaataaaggagatttaaagaatctgtgcttaaagttagtaatctaatttattaactttgtccctggaaagcagcatggcagagagaagagatcattggcccagaagtcaggggacacaagttctggcctgggtgctgccatttgggtaatgttgggtaagatattccacctcaaactctccttttctctaacatgaggttgctggatgcattgtctctaagcattttccagtcccataaggctgtaattttataagaaaccctgtgttacatttcatttaggcatgctgaaacaaagttgagaaatctcataccttaacggcttgactttgaattgccgtttatcttgcataaagcaggttttctgttcctattcttttttttttttttttctaatctttagtttgagaaagaagattagtggaaatatggttttccagtgtggaagaccagagagttagaatgagactaaatgattgaatggtggggtggagagagggtagatagaagtaaggggagttcttggtttcctttcagtagtgtatcatgataaactagtgggagtgttgcttgagacccagaggaacatggttctagtgggttttattcacctagtcctatctctgcttcagaacactgtgacattttcctggtgcagcagatcttgacttgagaagggaaggagagaggaggcaacttagggagcctctggctcatagggagagtctattcttgccctgctcttgactgggagactgtggtgggagtgtgggggctaatagggtcctgagctctgttcttcttgcttggagccaggactttggtttttgtttagttttgttttcagatctttttcagttctatttaatgcacaagtacaagttgagtagcccttatctgaaacgcttggactagaagtgtttcagtttttggaatatttgcattattcttagggcttagcttcattcacctggaaatctcatattcaaaatcctccagtgagcattttctttgagcattatgttagtgttcaaaacatttcagattttggatttttggatta

SEQ ID NO: 127223 - DNA, 1144 bp, Homo sapiens
ggagcccagtgatttcctaaacaggtcatcgcatcaggacaacctagaagacgtttcccaggcattgaattagaagctctgggactggcctggaaaggtctattttcaaaaaaaagccactcctaggctattctgaaagaatcagtttgggattgatctggggctggcatgtgagatccactgatcttgtttaactcctgtactgtttgtagttgaaggggcgggacataaatgataagtgaaatgtatgtatgtgggggtgggtgcaccagaattttatgaggggaggatagtggtttctttctcttcgcgtttgtcttgatggttcccaggacgctttgtttttaatttgtggctcaatattgggctggggtcctcagggtccacttatagtgactcagatcctattcctaggtcacaactgacagctgagaagttgttttatattcctgatttaggccatatgctcattttaacactcatctgcgacttttccttctgtttgcatagattcccaggatcttcctgtaatttggcaccaataacttggcacattatttcaatggaagtctttagtgtcatttacaaaactaagattttaaattcctcactttctgttcttgcaatcctgaggagcttcatccctaggccttttggatctctcctgtttcttattcataggccccattcttaacaacactaaaaccccaaatgatctactcaatggtcttagtctttatattccactagcttgtctaatatggaagtaaaaataattctcaggtcttacgaagtccttatgattaggggtcacatttacagttcccttgatggccttttttcattttggtcaacagttttccagtttatcctggaattccttcagagcgttcaggtggatgtcatccagtgttagtaattgaataattggtatttctatactcaacttgctgttaaaatttcaagcagtagagaggtatgaagtaaaaaagaaaaatccctagctgggcatggtggcccacgcctgtaatctcagcactttgggaagccgaggtgggtagatcacttgaggttaggagtttgagaccagcctggccaacatggcaaaaccccatctctactaaaaatacaaaaattagccggg

SEQ ID NO: 127224 - DNA, 1651 bp, Homo sapiens
gcccctgagtctgagctgtcataaactttcatttgaaatctctgctttatatgttaaagagtttaattatttgttattcattggagagagtgcccccctcaaaaaaaaaaaggtgtggacaatcacagagctgcgctttagtgatagcatagggaaggtagaatattatgagtgtttttaataaaaatggatgagaagtctcttttatggacagtacttgcagtgccgggatcataaacaagttccagatcatgctgatatagctgcctgttaaatatcttgatgtgtgcagatctgtgtttgatgacagagggcgggaagggcctgggacactggcatcgtggtggggaaggactgaccagttctcttgtaattgccagctgtgttagatgatcagggacttgagtttttattcctttatgataatctccctaggattttaataatgaggagaatcctaggatggtaccttaattcagcaataatggactttaaaatgtttatggtagacctgtgatttgcactttattttgacatctaaaattgactatcagtatttcaaataggaaaaatttcctatttgagtttggaaaataagtggggaaaagtcatgcttctcatgagtatcatagaagctgacttatttcctcaagctctatggtcagctctgtatataaatctgagtaagtatattagacattctttagagatgattcactctgagtaatactgagtattatacttaacatcactatttctataggtcaagtttagggaaaagtgtgcatgactttacaggaacaaacctgaagaagagtaaatgcagtcattttcatttctctaagatatttcaagatctctggttggctttcatttagttgtatctggtatacaggtcccctaccacgttttatcattttattatgatttgatattttgtacagtacattttactcaggggcacagtgatggcagtgctgtgaggaggagagatgagatgacagcagccattgttattatggctagtaacgcagtagctgctgtcccccatccctggatcaggaacagcagctgctgtgcttctctcctttctctgggccttggaactggggaggaggaaagttaaagttaaaggaagttaaaggaaggggttgctggacttaacggatttctggtagtgcccaaactaaatctttagactagggctgagtccatcattgtttggtaaacaatattacagatcaggcgtcgaaaaatattccgaaagcacagtccttggaattgttaatcccactcttgacaggcacaagaacacatctgtattacagacatgcacatacagtgcttagaataggtctttatgtcaaaatgagagagtgtagaatttggtgttttgagtggctgcattgttttccattatgtaaaatgctgttgatcaactacactttgaaagcactgaagagttaagttatatgactgctagtcaacatggctacagtctcaggggaagaaaaatgactcagttaaatgccatcatctttcaatagaaacaaaagaaaaaggcagaattgaagagaggcatgtgcagaaatcttctgaaggagactatagaacagtagtcacctgagaacttgttagaaatgtagaccct

SEQ ID NO: 127225 - DNA, 1102 bp, Homo sapiens
aacatagtgaaatcccatttctattaaaaatacaaaaattagctgcacttggtggcacacgcctgtggtcctagccacttgggagggtgaggcatgagaatcgcttgggcctggaaggtggagattgcagtgagccgagattgtgccattgcactgcagcctgggcaacagagtgagactccatctcaaaaaaacaaaaaaacccttcattttttttccttattaaaacatgtttcttcactagaggtttatacatttaccccaatagtatatgtttgattcctttttcccatcagaatgttatatttatgagttgtgataactgttagacctaaattctcagtggctgttcagaatcaaacttcttgatttttgctgtatacgtttagatgcatgctccagaaattctgttttctctgacctgttagtatcgttattcaagaaaataatatgtagtagttaatcttattgagtggtttggtgctctagtctgtctttatgctttgttttctcagattgcaacacttaagaaaattcagaaatgttcctttctgaaggggaacatgggaagagaaaaatgaacactgatcactgcagtaactttcccttacctttaatagcctgagtacttgaccctcgccatttgatagaggagaaggtcccctctatatagtgatactcttttttatgtcctggagtcagttaatttttggttcctcctctgataagttaacacataactgttacctatcctgaaagattttctttcgacagctgggctagatttctcttaaatgacacttcacatttgtctgctatgtgcggttagttcttcctgagttgttctgtcttatttctgcataaataagccttgatctcccaggtccttggcaacagcagagctcagcgtgaggtagtgaggacttggctttgcagaggaccattgtcctggagacagtcctgaccctggtttccaggaggttgagtgagttccttcatggtaaagttttcgattgtgaagtctaagctacagtcttgattgtgttcttttatgtaagtcatcgatattttggctcatgattctcatatcatagatttagta

SEQ ID NO: 127226 - DNA, 1047 bp, Homo sapiens
ccccagtctgtttattctatgacttttctattgttggatttctgggtcaatcatttcagaatttggccccaggctttatgtaggtatttctcttataaaattaaaaacaatcctgtttatttagtcattcaacagatgactttgcatgcctttgaagtgcaaatgctatttgaaatgttggggatacggtggtacacaacctgcattatggtgatacggcctctggaccattcattttctctttcttccccctacgtaggtcctctcagggtgcgccatcattgtccgaggtcagcctcgtggtgggcctcctcctgagcggcagatcaacctcagcaacattcgtgctggaaatcttgctcgccgggcagccgccacacaacctgatgcaaaggatacccctgatgaggtaggtgtttcctgaggccatcgtgagcctgtggacctaggtaatagcccactgtcttctgtcgctgatgccattttgatgtactctttctttgtattttgagtatttttatatcatagaactgctgattctggatgtgcccacaagcagcttgtatctgttgtttatatgtttactacctttagtggcagttgaagtcttagagctttttcttgtaccttttcccatagacttagatttgttgtgttttcactactacttttcttggaatagtttaggaacatttcctgggtagccttaagcatttgaaatcaccattggttatggcagagctcttttattaatttatttttgaattcttcattcatttacattgttcagaatgcagaaggatatatagtgaaaaatcgagtacttcccctgagacacctgaggttactagggtcttgtgtctccttccagagatagttaaaacctgtatgatcagacactctcattttcataaatcgtagcatgctataaatgctaggcccatattttattattttattaaagattgtttttctttaaggttcagagggtacattttcatgtttgttacacgggtatattgtgtaatgttggggattgggcttcta

SEQ ID NO: 127227 - DNA, 1132 bp, Homo sapiens
aagcatttagtttttaaaattataataaaggacattttattttaattaagaagttagtgaagcaatggtatagataatagagatagagaaaaactcccataattctactaccaacagcaatcagactaaatagattaaaataaatttaagtagattaaaatcagttctttttcactggtcctccatcagggaccacacatattgagaatattagcatatacctcagggtcgtttaatgaagattaaacaagataacatgaagtgctttagtgcatgcttataaaataataaatgttagttgtggtaatcactactactgcttgctaatttctcttactacagatactcctagtactgttagatcaaccactgaagattaaatatctttcagcatttttcacattttgggcattaacaaatgggtgaaccaacattttgaatagtttcttttcctattgtgtaacagcttgattgcttccaaatgaagagtgttgacccttcttggagctgaccaagttcatttgcccagaaggaagaactagtgtagcctctaagaaagaagggttggattttaatttcctgttttgtggatgagaatcttgggcagagaaatacaaggccagttggaacttgttctaaaatatcataactgtatcccatgttaacaggacggtgaaatcttaccagaactatcctaggtgaaaggatactgtgtaatctgatcctagcattctggtgtagttccatatatttatacagtctagtgctttttgcctctcccagactaactcagtctcactgtttctcctggtaactcttcagagatccctgtgagatgaaatatttgatagctgcagatttcatcttttcctagcccacagtcatcatttctccttcctaataatccaatgtctcctcaccctgctgtgatttggttttcctcctattgtaccctcaaagctgcatcgacacaagttaccagtaatgtcaattgattgaaaaacctgatttccctgctctcattttgactcccccaccccccaccccaacgctgacatccaggcctttaacaaggcctagggattctgcctccttaaaacctctcttatccatacttgacatttgattaata

SEQ ID NO: 127228 - DNA, 1028 bp, Homo sapiens
aattaagggggtgaataaatagaatacaaagcaaaatctgttgtttagaatctggagaaactgacaaggcctcacttgttctgttttcagagtcaggaaaaatttatatctcttcaaagtctttcaagtctgtgttgtttatgtatctgtagttgcttaataggtaaaatgtatttgtttagccaatggcaatgtgaacctgttagaaaggggttgtgtgtatgtcaggtttatagtatgtatatcatgttcaagttcactagtgttggctgtcagtaggatggattgcagctggttttcattaacattttagtctctgaaaagtgctacatctataatttggaggctataataatgctgttttatatcattaagtccctgctctcttatatgactgtcatagctgtaggaaaggctttagagaaacatttgcatgaggtataccaatgatgaggatgagcaaaggcaaaaatgcgccttttgcattctttctaccttcacagacataggggccaggtctttcaccatagacttgtgtggtcctttctgactgcaaggagacatttgctggactctataattggggtgtgccagtgggaatttgttgaattaagatacttgttttggtggtgtttttggacgtatgccaaatttgtatcttaaggacaattactggcttgattaccatttcagtattttgggggaattcagtttgcaattggaatgaataataaaaaaatctcacagcaggactggaccatctcaacaaataaatctcccctggagtaccagtcctttttcctccaaaattgttttgacttcaagtcactttttcccagttttgtgtttggttcaatctcttacactacatttcttcatctaattttgactgtgaatttggatccctgagggtgtggttgccttttggggtagggaagagaggtgaagacttctggcttgagaaattggtaggtcatccttgcttaggagtccctcctgctgaagatgagaagagattcagtttatgc

SEQ ID NO: 127229 - DNA, 1751 bp, Homo sapiens
atctcctgacctcgtgatccgcccgccttggcctcccaaagtgctgggattacaggtgtgagccactgtgcctggcccagtatcttgcctttctttcaagaaagtgaatgcaatgaaaataatatctacatgttatatgacatcggtagaagattttatggattttttgggggagtgctcatcattaaaaaacaagcttagaccagagaatgcaaatcctattttgataatatgtgattacttgtctgctgttttgcatgctgtatttgagctacttgaattgtaggtaaaattgcatcctctgtattgaattacttcttgtattttacaactactacatcctgctttgtgtttttctcattttagtgcttctctaaaacaaaagattgcaatactgttttcagaaataatagttccttttcactgcacatgtatccacttatttgtaagtggtttaagacagctgttcattgattttttttaatctttgcacatattccatttcctactcatagtctggctcagaaaatatctactgggcataatacttcaaaataaatttctggctacataggtttttttaaactcttgtcagtgaacttatgaggattttgttcattttctaattattctatagatgcactgtcatgacagttttcttcttatatataggatttggtagctggtaacctttttgtaattcagatagaaattgagcaggtctgtgctttttaagaaatatgtttgtttagatgtgtgggttcttcccatttttttgtagtagtcacccaggagatattagataaaccagagttaataatgaaggtggacttgaaccatctaggctcaaaaaattgtatgcctggaccatagtctcccagctgtgggcttacattttatatatgtatcttgcatgttttcatttactctcgctctttgttctggtttgactggtagtctttcttctggatacatctatagggtagagtaggatgctgcaccaactgtgctcccatggtagtggtggattccatttgctgagtctgaatgatcttgcatccttgctttgttgccaggtttgccaaagagcgcaggctgagaatatggagagactatgtggctcccacagctaatttggaccaaaaggacaagcagtttgttgccaaggtgagtcattctcagcatcttgatatgcatagtggacattgccaggcgagtaataatacaagaatttgaacaattagaaatgctgaagctcttgaaaatttcaaggcaagccagtaggagtgtgtgtgtgtgtgtgtgtgtgtgtgtgtgtgtgtgtgtgtgtgtttattgtagggggtttagaaaccattagactatttaaatttctttgtaaattagctaacttcaaactagcttgaaatatctctcatagtttaggacttcttttttatctgcctagcaaatagcattatcttaagatttcctatgtccaagtatagatggtccctgacttatgctgggtcgacttaagatattttgactttacagtggtgtgaaagcaatagatactcagtaggaaccacatttggagtatccatacagccattctgtttatcacttttggtctagtattcagtaaattaattaaatgagatattcaacactttattataaaacaggctttgtgttagattattttgcccaattgtagacttatgtaagtgttccaaatgtgtttaaggtaggttaggccaagctatgat

SEQ ID NO: 127230 - DNA, 1045 bp, Homo sapiens
tcctgagggatttctttgccttactcttggattggagctaggattgctggatctcacagctttctctttataatttgcaactttgttttagtggcatacattctctaacttcatggcaaagaatgcttgggaggtaaattttctgagacctttcatgtccattctctacatacacttgatagtttagctggatatagaattttattttagaagtcattttccattagaattgtatctatcagtatcactccactgtcagtagttatcagaaacttttttgatttctaatttttttatggatctgaaaccatcctgatttcttatccttatatatttttttctttctgaaaggttttagcaaattctttttgatcctagtgttccaacatttcatagcgatgcactttgtttatctatatttgagcatattatgcctcaatgtttagttgttttgttctgagactttttctcccaactcttttgttggtttccatctagaatctttgttctcttttttctagaactcctattatttggttgttggattttgtgggctcatcttccagtttttttctcctattttctgtctcatcttctattctttttagatttctttatagttacctttcagtagttttattgacatgatactgttttattttttaagaactttttttgttctctgcatgtttctcttttactattttaaaaaataaagttttatactgacttcagagataaaaatcatctcttagctttctgcgaaattgatttttttttttttagtttcatttttactgcgcactcactatgttcttcaagcctctcctctccccttcttgggttattttggtcccttatttttcatattagaggctttcctcagatatttgctgagtcttggttttctgtcttatttgagaataagatattaaaacactgagtttagaagcaatgaccctagtgtgggatttagggtatacatatttgcttgtttgtttttgagacagggtcttgctctgtcacccaggctggagtgcagtgg

SEQ ID NO: 127231 - DNA, 1080 bp, Homo sapiens
tagcaggagaacagacatggacagtgtgtaaatgaatggttgtggcaatattccaggaaaactttataacaatatgaagtgggctggatggcccttgggccatagtttgccagcctttcttgtagaacactggatagcaacattaagttaaaaatggaaaaaaatacatgcattacttttcataacctggaactcaacagcagttctgtatcattttacctgatttaaaatatctgttagtggcaaacagcttttttcagggaatcctaaaaaagttctaagatacctgggaccttcacatagtctgaaagtcctgcaagtcttccctgagtgattctgctttcaagatcatgtgattgtgaagccttaacaaatagtgattctctcttcaacaatcaccctgttttttaggaattaattgtacagggccccgctaaaagcctcaaaagcctgcaaagggtaacctatggcctctaactggatgcctctggggctctacagttgatttctggaactgaggcaaagctgtaggtcagagtgccaagaggcttattaagcctgagaaatgtgaaacttgacaaagtattctctgatacatgtggcctattgagagactggttccctttgtctgcttaagcagttttacttcttgaggaatgaaatgcaaaggaagggctctccttgtctttccaggttagcagagaagcatgttcacttcacagcgattagctgagcttgcccgagacttttgtgcccgtcgtggcctgccagttccctccctgccttccctgtggcgttttagctgatctgtgctgtttgtagccatatggtcccctgagcacgtggcttggcttccctgttcctgctgctggatccttgggcattgcagatttcacagacctgaataacattgttgtggggggtgggggagggatggagtggaatcatgtcctcaagaggtgtctccttaccaccctacctggttagaggcttcttgcttggtcctctgtacctatatatagattaagcagagccctgaactaggtgctttgaaaagatgtaaaataactagaagtggtt

SEQ ID NO: 127232 - DNA, 1067 bp, Homo sapiens
cagctctaggagtccccagtgtctattgttcctgtctttagtccatgtgtacccagtgcttagctcccacttgtaagcctctttgcctgttttttaattgaggtttttgtttttttgttgttgagttttaggagttctctatatattctggatattaatcctttgttgggtatatgattggcaaatattttctcctattttgtcagttgccttttactttgttacacaaaattttcatgaaatctaatttgtatttgtactattgttgcctgttcctttggtgtcatatttgagaaatcattgccaaatccaatgttgcaaagtttctgccctgtgttttctgctaagagttttgtagttttataggtcttatatttaagtaatgaatccattttgagtttgtttttagttttggtgttacataagggttcaactttgtttttttgcatgaggatatctagttttcttaggaccatttgttgaagacagtcatttcctcattgaatggtctttgcacccatctcaaaaatcatttgactgtatatgcaagggtttatttctggacttcattctgtttcattggtttgtatgtctgattttatgccagtaccatgtggtattgattactgtagctttgtagtaagctttgaaatcaggaagtgtgagttttcctgctttgtcctttttctggattgttttggctattcagggtctcttgagattccatatgaattttaggatgagctgttctgtttccataaaaatcatcactgggattttgataagggttgcattacatctgtaaatcgcttttgggtagtattgacatcttgacagtattgtcttccagtccatgatcatgggacgtgtttccgtttatttatgtctctaatttctttcaacagtgttttgtagttttctttgtacaagtttttcacttccttggttgagttaattcctaagtattttgttcttttttgatgatactggaaaaggaactattttcttaggtttttttttttttggattgtttattatttatagaaatgcagctgattctgtgtgtt

SEQ ID NO: 127233 - DNA, 1497 bp, Homo sapiens
ttgcccttcacttgcctttgatttttctgctctctattggggcatcctattttggttctttctcatctagtgctggtatcttcttcaaatccaacccttgcctctttttctagattcacattgagattttgattttagtttagaagctgtttcaaggaaaatcttcaattacatgtagagacaggatttccagttcttaagctttgtagtgaaccacaaatctttgtcagggcaaaaataaaaaaagattgaccatctttatgaatgatacagattttgtctcattgagaaatcataataaggtctctgggaactgataattatagcatagttttctctgacattgttgcaccatgaaggatgatactgtttttcccacaaatggctattgatctcactttctacctgtgagggtggtgggccttgctcttggacatgtgatgggggccatagaagcaggtttaagcatgttcctttttgctcacaggtgatgcaggttctgaatgctgatgccattgttgtgaagctgaactcaggcgattacaagacgattcacctgtccagcatccgaccaccgaggctggagggggagaacacccaggtgagaatagggaagcagccgcgcctctttgcataaaccaaaaggaagaagttggagaattgattaatatatgacatatataatacatatatgtgggaatgcaaagggacaagtattttaaatctccacagtattattttctaatatttatagcctgactactattgggcaggtctcagtgtcttgtggcccacacccactgctctgccgaatttcacgtgggcactgttggcacttctccccagggggcttgagtgcagtgagggttgggatatgtgagatggtggatgagtttaattaacaagatcttatttttctgtgaataaggagaggagaaggtctgtatctcgtgtacattgtaataggacccgtttctgctggtcattttgatttgatagttctttatgtttttgctctaggaagaaatgaatcttggtatatgtattcactggggtcacctactcattttttgcaggtagtaactctaattagtagttaaactgtttgctattttttggatcttttggcagataggttggtgtatgactcaggtatatcatttttgagaaatgctttgtatgaaaactctaacaagagctggtattacatgtgcagatagactgatttttttttgtagtcatgacagttatgtagccataagagttatgagaattgggaatagggattaaggttgaaaatttttggggatttggttatgtcatatttttacagacgtctttcccgcttctgtttttgtcgtctgataactaaactgtgtgattatgttaactagttatagaactagttcctcagtgagagccagcgccaaaggcaaacatttggacagttttcagtaattaactattgtggattgaagttactgctgtgtgtactat

SEQ ID NO: 127234 - DNA, 5020 bp, Homo sapiens
atatcttggtgcattcacaagttgaaattcagcattgttttcatttgtgtgagagtttatagacagcccgtaagagtaaaataaaaatatgattgtcttttgaatcagatcatacataaaaaccacgtacaggatgggtgatttgaatgtctggccaatcagttctttctctctctttttttcccttagaggaggcagtttaatgcagcaaacagtattatggtaaggttgagaatttaaatgtatgaaagcctagaaatgccaaaataaggttctctcagtaactgtagctctgcctcattgcacagagtaaatacacatctccaattttatcagtattgggagtagtccacaattctgcatctgtgccgtacagttggaattaaggttcccacagcaaccacaactttgaaattcttgaacgttaatttttgtgcctgtatcatcagccagtgcattatgttaatgtagactatatagctgaattttaagcagtttttagggggatgggggtgttatagcttaggtaggatgatagcaggttttctgaagtaagcactaacctactactgagtatttttagtcccagtatcctttggaactcatcagtgggtaaacgatgcatttcccttagcctactggctgacaggaaattgttggaattggagtatttcctagtttaggcagaatcctgattatagaatttcttgtctcttacaaggcgtgttacctcttttttttcttcttttttctttattctttctttttcttcctgttcactcctgagatcttactccattttaagacagttctaagtaagacttagctgcaataatctacaacatatggcttgtgaggaagatggaggaatgatttccattatttgtctgttaaagtcctttggaagagtttactgaagggccacgtaagaaataagttaatataatgaaccttgaatgtagtggtagaaggtaccctgaagagtagccggttttggtgggtggtctgggtgatcttcccaggtcagctgctgtaccttgtgagtgtcaaggatgagaagtgagtcaacaggaggaatggctctctaggccagcgctgtccaacagatatataaatatgagccacacatgtgagctctatttgttattttaaattatcatataactacgttaaaaaactaaaaagaaacattaattgtaatttttaaatttgacttatatccaaattattatatcatttcaacatttaatgaatatgaaaaataaatgagacgttcttcccctttttaaaactgaatatttgaaatatggtatgtattgtacattggcactacattttaattcatcatagcatatttcaaggactcaataggcacatgaggctagtggctaccattatggatagcacagctttagaaatttgcatgaacaggtagtcattgttggtacatatttacagatacttattttgtgccagatactgtgttgggggtgcagcagggaataaatagatgtcccttctctgcctcatggaactttagagtctagtaggggaaatacacaagtaatttcatttacgttaagtgctatgaaagaaaagcttagagtttaggagagtgcatagtttgggaaggctactttgaggaagtgacatttaaggcctgaagagatattaggaattagctagataaaaagtgggagaagacagtttctgacctggagagcagcaatgacaagaatgagttttggggactagagaatggatggctcctgtggacggtgcatgagtggtatgacacctgtgtggtacgaaaccacaggcaaggccagatcaaacatgtcctgtgaacatcttaggatactcaggaagggagagagaaaatggggcatatgatgaactgcaagtgattttgtatgactggaatagaggataaatttcaggggagtgttaagaaatgggcctgggagttagacagggaccacttgttgaaggcttatatgccatgcattttaggttttgtcttgaagaattttgaattggtgagtggcatgtttggattaaaatactcttgtttcggttgtttgaatttacaagatatgaaagcagtttgcatatagagagaatattatgcctggtaaaaacttactttagcaaggaactctggattttcttttggtaagtttcagttgaccaaagacctggaaaatggcatgatgaagagttaatgtcttaggagacgttaactctttcaggctgatgagtgagaactatggatgctgctccagcagtccttctttatacttgccttttgacttaaagaaatccccccacgccaacccctgcccctttccttggcctgagattactaaaagaaaaaagaaaaagaagaagaaaaaagaattccccagagctcttataaagaatacaagatcctgctgtatgcttatgttaaagttaccagagatttacaatatgggtgtggtaagaaacatcacctgggcatcctagtgtgactgtaactgtatgtgtttaaagactgagcaacaggcatcctctcggagtcttaggtttctggtttcatttactacgtaccagctgttacagtcacaagtggagcccagttgagtattcatggcatagatgttggggccaggacctctgttagctcatatggcatctttgtgcaaatttagagaagggtactgcttcttcctgtcagcatcatgccaggggccatggcttggcaagcagaatggaagctaaattttagctcctgttctccctttgtccgctttgccaggtacccttctgcaaggcacagcatgggtaaaaatatgggcctgccctagttagaacaggctggtagaatctccaaggaaaacatcaagggcattttttggaaattgaggagtggttttgtagttgcggaaacatggagtgcttgaggaatgttaagagatgaaggtctgtgatggatggacggtggagggccttgaaagaaacactaaggacatttccttctctctaattacaggactctgcctgggggtcaatggctttggcatggaaaggataacctgaaaacttacggtaccagagccttttccaaaccaaagaacaaagcgggagagggtgcagaataaggaactagatgagtaggagaagagggaaagtctgtggcatgggcttcctcaaggacaggcagatggggcagacattcctgttctagggcgggcctccactgctagctcccagatgaggactcaatgggactttcccttcaaggaagcatgggggaggttcttttaatattttcttcctccgagacaactctacatttggagggtagtagggcaaattgtttttttctgttttgtacacagagacaagttcatttctcttaaattatactggaagatgagctttttgcctatggctaaccatatttctgctcccttaatttggttactttctaattggagccagaggaagtacttggacaaacactgtgatcaaaggaactgttttcatcctaggctttccaatattacccggaaattcatgggtagccacttctggattttggttggagcttggtttgttcctagatagtgttatgcgagagttaaaaggagggatgtgcaatatttccctctctagaattctagctggatttgtctgatgttgacggtgtttctgtggcaccctgcttctggattaatccagtgtcaacccgtaggagacgttaactctttcaggctgagagccagttaagaaagctgacgtgtgatgctcttgtgaacctggccatgtatcagggtttctctaaaggtatagtttgttttatccagttgtttgctataaaggaatgtgctaaatcttggagaaaggctgtgggttttctgagctgctgccttaaaggagataacacattttgcgatctcaggacttcctagagagtgcttggctttgatctgaaactggaaagcctagtgctctattgcccagggctgctgtgggctttgtgttacacttggagtgttaatgacaaaggaaacagcccccaggcatccgatgaaggggctgacttattctccctgaagtctgttcttgcggtgctattgtagttgactaagagatacagagctgaaatttaccttgaaaacaggtacataatttacccaatccccaggtgtataaaatttgctttaggttgctgggcctttttctcagattccttttcttagctgtctgtctctcccattctctgtctttgtatctgtttctctgtctctgacagcccccactgccagcgctcccacttagtattttgggaaggaagtgtggaaacccaaaggtggagtctttccctcagctggtagtcaccccctgctaccagcctctattcatttccatcaccctgtcttttagtgtcctccctgtgaatttatttaccacataaaggtttgttcacaccagggcctccaaatattcagacccgggtgctaaaggatcagttttgttaaagctgccatatgctgaagcccccagtgtccttgttgcctttgtttggggagttcatctcccagacctggcccgcctggctctccagggcaggcaggtgggagagaggagctgagataggtgcattattagtgatgccttgggattcttaagggctttttgtcagaggcagggttatgtaaggcactgataactccattcattgtaaggggctccggggtgctttgccattaaaagcgattttcaacctattccctccagtttagatttgtaaaggcaaaatgactggtccctctggaccctcaagccgactttgccgactctgagacacgtgccaacagaaagctgtggggttagagaccctaagtgaaattggagcaggccagtaaacccactcactgtgatctcctgcttgttactgggagcataaggcaaatagcaaattagagagggactccagcttggcattaaggaccttggagaaaagcaaaagctc

SEQ ID NO: 127235 - DNA, 2418 bp, Homo sapiens
taatatctgggtaccaacacttaaaacatccctgtgacctgttcctcagcagtagaggtcatggagtaggggtacaagcctgcctccttctgatgaggtcaagacatttggtatctggatagatagcagactttgctgaagtgcacatttcactgatctctctaagtgaattttaaactggagaagacagcatgtgcctgtcttgttgccctttgatttcctttcttctccccattacaaattatattttctttcatttcctttagttatatattccctttcccaggatcttgcttatctccttcacataattttttgggattttaacaatctcctagtcttggtggtttatccctgaactgggtgcatttacttctatcaatccatatctctctcttcctttaatcatcactatcacacagttctacattttcaatttatctaaatctttctagtgctggtgtgttcacatttcttgtctcttctcagtctcgtgagctgcagtaattctgtgttgcttccagagttgtcagcaccatcatattcactgccctgtgagcatttactgtacttgctgtgctgaggtaaccctcttccttgacctagttcttgaaggcccctttaggccagagacttccatacacaccatctttcccttctctgtagcatcgtgcactgtttatttgtgtacatctctaccttccattgtgaagtctcacctctaccaaggccaggaatggcagggtcttcccagcttcatatcccttctttcagaatcttacagagtgctgtgaataaataaacatttaataaatgtttgaatcagaatatctgctgaggcttagacctaattccatatattgcttgtgagtgggcatcatttttaccacctcccaatccatggctaacccccttgactgctctgacagccatcttgacttgagccaatgtgctggtatctaactatctccggagggaggttttacactcctgttttttactgcttcctaattggattgcttgttttgctggctaggtcacacatggctgttttctgtaggcacttcttcttctacactcccagttttaatctagttgctgccattgggttgactcgccctgcctctctctgtgtggtggttttcctcataatgtatattccattagcacagtgaagattgagttcagtccaccagaggggttaatttcaggattttaagtgcttttgaagattggtccccaattgactttctttcagcacctctactctgattcaggcttttctgaatatcttcctttcatagtagttcaggtatcttgattcattgaagtttatagttgcagtttttactgaggggtatatatatatattttactgttgtcgaccttgttggttgtcagattatttctttgcttggaactaattttaaaatcaattagagatctctcccttcatctttctcttttatttatgagatactgattgcagagctacctacactgtgtttagataaattactttttttttttttttttttttttacataacatttatattcaaggcaagtttagtgcagtcatccagtgcttcgcatttttgcaggctgggctgtaggtttcattccttggtgggctaattagctttgtactgggaaaattttgtgcaattcagaaaccaaacatttaagttccttgtgtactttaggcactgtaggtctgggaaattatttttatgaataaggtgtttataattttaggatccatatctctaatcctgacaagtatgtgtgtgtgttgtggtcggtcaccaggtagactttagactggatgatggattatggatgaagcagcatcatttctgtcactgttctagaaaaaagcttttcataaccgagactggaatgggaagctgaaggacacaaatgatttccctaccagatgacaggccaattgcttaggcatatttttgatgtcacttttcattttagccttcctctgaaaatctacggtcaatttatgggctgttcacattggacagctctttatttatttatttatttgagacgaagtctcgctcttgttgcccaggctgtagtgcaatgtggcgatctcgggtcaccacagcctctgcctctgcctctgccttcaagcgattctcctgtctcagcctcccgagtagctgggattacaggcatgagccaccacatccagctaattttgtatttttagtagagatggtgtttctccatgttggttaggctggtctcaaactccgacctcaggtgatccacccgccccggcttcccaaagtgctgggattacaggtgtgagccaccgcgcccagcctgacattggacagctcttagtctcaccatctactctgatatccgtctgtttttggcaaatgcctttgcctgg

SEQ ID NO: 127236 - DNA, 1717 bp, Homo sapiens
ttataaaggggaaagaagctagcccagcccttagctgttcctttcaacgtagccggctcaacgttttcctcaggaaaacatgcagggttcctcacagctgcttgagccaggctctgtccttccttcgcagattgccccgtggctgcctgcctcttcactctcctaaagctttttggctttaccttccttccctcactcctcccagtcttccctcagaggactgactggttctttcagcctagacactcctgtttgcctgccaagttacccttcttccggaggtgcatagcctcagcactgtcagagttcaggagaacagaagctcctccagtgagaagccagttaataacagcttttggacccattgttgttattattagatatccataaaatctagcaggtagagaaccgtcactggggctctgctggagagatatgtctcaatcctaaaagatacaaattagtcccagagtacctgataccgtagacggaacctgacaaactggaaactcagtgtgataaaatcctataacctttcatctctcacccccatcacccagtaagaagtgcattctcagggcagaagctaatggtgttgaatgtctctctcttgtctctttatctaggaatacagtggagtgtgctcctgtgggaacacgctgtctctttgcctttgtgcccaccccagagatggtggatctggagacttcggcccttttggccaagcacattgtcttcctccacctgatggttctcaaaagttttgtttgtttctttgtttgcttttgcgttttgacttgccagcatttctggaagtatctgaatggtaagagtataggtatgtgctcctgctactttagttgtcatctggatttctttgaattaccttccccatgccacactgtggttccttccatttctacctgctaccctccctcttggagtgcagagggaatttgtaaacttgggtttgaatgatgaggtcatttctgaccaacacaatttggtcgttctattagttgttcctgcagaccttacaaaggagtatgttgctgttcttatatgcccttgtcttgtgttgttcaaaaatcctctgtgctatgctttggatgctgcatgagcctgcaaatgaatgcttagcattgttgaagttgactgctgccctttagctgtctggctttgggttcagccagaaagagtggcatctttaacctgagtcactttttaaaacatggacaacaacgaaactgtattctagttttcttgagcaaccacatttaagctgcttattaaatacaattttatattctagaaaactacatttgtacagtttaagcaagaccaatattcttctgctcctagaagaagttaagtaaatttatatcttaattggtaaaatctctaaatctgtagtttgtaggtattgatttcaagaagacacctcactgatcacagaaacgagtggatgctgcatgctcatggtatggcacagtgttcttcattctggcttgtttgtaatgtcaggtttcaactttggtgtttgtaaatagtggcgggaggtttcaaaactccagttgtttagagactgtaagatttacttccttgatgcctatggaaggaatcaggctttagacagctgtggttcaagatacttttttcagcttctttctcattccctttttcacatccatctttaactttctctctctctcttccc

SEQ ID NO: 127237 - DNA, 2349 bp, Homo sapiens
cgattctcttgcctcagcctcctaagtaactggtattacaggcacctgccaccacgcttgtctaattttttgcatttttagtagagaggggtttcaccacgttggccaggctggtcttgaactcctgacctcaggtgatccaccggcctcagactcccaaagtgctgggattacaggtgtgggccagtgcttccggccctgaaagttgtttttttaaggctaacgtgtttatctgggagaagtccattggtaggaggggagaagacccaaatgaaagttgcatctgtttgctgctttttccctgaggtctttttcttaactctcttcctctcagagaggatcatctcttcagataaacaggctccagggaacctaggagaccaggggaggatgggggaggtaagagctaagttaccagtttctggcttgctttagggggtcaccctgtatgaccctccagggtggtctcccactcattcttcctaccttcctgcctccacttgaatactttccccctgttcctctctttctggctctggagagctagccttacgagccagtagagggctttggaaggacacttgcagggtgtgtttgtgtgatgcacaggaagtgtgagtggagatattttaatttgtgcacaggtgtgtagcttggagcgacattggctccctctggttcagttctgatgaaacagagcagtgggtttgtgctgaaatgtgtctgcagtttcagtaagagaaagaatgggttcagggctggtgatcattcagtgatactgtgtcatttgtataggtccttccctgtggttctgaagaataaattagtatcttggtcatttgaaaaagtaattttagcttgtagacttcctgtcacacttgagtagcttttggaaagtataatatttttacccaaatcccattaaatgttaggcgctctttctatatgccctttactgtccttttactgattagtgaaatatttatgtgaacccagaaggctgatttatttattttattgtcttttttaataacttgcttctccctagtgctgggtgctttctgaggcccagacaaccatcatgatttctttggtgataatcttctgccctcccctggcctgcatcctcaaggattacttggagctttcttagctttaatgaagcctctagctgttctgtcccctgggtgggtggtaataaatccaaccaaaatgcccaccaggggagagtgtaactcattttagggcatatggtgcattagtagctaagactcagcatcctgactcctgattcccagggacagccatggaagagatgtagaagtaaaatgccacattccaagttggacttggtcctcttgccctggaagcctatttcttgtcctaggtctgagggtttagtacatggttaaattgctggccaaggtgcttcagacattctttagcacctgcctctgtctggacaaggaatcaggcaggggctgatgagagtggtctctgatatgtggtctctggaaattcttttggcccaagtcttaaagtcatggtggtaaaaggttgactagaagagagcctctgagtggagagacatcctatgcacaatgcttgttctcttctcccctttcttattgccagcataaacagttgcacttctggctggcagattcgcccttgctaagtctgtgctcaggttgctgtccatgattaaattctcgctgcctgcaagcacagattctaggtgttgttttaaggttcagggcaaaacagttttctgtaacctctcctgctgtaagggtaactggctatatttgtttgtaatggacacatgtctggctgtgtgtgtgtttgtgtggactacctttcttttattcattaggcatctattgaatggataaggtttgtaaaaaagccattttctttagcaagtagcttgggtatttttttaagcgtttatttttcatgtgttgatttggaataaaaagcacacacaacttggaatgaaataaaagactaatgagaaacaaagccatgaactcatcagtgtctcaactccacaaaattagagtccccaaagaatcacagcaactcatctgtgtatcaagcagcagaaccgattattgcctgctttgggtctgactctgtagcaacatggctcaatcagcagaataatgcagaggaaaaatgttaagaatagatgcttttaatgcagctctcaaccccagtctgcacatcagaaatcacccaggtagctcttaattagtgtacatgccccaggtctactgaatcagaatttccaagggggtggggggtggtctagtagcttttcttccctccaccttccaaagctcc

SEQ ID NO: 127238 - DNA, 1754 bp, Homo sapiens
tgcccttttccccctttgtcctttacctgtttgttttttgtttgtgtacttgttcttttaccttaaaatcgcctgggggaacttgagaacaaaataaaacaaccactgcccaggcctcaactaaaataattaaagcaaatctctgggagtggagtgcaggccttgttgtaccgcaggtgactctaattctgaaagaggcttgcaagcccctgtgttgactgttgcttggtgaggtgcttctctactagccctttctcctccttcctcactctttgctaacattgccttccgttgtgtacctgttatggcccttaggagacctaatcatttcacttctgcaggtgactttaaaaggcccacttgttagaatggaacacagtagattcctctatttgaactttgcttttaataaatgatgacactatatgcttatttagtgttcttttggggtagctcagatctccttaaaagtcttattgttaatcccctcagtgtttcccgagagtgaggtaagggtttccttgttattaaatctaataccctgaaattgctgggctctgttacattgttctcaattgttctcaacttgaatgctgtccctatcaggttggacagtttcccagaatgcctttctggtaaccgagcattaagatttacaatctagcttttcttagccagaaggtaagtcttgcagggacttcagaaaggtgttctttctaatccttagtgaagagatctacttgatgggcagctggtagctgggcctaggtattcttagaagaaggatgttgtaatgttagcattagtgtgaaagtctgcatgaacactgggctgatccaagccagaactgatgagtcgagaggacaacttgtgccaccaagatgtgtctctggctgatgtttaaattgcatcaaattaaagggtatttctcattttccattgtggtgtcaccaaagggcagaattagtgtcattttcagtagctttgagcctctgcaactgtcactctccctgagggtcactagagatagtaactcacattctgaagaggccggaaacctccctgttggatgacttctttggagaattattattccagatccactgaaccctactcaccttcgtttttcctgcaatacttttttttttcctttttaaaaatctagagtaggaaaaacttcctattaatgcctgtctgtcatactaatagggtagaagatatgggcgggtgggtagtgggatggcggcaagtaccatgtaccttttcttgtgtgaaagtgctccacaaagaatggcccatgggaatgttttaactgtgtagtcattttctaaaagtttagttcatcgggtggtttcttcgtctttctttcctctgagtgttgtgttaggcatgaggaggggcacaaaggtatgcaagatgaagcccctactgtgtggtggtgggaataactcaagcacatgctaatcaaggcagcttatgataagatgcaagagggacacaccccaagtggtgtgggcattcaaaggagaaagaaatcccctttgacttgttctttaccacttggattctagtggtgttcctggtttatctgttgtgaggtagaaaccaaagtacagggcatgcagagactgtttatcactgggcacagttatggaggtaactaacatgttaaccccccacccccattttattcttgcttcaggaatttttgtctctgttttctccttgtaaactcttttgccatccccattgtt

SEQ ID NO: 127239 - DNA, 1208 bp, Homo sapiens
ctgaagggaatggtcatcttagaactccttttttactttatttcatagcatagtctctgcctgccagtatgatacattgtaattttagaagttcttttaaaaaatagatagctttgactgtaatcattatcttatagcaacaggcagaggtcttaattctcttacagaagcaagcttgaagatttcattctgctttcttgcccgctacaccagcattttcaaccctagctcatgtgtccttacattcatttccataacaactgttgttgagcctcaaactccagggattatgatttgaggtgggagtgaatagcaggaaccaatgaatgcttaaatgagaaatcttttagtaatgtcacagactcatcagaggagggcattagagaaggaaaggaagaatggaaacgccacaggcatcctgctggtatggtgaaaatgtccctcttttccaattttctgtgccttatttcattgggagatattttgattggctttatgtgggcggccttttcttactaattccttcttcctatgaacattcatcttttgagtatggtggtgtcttaggctagaaaactgatgtctggcctttgtaggtataaatacctatttatacctggcttatgtgatgcctagtctctggtccccttcagtccatagcactgactggccactttgagcatatggtagtgagctgcagatatgactaagtaaggctgctagcattcagtcttagccatttaagtagtcagcatatgctagtaatgtttgtattcagtataacttggaggcaaggtgttttttactagcacattttggttttctcgttgttgttattgttattaattttttaaaaagcttacattggggataattgagaataaatgcctttgcattcagcatgcatgagatgttttgcttgtgtatagggaggttgttgcttgggtggaagagttagaatttgtatgtagaaatgaaggaaaaatgtgatttgcagggctactttccaggtcgaccaagttcttcaaagtgacaaacatctctgttcctttgaaaattatagagacgctggtgtgccctatcattaaatgaattgtcaaaggccctggatcctatggtttggatataaatagcacatgtggctgtggaaaggactctgttgagtgtgggattgcctatgcaattcctgcccttgtctctctgaggaa

SEQ ID NO: 127240 - DNA, 2471 bp, Homo sapiens
ttccattgtcaatgtcaccatgtcgtattgtcacttacttgggttttctctccctcctttgctttttatttgtctagtgtagggacagactatagaagacaacaagggagaacagggtttcttgatccttgtaggattagtatgtttgtgtatgatgatggctcaaatgtagtcaatgttcccccttcccaccccttttactccatgtatgtgttattgctttggatcaagaacatcttggtttgtttctgtctttcttttatgtttggttaccaactggccaagtcagtgttcaccttgtttctggcccagtggaaacacaaacttgcatgaaaataggatattgaagtgagaatctaacactcacgggaatcattccatgttgtctccactgtgcctgtgattctttgttttgcttgcctggccttgtctcctgtatcttcctcttgacagcttgtttcctgccttttgattccacacaaacggtgataccatagtatgcttacccagactgggtctttcactttttcctaggatgcttgtgtacaaggtactgtcctttcagaacacgctcatccccctttgggttctggatcggaatcagattaatcaggtgtatgctggtagttgtgtgtctgaattggtagtcatgaagtctgattgtctggatcggaattgcatcattaatctgatgtaattttaaaatcaagataccctaatagtatgagtgagaattggactaagtatctggtgagagtaggaaagagatgaaatatttcttcttcccctaaaggaatttataacctaactgagcaataagcttaaacacacaaaatgtttttaaaagtaagaagaaaatacgcattagaaatcatattcctacttcagtagaaagtgaacaaaactacatgaattggtctgttagaaactgctgtaattgttaagaggcaggagaaagtgtttcaggatggggtggaacagggtggtttagtagaagaaatgacattcaagcaggtcttgaagggtagctgaatggaaggtgcaggcctatgtgggtgctggaagtaaacagtttttttggactagtagcctccaaaccttgagtatagactcacagagaagctttaaagaaacaacacccaaaaccaagaaatagcaacagtaacaaaacagattcctgctgtgcaccccccatgaagtcagaattatctgtgtaggagggggatatgcagacatggatatgttaatgtatttttttctttcgtttttttttttttttttttgagacagggtctcactctgtcacccaggtagtgcaatcatggctcactgcagccttgaactcccaggcccaggtgatctttctgcgtcagcctcccaactagctgggattataggcatgagccaccaagcccagcaattttttgtagagatggggtctcaccatgttgcccaggctggtcttgaactcctgggctcaagtgatccccaaagtgggatatatttctaaaagctttcctgattcagatatacttctagccttacgaagataggcctggaaggtaacttggatcccaaatgaaacagtcttgaaagctatctatcctaagggtgtagctttggcttccttctgtgggctgtcattgaaggctcttgagcagggatttgatgtgattacagtgttatgttaggaatatttatctgtggtgaagaggctgttggtggtattaataatgaggtgtggagaggcttaattagacagtgtacatggaaaggaaggaaaagatacaagaacgttcacaccgggaagagtcaacaaggtttgtggattgctgaaatttggaatgggatggttaagttgtagattagtggatgtagatttatcaatagagatttaaagttttaatccaggaggacaggaattaagttaataaaaattggtggaactggtttaagagactctgggaaaccacaagaagttcagcttcaaacatgtagagtggtaggtgtagcctccagttgggaaccttcagatgagaagttgaatctgggtgcagtggctcaagcctgcaatgccaacaatttgggaggccaagatgggaggatcagttgaggccaggaattctagaccaacttggacaacatagtgagaccgcatttccacacacatagacgccaggcttggtagcatgtgcctttggtcccagctgtttggaagcctgaggtgggagggtcatttgagcccaggaggtgaaggctgcagtgagccataatcatgctactgcactctagcctgggtgacagaatgagaccctgtctcaaaaacaaaatcaaacaaacaaaaaaacgagtaagtgaagtttaacctaaacaaagttttgtacggcaacagcaattttgatttggttatgtaaagattcattgttcatccagtaacgggttacacagactgcagataggtcatagcgtaa

SEQ ID NO: 127241 - DNA, 1502 bp, Homo sapiens
gttgaatggtgtaaaagcctagctagactgcaggttgtggatgaccagacttggctcaaaagaagcattcttagcattgctagggggcttttgcagattttggcttgtctccgatacttgagtcatttgatattgtagcccatgaattaggacagtgtagtttcaagagctgagtcctggctgtttccatggtagagtagtatgcattgtttagaatgtcaggtgagcagtggcttttctgcctgtgcattgcccatttagcagactctctgcttttatactacatagatgaattgagccatggtttagaatggggaaggttttctgaggcttaccagttaaaaaaggaagttggctagagagagagtcttaggctatagccttcatttggcctagggacattacttctagagagacaggcctcagtgtcctcatttgtttgaaagatagtgatgtggggttctatgtgactcgtagcaacctcgctgttccagcaaatctgtgggctgggcagggtttggaaaataaggagagtccttgcagttttgcaagacagttgttgtgaacaaatgaccctattgcattccctggttactcagcaccctctggacactggcctagtcatgggcaattggctgtccaaatagcatggactggtctgcagccggagctcttagtgaggatgaggcacgacgcttccccagctgactgctcgcgggagcattacctggtgtgcagctgttgcctgaatcccaagtagcatccaagtgtaaggctggcacgcttgcctcttcccatctttttccttgctgctctgtgaatatctgatcgatggggccagttggctgggatccagctaagccagccatgttgttagatgtagcatttctgcctttccccttctcatcttttccattttgtcacatcctaggatattgtcttcctaatataactggagagtttattccagtgggaattgtacttgacatgctggtctccatataaatgatgagtgatttttatttcactctctgtggtgtcttgtggtttcaaaaagtgagcaggtggaaatttggagggggtgggtgtgttggtaaaccctgtgtggtgagttttgttttgcagccgtcgtaatgcttatgttcatcagcagttcaacaaaacacatttattaaatacctattgtgtgccagctattggaaatagaaagatgaatatggccacttttcttcggagacccagccagcctttcactgctggacaggctgcccatctggactgctgggttgttccagtggtagtgctggaattttaggtagtgctctgtttcctttggtaagtgaaagaggaatttaaaaagtataatgcaggggccaggatacttgattttctataaagggccaaatgataaatatgtaagcaaatattgagatttgtggaccaggcactctttgtcacaactattcaactctgccattgtagctgaaattaaacgtatacac

SEQ ID NO: 127242 - DNA, 2263 bp, Homo sapiens
gctgaaatctgaatttcataaagttttcacatctccaaatattgttcttttgattttctttcaaaccattaaaaaacacaaaaaccattttcagcttataggctgcacagaaaggccaggttatgtttactgacccctggtataatgcttttgttgagcattggcctttatactaattctgcctccttgtcttccatcgttgtctaaggaatatctgcttgaagacagctgatttagcattgatcaggtactgttttcctgaactctggtttgtgtggtttggcagcatggagataaacatggtattggcccagtgatcttaactcactcccagttttttagggacaaatagtgtcccccatcagagctgcaaagtgtcaaaatttcagtgcctgctcttggataatgaattcctgttaagtgtcttgtttgactcagagtttgatgtagaagagactgggttcaggcagaggtgttttaaattcttactggagtggcttgtgctttggggggatgatctgaatggaaatttttaccaatagcaacaatgataataggaaacagtgtacttttatgtcttgaaaagcagagacagtgcagaatagacccactggagccttggatgctaggaggcagatgttgtttgtaggtgtgtttggcctgaaaattgagatgttgatattttttttctaaacttttttttttttaaatgaaaggcctttcctcttcccctgccaccaaagatgaaatgccagtccccaatcagatccttgcttattctgttcttatggttacataacgcaactgagaccgaagtaagcaagagaggctcctagggtgcctaggtgtgtagtggacctttcatttctgacaaatattttgatactttggcagaaaattcagaatgtgtgaacaaagtaaggtagagcagtctggtgttgtggattttccttccccctttattgtgttcattagagcactgtctattatttcctgccttctttgggctctgaagaatatttttagcactgaaatttgtctttactactgaaccctgcccagctaatacaattttgtaacaattgattaccgctaaaatggttacctctctttgtcaatactacacccatccagatctcagtgaggaagtaagatttcaacacctaaagaaccaaaatggatcccttcccaaaaattagctttcactaaagtccccttgaacgctcagagcctatttattagtattttattcacatttagcccaaagtagattatcaattagaagtgaattggaactagcatcctgatagcaaaataggaagcagagaaagatagaacagatattagactctctgaatgtggtgtgtcattttgtgtcacagtatcttctatttggagaatagaaaatgatttctctgttggaattgtatagattatcttcttgagtgaaaatagggctcagattgaggaggtcagatagaataaaataatttttctttcttaaagtgggccatcatgctttgagagatcctattgtgcctctctgattggatgttttgttactttttactacagcatcagtatccttgccagaaccaaatttcctataggctttatgtagtccactaagggtaaatcatgttgcagtaacaaaagctcagtggctttataacaatagaggtttatttctcactcatatgtccataataggtaggctgtggttctgcttcacttttccttcactttgggatccaggttgatagatcatttgttatatggcattttacccttatcacagtggagggaaagagagatgtggcaatcaagagctgactctgtgatttcactggccactcccaaatccaccaggccagggaagtgctgatggtccttccccagggaagggtactgaacactacatggccaagaccagcagtgggttgggaggttgttattctctcccagagagggacagacaaaattttgaaataataccacagacttgatggttggccagatttatgcagtctcaactggggaacccatattcttttggagcaccagttgtttaaaaaacaacttttggcttgcaaatatttcagtggtctgattttcatcagcattaaaagcctaacagagtatagtattcaagttgtaggtcttattttcattagcattttcatgtttccaaaagccttatttcttttagacctaaataaattactttgggtctgtggattctaatttgcatggctctacttag

SEQ ID NO: 127243 - DNA, 1166 bp, Homo sapiens
aacatttgctggtttgataggagccaagtgctgatgctaaaacccggtgtaaaatcagaccacatcttttacccttgccagccaaactgaggacttgaaaaagtcaaatctgtcttgtttcagacacctctcaaaatataattctgctgatgctgggcagccataggtgctttggcatttgggagtgaaatttaaaatctcttgctgctggtgaatgataggatggatgtggagtttctttgtctgtgcccttcagaatatgcagcagccagctgcaaatgatggtctaatttgatgtggtgactccgtttgaaagcggaagctgccggtttcagaccggctccctgtaggataatgaattgtcatgcctctgctgattatctaacaagtttgtacaacgtgtaacacaagctgacaagacaaacaattttattaatttaagcctgctgctaatgggattgcagtgctatatgaatgtaggagtattatacgcaaatacaagagtatgctactctacacatacttgtagtctgggtttgataatgggaagtctattaatttttttaaacaatgtttagtgtttccatttgttttcaaaaaagaaaattcatttggatttgaattgaaaaatatttatgaatgcttggggatttatggagcttaaaaaaggctatcagcctttgaagtattagagctgataaatgccagtgggcagtagataaacttttggttgttataaaccaattacgctagaggagcttttgtcttaaatgtgtctagagtttggttgtcagttgggagagtgctagggcctgtggggagatggattctattttcagtttgcggcctttgatctgtagtatttttttcaaatcatctcatgttcttataaacttgataatttaaggtagttgaatcttgaattgttgactaggattgattagctatgtttatgaaaggaatttatcatctaagataaactggggcaggagagcagagaggggactagagccaagctctgtaagtgtgttttgtgtaattaaaatgatcacaaattagaaaataatatggtgggggtatgttttcctttttatcttcattcttgtgaagcagaagctgtgttgtagaatgtagcgcctttaggccttccactgtccttaactctg

SEQ ID NO: 127244 - DNA, 1044 bp, Homo sapiens
cccaaaaatttccctcatgtccatttccagatggcgttttttatgccttgaaataaccattattccacatcaattagttatgccttctcaaacttcagtcagtgcaatcatacagtaggcagcctttaatatctggcttttttcatgcaatgtaatgtctgtgagatttatctttgctgttatttatatcactagtggttcttttctgtatagtattccattgtttcaataaactacagtttattctcttgttaatgatcatttagattgtttccagcctgggtctattatgataaagctgctaatgaacattcttgtgtctgccttttggtggatgcgcacattcgtttgtttgtgtatatctaggaattatattgttgggtcatccagtagatgaatgtttagctgtggttagtactcccaaacacttttccaatgttactatatggaaagttgttccacatccatgccaacacttggtgtttttatgttgttagttttagctattcagatctgtttatagtggcatctcagttggttttaatttacatttcttatgtggagcaactttttgtaaggttatcaggcatttggatatcttttgtgaaatgcttgttcaggtcttataaagattttagtttttggaattgggttgttcatccttttcttattgattgttaggagctgtttgtatattctgaatgtgacttcttagttgagttgttttgtgaatatcttctaatttgtggttgccctttgtactctcttaatggctgacagtgtttcttaaatgtttctgaaaatgtttcctgtgttcttaatttctttgtgtttgagaagacattcatttcttgtcttctctttatttttgaaaagcttccctgctgttgatgctcctgccatgctggaatataagtatcaatataactgtaagcaatcgctatgccgcaagatcttcctgactctcagaggaatactaggtttccttgtaaggcacccacacaaaatttactttggagaaagttaaattaatgttattacata

SEQ ID NO: 127245 - DNA, 1033 bp, Homo sapiens
caggctaggcacggtggctcatgcctgtgatctcagcactttggggaggctgaggcaggaggatcacttaagcccagaaatttgagaccagcctagaaacatagggaaaccgtatctctacaaaaaattaaaaaattagctgggcatggtggtgcatgcctgtggtcctggctcctcgggagacaaaaatgggagcatcgcttgagcccagaaggttgaggctacagtgagctgtgattgtgccactgcactctggcctgggcgacatagcaagatgctgtctcaaaaatagatagatagatagatagatagatagatagatagatagataggcaggcaggcagataggtggtagcagatacatactgcttagtagacaacttgcagacaagtcaaatgaatcgataagaatcgtcagaatgtagtatgtgacttaagatggtgtctgtcaggcttttttactgtaacagaatgttctctaatcaaataataaacatttcatggtgaggtgccttgaaactatataaaatcaaattaatttttatcaatatggactcttggtttgatactttattcagtgagttataatacattaatttttttgtttgttttcatacttaaattgtccctgatttggccagtgagagctcttaaagctagttcctgtgtccttttgatgtgtccccatccttctttgatccatttcttgctttgtgggatgaggcttagtttaaactatctccaggtcagccctagagtcagccattttgccaaggaatcttgttccttttagtagaaaatggtatctaaaagtcaagaccttgccatcagatatgctcattgctactggagtgttgcttgcccccagaccatctcagttgataagctctagagaatacataggggcatatacatccatacgtatatttatgtctgtatgtatttctgtaactccatatttatgttgcaaaccatatatccacaccaacacctccagttccaatccaacaccacagggttcagctagttttct

SEQ ID NO: 127246 - DNA, 1446 bp, Homo sapiens
tccacttccacatctcttttggttagctccactgagtaggtacagtgtgtgtgtgaatgcgaagtattttaatagtgcaatttggcttttcatggtccttaactctggaaggaactccatgctcattaagtttgtggtgttgctgtattgcagatgctgctgaaggcttcctctgccctaggctgccatctttagtttgcctgcatagagtagagtaacaaaaccaaaccaaatcagaactttgacaccgatgtggcaggctgtgcttattatcagaatatcttttaatgtttgtgtatttgagttttcgttgagctgattttcagaaatgctgtctttttaaatttcccatttgcatttctgtgtcaaagtaaaggatttggaatctgaaaaagaataatgtctaacttggtaccaaataatgtttccaggactggtttgaaggatcagatgtgagtttttcaaattggaaccttttctaatgggcccctgggaaatgtcttagctaaattgcaacagtgactggtgaagtcgatcgaggtaaattgctcccattgctgagggttcagaaaccaggcagtggaagctaaaatttcaggggaaatcgggcggaactattgcagatggtttcccccttgaatagagatgggggttggtgtcgctgttgatgaatgggaggagattaaagcctgatttttgcaacgagttggtaacattctctttgggagactaaagaggaatttatgagaagaccatcagaatcagttaggtgattattttcaattttgactacaaatgacatctaggaacacaccatgatgccactggactctgtagtggtctttattagaaaagtagcaacaagagactttttgtgatgtttaccctcagtgagctcagaggtcgaggaattgcccagaatcttgcagattttcatttaacagtcaaccattgagcatttctgatttgcatttaaaaaaaatgaacctggctggttttgactatttgtggtgatatgttagaatacagatcctcatgcaagtatttgtgattggcacgtctcactcagacatatgtctcactcagacatcttctttgtgtttgaggaagccccttaagctctgtgcacagtgagaatagtaaaatatcacagaatcgtgtggcaacattaggcccttagtaattggtaaaacttgatactaacaacatctgtctgtccatttttctcaatctcttgtaagtgctgagagtactgaagtaaggaccaagctttaaatccttcaattaaatatttcgaggctgaggcctggagagaatttcttgtattttagctccctatgactcttggaaattcttcctttatagaagttttagaagattaaggcctccaattaagaaagataaaggatctaatggctcccttagctgatgagcattgtgtaacca

SEQ ID NO: 127247 - DNA, 4135 bp, Homo sapiens
aaagctttggattctgatgggttgattttcttttgtgtggacccttgtactggttactatttaatagttcttttcttatcttaggccgggcgcgatggctcatgcctttaatcccagcactttgggaggccaaggcgggcgaatcacgaggtcaggagatcaagaccatcctggccaacgtggtgaaaccccgtctctactaaaaatacaaaaaattagccgggcgtggtggcgggcacctgtagtcccagctactcaggaggctgaggcagaatggcgtgaacccaggaggcggagcttgcagtgagccgagatggcgccactgcactccagcctgggtgacaaagcgagactttgtctcaaaaaaaaaaaaaaaaaaaaaaaaaaaaaatagtttttttcttatcttaccgtctcccagaattgctattgccaaaatttggtgcaactatgtatttttctgttttccccaccactgtttgtatgtaatttaggctgagttcctccaggctctggtgcctgcgttttgtggtttgtaaagtgctgtgtacttttatagcctctataaataacaaaatacagctcatggcaataacactgtggcaccctagatgtttagatatagtgtgtgttagatgggaagagagagagatatatctagggtacaaagtggctagcttgcaaaacttaatcgtcacttactcatcctacttctcatttttgttcatttgttgatggcattcctttatctttgggacattttatatgtaatgactaggtgtggtgccgttctcctcttctcagtatcccttcccccatccctttccactgtttaatgtagtagacatgaagaggagaagagctggttcacagtgtggtgagatttccaaccagatgcttgcatggtgggggcccagcttcctatcctggtcttcctgttttgtttcagtagatcaccacagctgccttcttatatgtgggagatgtgaagctaggccctcgaatctatttctattagccctgtcaatatagtttgataaaatgcaaatgtctttgaaatggtagacttccaattaaaaggctccagcagggagtctgttttgataatgaaagtgattaagaaggttctattttcttccattggtatgaatgttcagctaaaatagcttggctttttgtctgtaattggactctgctaatgaggttctaataactcttaggttctaataatgattctaacaaatctattaattctcttcattgatcagtgctggggaccagaacacagtctctggatagcagtgtcatataaggttgtaaatgtcattcatttccctttctccttcattctaaagaatcaatggagcaaatgtttatttccttaaattctataatcttatatagatacatcttacctctgagtagagccagacatatatggtatatcagtacgcatgttaggaattgccctcaaaccctgcagtttatattaggccttgaagcattggttttggtgtggaaagaggggctgcagaataaacacattcacagaagaagactaggcaccatctgaagcctaatttttagaacgttcattctgttcaacccctttccatacgtacctgtcagcccctggtaaaactaggcttgataattgaatatgccgcagctctttagccagcataatctgggacatagaataggttggtgggggtgagctgccatggttatctctcaccacctcattagcggcctgtcaccttccatctttcgttattagaggcaatgtttgtgttctctgattttaatcaaaatctgtcttttaactgactacttttctatcttgttcactgttcattctcaaaggtccttatacttttcccttataacaaacttgtgaggcagaattacaagtaggagaggattacaaagggattagagtggcaaatacctgttttgggtatgctcagtgactcagaatggccaccaaacttgctttgttatgtaagttcataatttccatttataattgtggccttgtcagtatagccgtctgaatcactggggacttttatggaacagagaggttttctatgatcttgatagttgaggaatgttttcaaatgaagggataaaactgactaaaaatttagagacgatgagtctttgtgtgaacatccctgtggttggaagagccatttttctcaggtttccagcttgtatagatggtgctcatattatctatagctaatcaaatagcagagttgtggtttttatttaaatatcagaatgacaaattacaatagaattatattttacccaggggtagaatctaaggtcagagtatgagacgaaaattgtatatagtgaaaattattcttgaaaatccatttagtgtcgttttattcaaactgaagtgcttcaggatggtcagatgcattgtctaggatcaggaacagtttatagtcaagtcctttctcttttaagtacaattgggaggggacagggctggatggataaccatcaatatttaaagttatttcccacctccctgactcctctcctaccttctttatctcagagaatatagttatataccaataagttaaatatgtgtatatggcaaattctttgtcttcatggcatctctggagtttataaatgaattgctcctggataagttaatgctgccatatggtttgtgtatcaggagactgaactggggatagtgaggtcttgatactgctggtaaaaatgttagctgctggcgtagaattaagagtggtcaagagagggcttgggtttgtttctcgaagcccaaaagtattaggtagagtgtttttttttttagaagtgacagtagtaaactccgtttcctcagggtgctaactaatcagaagcctgggctgtctgtccacaggtcagggagacggatgctcatctttgccaaagggcaggatgtaaacatgtttgccagccctgttgaattctttgtgctattacttggtgatttcttctacctggagtattgaattcctgctgaattcagaggactgaacttaaattgctatttctctctagcaacctgtccaaataattctggtcacctctttttctgacagtccctccctggtttctctctgttacttatgttttgaccagcttccattccttgtccagatctgtttattccatgtatcttgttcctgagtgggcttcttcgaaatttcttttccttgtataatgttgatggaatcttaaaaaaaaaatctgggtgtttgtgtgttgtatatgtgtatatatataaatgcatatatagatagatgtatttaatgaggaattccatatatatgtttatattccctttccttttccattacaaaggcaactgtatgaaccagaacagtgccctttttgtagcccactgctggagtgtgcattgcttaatcctctgttgctttttaactctcagcgtgtaatgaattaaatagttttttacccttcctgataaggatatttatgagtcagggtggcagaattccatagtagcacattagtgtctgctttgagttgacacattcatgtgaggtatccttctgaatggagggaaatggaagtgctttgggaccttgctgctgcctaaccttccagctttgtgccactcaccgtcaccggtgtgcagggtggcaggcagtggataccagggcccagaaggtcttaaacctgcagaattgtgtgcactcattgcttagatatttccttagcacaactatagaacttaaatatttttcagtatcatgttagccaccagggagtggagacacgaaaatgtttctaaaagtaaatggggatggtgggtggctgagtcagggtgaaatacaaataaatacaatgttttgtagaataaaagtactttaagagaggcacacaagtaaaataacattcaaaggatgaaagaaatttgaggcttggaattacatagcttgatattgctgtaactggtactaaggataaatagcaatatcattttgcatacctgcactaattagatcactttacctgcactatctaattggttgctgacaaagtcaaagccctatgagggcttttaaaatctttattttttatgtcagga

SEQ ID NO: 127248 - DNA, 1093 bp, Homo sapiens
gcccggccaggaatgcatttagattgaccagtggaaggaaggaagggaagtcaaagtagaaattaattggaagatgaacagcatagagaaacaagggctagtcatgaagccctcctccaagattttttaataactgcttgagttttgtgggatgattcctgagtatgcagagacagaagtgatattgattcatcttgtgaattctgatgcatgctcttcacagaaggaaagagaaaaatcttatatgagtttattagtggtgagatgacattctttaagaaataccatccttgatggccattggggaacttgagccatttaagccttttggcctaaaagtgatctaacaattcaatatctttctgggtgactgtaattgctagatgttcgatagtcatgaaatttagttagcattcttgctgttgaattgattcttagtgtttatttgcaaaacctcaaatgtgtatctaaagtcttgaatgctttctcatagttattcattgtatactcagtagatatgaaatatcaattttacaggctaccaaaatggtatttaatggtggctgacaggatagtgtttaaggacaatatgtattggatacttaaatttttctattacctgattcttggcacagatcattgaatttaagttatactgagattgcagaagatctgcctgcctcaataaccccagctatgctgcatgtttatttagtcctggttccttcctgtgccttctgctttctaagcatgtacagaagaaaataaaacaattatttggtttctaccttaacatctgcttgcatcaggaaagatgtctaaaaaaaatttgagggacatttttgcggacacttcctgaagcctggaccagttttatgtgatttgttgacatcctttttttttttctttacccttttctaatgcctgcttcttcaattatccttaaagacccagggttttaccacactgcaacttaaaatttgagggtaaatttggtaaatcttgagctccttaaaagatgatctgttttatacccatttcatttttctcttgaatttcattttaaattgatcgctatgtattttaggcttat

SEQ ID NO: 127249 - DNA, 2040 bp, Homo sapiens
tcctgtacataacccattttttagtggctctctgaataagaaatccctttgtgactggcccagattgcatatttgcttgtagtttctaccccatctccttgtgagggaacctctggtacatactttaaacttctcatcattgtcatctgctcattggcacaccttttcttctgtctttttatgctttttgtttgttggtttttattgattttcctttgtttgtttgtttttgaggggggacagggccttgctctgttacccaggttatagtacagtggctgtatcctagctcactgcagcctcaaattgctgggctcaagctatcctcctgcctcagcctcccaagtacctggttctacagctgtgtactaccatgcctgcctaatatttaaattttcattgtaaagtcaaggtctcactatgttgcccaggctggtcttgaactcttaggctcaaggcagttgccttccaatttttaaggctgtgtagctttcctgataataatgggaagttggtttttcatttgatcctctgagaatctgttgatttgtgttgatgttttaatgtgccacaagtatttcctgttagctgcctgcagatacagaggacttttgaaattttgctctttgttccttttccttctctctctgttcttcctttccttcctccctggctcccaatttggattaaaacttaatgagtaagaggcctaaaagacgtaagacatttacacaactgtagatttattatctttgaatttttgaaaatgaacttttaaaggcttcttttctattttttaaggttttcaagtcatgccagtgtctgtgcagactgacaactagcactgggggaggggaggggaagaagttgcatttatccaaacattttctgaagggatctaactttgatttcctttctatgacctgatttaatggagacatttccacctcaaaggaggatttcaggaatgcatatattctcactagtaggcgaaacgggtgctgctttgatttctcacacccttggttgaatatgaatgttacaatgtggcatgttttccaggaatcatagggaattgacccattttatgtaacatttacaggccgatgggcatttagagttagaaggaacatcatttagatctagtcaaccctttctctctctttttttaaacagagaaggaaatgaaagtccagagagattaagtaattttattcaacaaatattaattgagtgtataacatgtgtcagactcagtactaggtgctggaggctacagagatgaataagtttgagtccctgttggagacaaatacatggttcccagatcatacagtttgtaattagcagattagagaatagaatatttatgaatcattcataatccagtctttctgtattgtgacagaaatgctctcagctgtccttttttgtaccttttaatttactcatttaataaagtcgattttcactttttaaacaaaataaaatccatgttctctcttgacccaataccctcctttagctgccattctttcttgaaagattcgtgtacattaatcatgtacatttgatcaactatgcgacccactaaaatctgactgaaactgctcttgctgaacttccagtgggcatgttttggtcttcagaaatcgctttgaatgttttaagtctgttgtcatatcttccttcttcaaattctcttctctttgggatcactggtgccctgattctcctggctcttttccttttttgttttcattttccttagagtttcacctgcccacttcttatttcttaaatgggccatacttttgcacatgtccgtagccagtggtcgtccatccttcaagacttagctcagtatcatctcatgaagcatatctgaccttttcaagcatttaggcacttccttccctctgttcttatagtaccttgtatatatttcctcatcctgcaaggttttggtctatatgttaagctgtgccttctaatttttctctcttgagaaccagcatctccagtgattggcatgtacat

SEQ ID NO: 127250 - DNA, 1813 bp, Homo sapiens
ttcatgtttctcactgcggaagagagactatcctacataatggcattgtttccatatttaatcgtaagctaaacattcatggtcttcagcatgctgacagcacccaaacaggcaaaagacacgtgtctgcttttaaggaaatccagcatactgcaataaaaaggcatgcaggttggttttccctaaagcctcatcttcaacttgttacgtggccatgatagttctttcaggcctgatagcatgctgattcatttgctgaggtagaatgtgttttctctggattcctcattttgtttatgttgttgatccttcatcctttgctgtgcacttttactggatcaaaattagctgaatagaactaaatcaagggaaaaagaggagtgtcctcaaaagaaatagtggccatgtgttaccattaaaccattcagaaagaaatatttgtatttttaaattatagccttttatttctaattagttccaatgttaaacctcctatctttagaagtatagaggtggtgacgtagattgttaggctggtggttctgaattgtttgtttgtttgtttgtttttcttataacctcctggtcttgggttgtgttcaagtctgtaagatttattaggtgaacattctgtagctaggtggcatgatgttctggcttctcattagcagtgaccctggagagatttcttgcattcagcaacatttgtttggagccgcccagcatccttgtcatcgagtggtgaggcagagcttgggtttgggtgaggaggtcaccttgtacatacctctggaggagggagtggtgctgtgtgggggatgcttaggctccctggcttcccttctccttaaacacgatcagctcttctaggacaaggagctgagtgcttggaggagaggaaaaggactgtttttctcttgctcaaagtcttaagccgttaaagaggaatcataatattgttcgacgccctgtgatagcatccattggccatggaatttggaattagttaaattagagttcaccttttgctcctgccatttttagtggtgtggccaagggtctctcaatttctttgagcctctttttcttcataagtaaaaatataggtaatacttgctgactcttttgaattgctttgagggttaaatgagcatagtggtatcaaaaaggtgagcaagatgctgtttttaatttcaggtagcttgtaatcacctgtaggattacagatgcataatactgagttgggttagatgtattacgagaatacaggatattttattagaaaattcacagacggcttcctggagtcggtaagcagcatttgagcatgtcttgaagaatatttggcatctgagtcaacaaaatatttcacactgctgtggcagtcacatctaggcaggagaaacaacatcaaaagaggaccataagatccattcgtggagcttgttcagcaagcagtttggaatatagttgtcaggagcagaactgggctagcatgcttgattgttaaatagtaactaagtatctttgcagttaaccaaagatcagggttttatactgaacatttttatattaatgtggaaattgaatttgatagcattcctgatgcttctcccagattaaataaatcagcagagtattgaatgaaatgagctttacctctccttttttttttttttttttttttgaggcagggtctcactctgtccccaggctggctggagtgcagtggtgctatctccactcactgggcttgcaacctcctggactcaagcagttctcctacctcagcctcccagacagctacaactac

SEQ ID NO: 127251 - DNA, 1054 bp, Homo sapiens
gggattaaaggcatgagccaccatgcccaacgttacttttttttaattgtggtaacacatatataacataaaatttaccatcttcaccatttttatttacagctctgaaatgttaaatatattcactttattgtgaaacatatctatagaacattttcgtcttacacaactgaaactctgtccccattaaacagtgatttcccttttccccttctcttagccctggttatgcacccagctccacttatttttgacagctggcttaagagaagttcctagacttcattcagaaacattgcatgataaaatatgtgataacaaatctgggatttttttcatcttgctatagtagaaaaatgacattttgctggtattttgggcctcccgtgatttgccatctccgttaacccttactttatttacatcccattttatgcaatatagtaaccacgttgacacatttaagctaactttagtcttccatttctatcatgattgcaatttacaaagccatgaatgcagccttcctgtgattgggctttaaaaccacaaaatgattcactatccatgagagtgttcaacagcatattaggtagaaaaaattataggttattttgttctcttattgtgtaatttttatatcttgcacattccatggattagacacatactgtgacttgaaagtcttctctttactttgtgttaccaattgttgaatcttgtgagcatttctcggtcatcacatattttaactgtggaagctctttatgtgtactagttccttttttattggatcttttgtgcatatctgcacagtggaggtggtcatggtgtgtgggggcaggcagggtgaaggtggtggtatggaataggtaagagggaattttctctgtagagtgttgtttatcaagagaggtggactgctgctatctgatggtcacttttctttgtccaattgtgacctgcagagagggtgcttttagctactgtgtcaggatccagtaaggagacagaaagcacaccagttactttaacagagaacataatttaagag

SEQ ID NO: 127252 - DNA, 1391 bp, Homo sapiens
caggattatatatgtatttacagaatgctttgtatggaactaacagttggtaggtgctcagtaaagattttttgagtaatagaattggatttaaaatatctataaatatttgaagggtcctaatacttaattgagcttcttctgtaatacagtttatgcctctatgtctgtgttaaagaccatttgtttccagtttgggtaattacaaacacttcatttcttatttgtgagcctgttatgtgaaaaaggtagccctattctcagtaaagcatttcaaccaaatacttttaatcatttattatgtgtcttaacacatttaatatttgcgatactaagagataaccaatttcagacacattcctatatcttgtgctgttgtacatgttcatttgatattgttcattcctgatgtcatgttttattttacttttaggataagaacaagaaactgcgtcccctgtatgacattccttacatgtttgaggcccgggaatttcttcgaaaaaagcttattgggaagaaggtaagtaattgatgacagaagcatatttgcaagtggttgggcttaagctaatcttttggaggcaattgttataagctgggccctttaccagcagatgacacttctccatcaagtcaaatggaattactttgatatgaagagaggcgtgtttatgtgtcagaaacggtacccgatgggagaggtttaaaattggggccctgaccacagtttgattgccaatagtctcacagcagggtccgggctcaactccagttttaataattgcatattgccctgagctccattcagttggctctcttgttctctccagccaccttcattaaatgtccagggctatggaatttactagcgagggaaggttgctgctttttcatgcttcccctacttctgagggataggctggctataaggggaagaggggatgacctggactaagagcacgcctattgtaatgcactgtggcatcaatgctccctctattcttctggctggcagaatttcctataccctgtgggagttttttttttcaggaaggggtgtgtggcttcctgatagttcatgtgcagatttttgtgtagcttgatggcttctttttttttttttttttgagacaacatctcactctgttgcctagtctggagtgcagaggtgtgatctcagctcactgcaacctctgcaccctgagttcaagcatttctaccacctcagcctccagaatagctgggactgcaggtatgcaccaccacgcctggctaatttttgtatttttttggtcgagacggagtttcaccatggtggccaggctggtcttgaactcctgacctcaagtgatccacccgcctcagcctcccaaagtgctgggattaca

SEQ ID NO: 127253 - DNA, 1007 bp, Homo sapiens
aaagtgctctgtcacaggataaaaggactaacctccagtgtcagatatggagtcaattcttaatcaattaggttccctcttggtgagagaagcctcctttattggttcctgtgcaacagagttgattgtattctatttgtgctgagctcaagttttgttccccagagtgacattgtataaatgatgaatattgtatccctgagtagtgagtaggatgcaactcagctctgctgggctggaacattcctgatgcaaactgcttttcctgactcaccacctgaaaccacttgcctgtcttctgggcctgtcacttgccacagtgaacacccatgtactctggcgtctgggagcaggcagggcagttgctgcctcaggggagtggctagcacatcattgcacatttctaccaattcccttcagacctctgcagctgttcagcatggcacatggtgattaagaggcaccacgagggagcatgtgtatctatgtgcctgtgtgcacgaaagctgattagggcagcctgtcacagcttaagaaagataatggaggtaaaatcatcttctctgcctagactattatttgaccttctcagggattccataatatgacaattttgaggagttgctagaatgcagagaaataagactgaaggtaaactgctaaggtgttttgttggctttgatgacctccatcctagtttttggaaatggattcacttcctggatttaattctggattaatgcctttaattaaattacccatacttctcttggaggctttgtttcgtaatttgtgaaccgggactattacttgctttccttctctcatgaagttgagttatgagaatataggatgatggtagtatttcatgtttgtccagatgccagtaaagtatatggtttgattttgcttaatactgtttttatatagaatctttcatagccctactttttcagttatgatatattcctggttctgaggttatgagaagtgcatcagcgtgcgac

SEQ ID NO: 127254 - DNA, 1090 bp, Homo sapiens
gtagaagaatactgtgtgtatccttgaagcattttggaaactccctcaattgccatactgcctagtagaactctcttcccatctcctgtttaccatctgccctctttcactaaaatcttgactaaggaatattcacagcaaagagttttgtgttaatttcttcacaggctcatcatgaaatggaatttgtaataactttaacatgttttctggttttccagaatgattttctcgctgtgtgaatacgatggtgagactggtgtccttaggctgtggtcttcttctgatagcaggagcaatctttttctgtgtttataatttatttcccttaacgcttagagatcagtttgcattgccctagtcattttgctttcaggagaataaggtagtaactgggatcttcattgggatttccctccagctatcttataaaatatctaaagttgagactcagtatggtttatccatgtgatacagttttttaaaatgacatatgagtcatttctatagctcttgtcccttaattgcagaatttctatcaccatgggaaccattgtatttaaacttgcaatttgtttggacaactggagtttcaaaaatgatggaaaagatggaattgtaagaagccagagtgcattgaagcttctgtgctgacagtagatgctcattgtaaactgttctatcatcagagactgtcctgaaaatatatgcctattgctttaatgtcccttttactatttcttttgatgagcaaatattggggatgagcctcatttgtaaactaacagcagcctttttgtggctttcatgccattgaaatttgttatctgaactaacccagctctttttaggcacttagaattgggcatttttcttgatcagtgcagacatttgggaagttatggggctataaatcatttagtgagttatttcaaatccagattgccttagattgttgttctcttttcaaaatctgtctttcttgaggtatgtacttttagggtgtggagatggaaatgatctccatgtgcaccagacttataaatccagaatttccaagactaatctcttgatcttctggtggacatct

SEQ ID NO: 127255 - DNA, 1050 bp, Homo sapiens
ggcacagggtcacggagaagttgaggggcactgtaggtgcttgttccactgtatgagaatagatctccgaaggtaccgggagtaacattgcttagcaggaccagtttttcactctgctagtgagagctcttcaagggcacacagctttcctgaggaggactccacccttctccctggctatttatcagggttgtgcttttccttaaaaacacttgtgttctgtctgttgcagtgtgttacctaatcagctgtgttaagtacaaaaagctgggattctggggattcttgttcctaattacctctatttaagtttggattttataaacatttcttttgtcatctccacatttttcacctcatattaatttgattcattcatgctatggaaaagtcctttacattaatgatcaaagcaggccctaaggttgtgaatgcattgtgatttaaattgacaggtttatacaaggttgcttgtccttgcctcctcagtgccagctgttcggtgtggctgtaaattttttgaacaaatgactgaagatatttgccaaattgagagctgttttgaatgacttgtaatttccgaccatgcatttttctaggaagagttctcccacttggaagtggtagtaatgtgtcaacatgcattggagaccatgtttcattttagatgctctttaccctttgggttttgggaaggatcctaatcttttaccccttgattcttgagctctcttgtaaagagaaggttgattaacagaaatgactggagttgcctgtttctggaagctcagcaaggtagctttcttcctgctgccacctaaatggtcttttcgataatgagtttttggttgtttgttgttgttgttgttttccctgcagactctgaaaagtacctctgttctttgaggactatcagggtgttgagctgagcacacatttctttggtgaagtgtgttatttgttgttgttgttgttgttgttttcttgaaatggagttttgctcttgtggcccaggctggagtgcaagcaatggcaggatcttggctcact

SEQ ID NO: 127256 - DNA, 1797 bp, Homo sapiens
tatgggcacctgccaccacacctggctaattttttatatttttagtggagatggggtttcaccatgttggccaggcaggtctcaaactcctgacctcaggtgatccacctgccttggcctcccaaagtgctgggattacaggtgtaagccaccacgctcggccttgaagtgtgttatttgtgtgatgtatgttgtaatatcctctttaaaaagcatctctaagttaaatgaagaagctagagttttcaactgcgttcctggaaatttcttccgtatgctcacctgagggaaatgatttattagctaccagaatcctcgagattctcatatctctgggatatactcttatattaatttgcttattattaaagactttcttacttggactcccaagttgctcatatttttctggtgaatgttcccatatttataacatgatttgtggtcggcttgtcttaagccacccactcctgatcttttcagctgggtttctgaaatgtcgtccttggggctggaactttccatgcttactctctgcaaaccaagattttattttaggggagatttgtgctgaatcagctcagctgtgtttgggggtagggagaggacaggctttttttcccactttaaaaataacccttatgtgccaaaaaaccctataaaatgtgctgaattgcaaatcttccaacttcctatacctcctggtttacagagaatagattcttttgagcttgggcttgatgatactgtgcagaatatcttatgttgtagacgagtgtgaagtgaggctggatgcagatgtgctcatttggaaaggaaacctgactattgctatcttttttcagtatttttttctccagcatacgatcagttttgtccacttacaaggatctatgtagggatactagatataaattttctaatgagaaaaacgttttcttgtgtatctgcaaaataacccatatcattcagaaagagtccaattggaaagcaccaacattccagggtttctatgtaagtggatctctttttgttatgctctgtaaagttgggctaattgtttaggttgcttgaatatttctttcccaagggtataaacagtttgtttgcgtgtgagaaggtaggatgcacaagtgtctgttggttctaaggttgaaatttgtcgactttttatagttgggtgatagaagtgatattttaaaggctacatcttcataatttgggtcatgtagttgtaagttaaaaaatgagccccttgttttaatgtatttaaaatctgagtgatactttttgctcttatgtgaaagaaattatttttattgacacccagaattggcttttttttacttttacctgagcagttatcttcttctggcaaaacttaaggtatccctaaagtgtaacagttctatcccatgagtattgctagcttggacagtccttcctgatgttttcatgatgatatgtgtagtggggttgcacagcatctccccagaatacccatccatctcgaaccttagagtgtgaccttatttggaaataaggtctttgcagatgtaattagttaaggtaaaattaagtgatactggattatgatggaccctaaattcattgaccagtatcctaataagaagacgatctatagccaggcgtggtggactgcacctgtagtcccagctatttgggtggctgagataggagaatcacttgagcctaggagttggaggccgcagtgaaccatgatcatgccactggactctagtctgtgcaacagagtgagaccccaactctagaaga

SEQ ID NO: 127257 - DNA, 1100 bp, Homo sapiens
gccgaacctcttgtttctgggtttctacttcagtagttagtttctttaccaagtaatctgtgagatagggtttgataatgtcagcattctttcatctccgatttcatgcctgttttgtcttacttcctttatttgtgtttattctttctgtgaatactcctcctgggtggtaatgccttccctcctgcagaccagctgacagttggtgtggaggaattgatacacccaagcacatttccagtgttgtccataggcttacctccaaaccagtgtcctgttttctttccttgaagcatgaacactgatgtccacttaagaaggctgccctgtctcatggccatcccagtcacagggcctccatcacttctacttagtaattagcagcattttgaaatatgacacaccctgggagaaatcattcctggcaggagctcttggtgagccgtgctcatcccattcaaggttgatgaatagaacattaagaataattagcacaagactgtctactggaacactatctcttttacatagagcattatgtggcactgtgcaggaattttcttcagtaactataggaatcccaggtgttctccttaacctggcctttttggataagatattttttctgcagctttgccttctcacctcttctggcttcaacaagtgggctgggctgaagagcaagtcctctgaaaggtatttgctcaatagttggtgtgcttattttctttagaactcagtccctgaagctttggtcatgtgtaaacacttgctatgttaagaaggccttaatacgttaacaagtaacctagtaacaccaattcatttctcaaactctttttttttttttttttttgtaacagtgtctcgctctgtcacccaggctggagtgcagtgatgcgatcttggctcactgcaacgtctgcctcctgggttcaagcagttctcatgccccagtcttctgagtagctggactacaggcatgtaccaccaagcccagctaattgttgtatttttagtagggatagggtttcaccatgttggctaggggtctcgaactcccaatctcaggtgatctgtctgctttggcctcccaaagt

SEQ ID NO: 127258 - DNA, 1344 bp, Homo sapiens
acttttttctaccctctaaaaagatgatcttactaaggtatccagaaagactcaatttgtcttcctggtatttctaatcagattctgacttaacaacatttacttttaaaaatgtagttttcctagtattgactctgaggagggccaccataaagaggcaggtggccccaccttgtaggatgggctggaggtagaaaaattcaggagtctggagtcctggcctgaagtgcatctagtctttgttcacctcacccgctttctattttggcccttagttaacccctctctaaaaacagaaggaaccagcaggccacctctgaagatcatttcataaacccgtttgaagatttgttgcccggttttgcattgattggactacttttagggttccaaaagtttaatctttttgtcatcaaagattgttttattttaaatatcagtgaatttgatgaatactgatgtgatggctatgtgtcacacacaaacccctgagtcctgtggccactgggtgattctttgaacttactgtgaacactgattgttaaaggcctgtttgctgagaatgctataatgtaaatctctactgtttctgtgcagtgactttaattatcttaatcacccattatgcccgccttctcccaacccctacaagctaggagattgaattcattctttctccacctctgcttatgttaccaggttagggtcaaagcagatctttttatctgaaatgtttaagtggttaggctggggttacaattcagttagttactggggaaaggaattgtttcctctttttctaagatgtgtggttcccaatggttttctctcatttgagggctggtggtggtttccttctgtcatttgtcagttcactacattttgaaataatggctttaggaatccagtgccatcagaatgattgacttcttgacattagccaggtgctttttcacatttttccctagtttctcctattgctagtggtggagtttgcttgctgtcggcagtttggaagcaaagcagcatgtagtttgaactccacagcatgggagagtttttgaagatcaaagacaaagatgagtcatgttgctgttcttcggtatttctgctttggtgtagttaatcacagctttccaaggggcaaatggtaataagatcactaagtctagatagatttatgatgtctcaacattcagagactgaaagtagaattgatagtcttttttacgtcacagacacaaacttccccttcctttctttctctctaacctcattttcttttgtccctctctatctttcctttttccccctttccttctgccttccattttccttcctcct

SEQ ID NO: 127259 - DNA, 2341 bp, Homo sapiens
tatttattgacagtgttgagcactttcttacataggatttggtcatttaagaagcttgatagatttttcccatccttttatgtccttgtattttatctcattgaaaaagtcaacgttttttgtttcctggggttttacttctctcatattaaaccttaatttcattcccttttttatcttaaataccatttagcctaggtactaatgattaatttatgattcccttattttaaaacaacatagcaacaaatactcccttttttaaatttttaaaatttttgacgtgcttttatatagatcagcaagaggtatagctgtagagtggatagttttggagagagccagagtcattaacagaatttggaggtctctgtatgtcagtcttcttgtggaccaccctcttagccatctccctgtgtcattcatttcttttaaagggtagcttctaaaatgactccaacttggaaggcccttgggctggcctttccagactgaagttcaatccaggcataaaatagactttctttattgaaatgatgttgatactataccttttacgtggtttcctatcctcgcacttcagatattattctgatatttaggatcttagttataactcttttagtaactagatgtttaaacttggggaagccacataacttctgaatctgttttctcttacagtgtatgagtgctctaggtgataactgtggcccttttcattctgatttaaagtaaagctttcattttaatttatcccttaaaagctcacttaaccaattaagagttggaatttaaaatgaaatcttccaataattaaatcgttaaaaatttaaatattgatcattttttaaaattaatttttcctatgcagatacattttgtgtttactgttttataacctagcctaattgcaaattatgactttgcaatttatatttcacatctctttcaaaataccccttttcataatttgggggcaaattgtttagcttctgtgaatgattaataactcttgtattgtcattgtagatgttattgatgtatctttccaccgctccccagccctattaactatggattgtttttctagactttttagcccagacttatcattggatattacttaatttattctattcttatgtttatcacgatgcatattcacaggaattatagcagatgtcactaatcaaatacttattagatctgatatggcatttcattttataatcttctgtcagttttaaccatttattatgcgggttttattaataagtatcattttattctcaacatgcctatgcatcttggtttgtcttttacagagaaaaataaaggaatagtatattatgcacctatttttaatatttcagatgtaattatactagatataattaacctgaaatgtagttgttccttaatacatttatttgcattacttttctgggtggtttctttaataacatatatagttagcatttttcttactatttttctaatgtagcaagtttttttgtttgtttgaggcagtctcgctgttgcccaggctggagtgcaacggcatgttctcggctcactgaagactctgcctcacaggttcaagtgattcttctgcctcagcctcccaagtagctgggattacaggcgcccaccaccatgcccggctaattttggtatttttagtagagacggggtttcaccacgttggccaggctggtctcaagctcctgacctcaggtgatctgcctgcctcagcctcccaaagtgctgggattacgggtgtgagccactgcgcccagccgcaaatttcatttctatttcctataccttctggttgttctgatatatatatatcagaatatatatacatattctttcagtggtggggctttggatcattcctttacttttttttgagattgtttgaccaccctcatttagagtgatttctgtgaagatcttggacagcgattacagtaaattcctgtctgtagttggaaacctcatttgaggattttctagtgtttgaaagttggtacttttgtataatcttggttattgtatcatgatgcttcttttactgcctgggcattttctctggaactgctagaaattttggctttgttcttctttcttgtagagttgtctaaaattttctggaaaatctatagtgtcaaaatattattaaatatcatcactgctttcttgggctggtcttttgataatcaggataataaatttatagctcaaaatgttacctccagagcaaacacaattcttctattcttgaggtattgacttatctcctgggctaaaagacccagagacttttctttaa

SEQ ID NO: 127260 - DNA, 1006 bp, Homo sapiens
cttataactcatgagatttaagattactgaaatctcaacttgtaattatgcatttgtgttaaactactatgaatgcaaaggacaccacatttgtacatacatctttgtttctgtagattgaattcctagaagtggaactgctgggttaaaggacatccacatattaaatgttagtagaattgccagcctgacctccaatgatgttataataatttagactcctgccaacagtgaaaaataccacttagagaagcatgtggaaattggaagttcattggacaaaagcacagacaacagtgattaaattcagcaactagagaagtagataaaggtgggaaaatgatggtgaatgcactgaaaattctgtagatctgcacgtgatagatctctaaggcagacaattcttcatagaaaaattctgtcacagcgcaggacatcaaaatttgtcaattttataggaagtcagtgagccatagactattcttatctcccttctatgactgcctctgagaaatggtaagaaaggcatatttgggttgacttgtggtagacatgcagcttgtgccttagagcaagggtccccaagccccggactgcggaccggtactggtccctggcctgttaggaagcaggctgcacagcaggacatgagcagcaggccagccagcgtcactgcctgagctctgcctcctgtcagatcagcagcagcattagattctcatagaagtgcaaagcctagtgtgaactacacgtgcgagggatctaggtctcatgctctttatgagaatctaatgcttgatgatctgaaggtgggacagtttcatcccgaaatcatcctccccaccatccatgtaaaaattgtcttctacaaaatcggtccctggtgccaaaagggttggggaccactttcttagagtgttgactcttttcagaatgtaagaaaatagccaagtgtattttatatcctgagaaaggtggcctaaaaggtagactattttatcttata

SEQ ID NO: 127261 - DNA, 1057 bp, Homo sapiens
atacataaaataaaatttaccttcttattcaattttaagtgtacaattcagtgacattaagcacattcattcacattgttgtgcaaccatcactgtccatccccagaactttttctttcctcttgcacaatcgaaactctatacccattaaataaatctctccatcccctgtcaaccatgttcctatttttggtctaagaatttgactactctaggtaccttatttaaatggaatcacacagtattcttttttgtaagtaagttttttttttgtgactgacttccttcacttataatgtcctcaagataatgagaatttccttcctttttaaagctgaataacattctattgtatgtatctaccatattttgtttatctacttatccaacaatgggtatgtcagttgcttccacctttggctgttgtaaataaattcttctgtgagcctgggtattgagatatctctttaagatcctgcttccaattccactgatgtatacctagaagtggaattggtggatcatatagtaattctatttttaatttttttggaaagctaagcaatatttttgcatcatatttctgataatttaggagtggaaactggaacactgtggaactgagaaatggtttgatctagaattatcctccactggtaactgcccagtttgtgaatgtgtgtaattgtaggccaaggagttggttgtgtgcctgttcactgttttccaaaacaatgactgtaaatcaagagacctgaatttgaagggagacgcagatacaatgcaggatggtctttgatcggtgtctgtgactttagttgtcattgttctatgcacgccgtgcctttgatcatggaaccttgcttcatttagtaggcctctactttgtgaaatagagggatggtgtggtatgtttacaggaagaaaggctgatattgatacctgattttcttggaatgtttacttagccacaaaactgacaatttatatacacaagtgctatatccttgtgttatttagtcattggcgtgtattcctaaagaattattgtgttttt

SEQ ID NO: 127262 - DNA, 1236 bp, Homo sapiens
gaactaaaaatgtatgtggcttatctttgtaatctagtcagataatagatttgaaaaagaaaatgaaggctaaatattttatttttgataccagggtttttatatcatatttttttcatatttggtttaagaatgtttacaaagattcataaaacatacgttcacagggaaaaatacagagagaaatcagaaccacagataggatagaggaatgaggctaagacttgtgccttaactgatactctaggaatgcccactgagttttaagcattgcagtgtggctggtccaaattgagatgtttgtaaagtacacaccagatagtaaagatttaatacaaaaaaagatctcaacacttttataatatttgttatatattgacacgatgttttagaaattttgcattaaataaaaaatcatattaaaattaatttcacttgtttctttttaatgtttcaacatggctactaggaaaatgtgaacatacacatgtgggtctcatttgtcacttattatatttccattacacagtacttgcctagaaggaggtaagtttaacatcctctcttgagagatgagcagttccacaacggctaatgtctgaattagcttggaggtaagctcagagcatgcccagaggcaggaccaacaggctccttagcaatttgttttgaagctcttcctgtacctcgatgaatgggtgattgatgtgtgttttaaaatgtttaaaaatatgtatcacttttataagtttagaatgataatatacttttaacagagaaaaattattaaaactacattatgtaaatattaaggagcactttgtatggaagatcctgttgttataaataaattttcagtgctgcaagagaagtagcactcgaacataaatttaattttctcagcaaggcaatttttacttctatagaagggtgcgactcctggatggagtaatggtgagagcacacttcaacaagggaggggaacaggcaggtagcccctactgctatgttgttcccctgttggctagggttggaccgcacagtctaagctaattccaattggctattttaaagagagcaggggtacgagcctgagtggcggaatgagtagtttggtgggaagggcttacagaacaggtgactcaagatgattcagttcagagcaggtgaccaggggtgactcaaaggacggagcaggtgaccaggggaacagatgtcaactactgattagaactg

SEQ ID NO: 127263 - DNA, 1748 bp, Homo sapiens
tgtgtttatctcatggatacttatttagcatttaactctgtgccagacactgccctaagaaaattagtacatgtttatctaaaaataactggcacttagatagaacgtacaatgattcaagcactgttctaaatgatacatatgtatcttcctacagcagtgagatacgcacagtaaatgtgttaaacataagcagagaagttaggtcgcttatctaagttcacacagctcctttctagaattgctgggaaccagtcactgcagcctggctgttctgaagtgtccgtgttcttatcgagcctatgtgaaacattccattttacttacttttgtttctaggcagcatccgtgggactcaggccaaatggtgtcgtcttttcagtattaggggtgcgtagaggctttccataaagtctggaaattctgtcatgagaggggtaataaaggggttattttgagagacaaggtgtttatttagctctttgtgaatttatgagtggctatgtggaatagtgggtgggattatgtggcgattatgccccaaagccttacgtaacagctctagttatattaaaactaagctcaggctacaacctggaaatgtggctctgcagttgttttccttcctacctcctctaaccttttatgcttaggtagttcactttttggcgttttgttatcatcagcatcagtctgtgaagttctttggtggtttgatactgttctagtcatacattgtatgaagaatatccagagagcctgagaattctgttgtgtggcccatagctgttctatactaaactattccagactttacaagcaattaatatataaatttagtttgaagttaccatcttagttcctctgaagggtccctgaaattgctttcaaggaaaattctataatctaatagacgaaggttgcctgctaccctcttacctttgagaacctctttgaggaataaataatatgagaaagtatgtatgtttcatatttggcttgcttcatctttcatggttgtttgcgctagagctttatcacagttttaaaatattgctcctcccccagttcctcctccctatcctccacggtttaaataaatatatttttactatataaaacagcagaatgatcaacagcttgacaaaatggtcctcaggatgccctgccttcccacttcaagggtatccttcataatgttatgtctgaaaagattattgattatatatttactcatgcaacaaacatttacagcgtagtctcctgccttacaggcccatgccagctctttgagtgaataagacatggtctccccactcttggagcttacagttggtgtgttccaataccatgtagtaaatgtaaggtaggaaatacaaagatttaagaaaacagtatatagtaccccatgtctgactaaattatcttttagaattctagagtgaaatgatgctctgatgttctaatctagtgctctcgtttttaaggtcaagggaaactgagacccaaagatgttacgtgcctcatttgtaagggagcttcaagtagcaccaagcaagagcccagggctctttgtggtcactcattgctataaacagggatcagggtctgagtcagttatatagcccttggtcatgtattcgtaaaatacttgcatacaaaacatttcaggaatatcttaaaaaggagaacccatctatattaatcagtttcttctctcatgccgttttatacatacttacccacaa

SEQ ID NO: 127264 - DNA, 1088 bp, Homo sapiens
tgtatcattttgcattcctaccatcaatgaattagagttcctattgctccacatccttgcctgcctttggtgttgtcagtgttctgaattttgactatgctacaacgagcagtggtatctcattgttgtttaagttggcaattttctaatcacatgtaatgtagaacatcttttcctgttcttatttgccacttgtatgtattctttagtaagctgtttggatcttttgcattttaaaatcaggttgttttattattgttgagttttaagagttttttgtatattttagataaatgttctttattagttatgtcttttgccaacattttctcccagtctgttgctcagctatttcttttaattggttttaaaaatcttagattcagaaaaccaaactggagtgagctgatctttcacagttgagcaggcacatgtggctgctagtgagctatgttgcagactctcaaccctaattcccttgattctttgtttccaggtcaatgtgacggtggactacattagaccagccagcccagccacagagacagtgcctgccttttcagagcgtacctgtgccactgtcaccattggaggaatgtgagtgttctggctggcatggactcagctgtcatctcaagtagctaagagttctttgctcatttgaatctttccttcctttcactctgctttgctttctcctgctcttaactcagtggtttataattttgtgcctgtgtagcactttatatttgtaagtactttataatcactcattagctaatcgtatactttcattattgtagttatttaagatttattgggctctgtgtgcctggcactatgaagtacacatcattactattaataatgccatttattgagtatcaagcaggccctagatactgtctaaaatggtctctgcatattggtttaggaagtctaggtatagaatagcaggtaacaaagagggaagaagaggagaggttaattggacattttcttgtatgtaatcagtagacgatgaggtcatcctattctgctgtactggctgtaacctggttagattccaaggtctgttggcagccagg

SEQ ID NO: 127265 - DNA, 1063 bp, Homo sapiens
tagggaggaaacattggttctgagtgttataggaagtaaaacctttttctgttgcacatgccctgtctccatgatttgcaatttgtgctctgctgcatctgcaagacaacttaaacaatgcttaaacaatagaggtgaactgggttgagctgcccctgtgcttaacacatgcgaatgttttagtaaatacacactctttgtgtgcttgtatttcaatgatatttaatgaagtatgtaattaaaacaacaagcacaaccagtttaaactagatttggggacaaaaacaaatggctcatctggttgggacagaagtgctcaggtgttgtacagtggctctcagtcactctcactggcatctgccagtaccctatgctgaggacatagaatgtgcaagtcagttaagggaagggttagtaaagagagcttctatggcttgcatagcctctgaaaagtgcactctgttcagtcttgaagaaatgtgaaattaagaagaaatcttatctaaattatgtttgttgtaatctgtcggcttatatacctacatttaggccttcacagcacctagtggctttcctgttattaaagagaacagcagacttctgtaactacagaagagcttctctgaaactagtgattttaggggactgagaagaaagaggcagatgagatggtgtctcttaaagggttatttcaaagccaaagtttagatgcatttcacatgcagggagtgtgaattgtctgtatcttctatagggtttagtctaatccttttttcctctcgatgtatgggaaggagtcgcatcacaggatgctggcagggccttgctggtgtgacataggcttcagcttcctatctgtttcccctggggaatcaatgaaaacaaggttcatcattcctctaatagattaaaatttttttcttgattaacttcactgtggagttggcaagagttgttatctgttaatcaaaactgtttaaataaaaaataaaaagatcaaactttgagtcttttctcattctctggttcctgggttgggaattagctgatcgttttaggcctg

SEQ ID NO: 127266 - DNA, 1082 bp, Homo sapiens
actagggtaagccacacagatacacacactcattctcaccaccacctcacccctcatccatggaaaactgtcacatatacagaagatacagtcactaaggcacttccctattgtttcccattatgtgaagtatttcaggatgataggaaacaatacacatggcccattttgtgaaagttaaagaatggcacagagatggaaccttgaaaggtgagcaagtgaaaattcctgtttattttctgcagaagatcacatctttttagacaggtgactttattttttctgtttatttttctcatattttccttctgttgcttccctgcattgctcttctttcttgatgcatgcatcaccactgccacctgccttgatggctgtcagagcatgagaccttgctatcagaggtattgtccaagttctgtgggggctcgggacatcttagataattctttcccatgcagcagcttcaaggccatctttatgaatatcctttctgtctgtttagagtcttcgtggatagcgcttacctttaatgtatttgtatgaaccagactattaaatttgcaaagaataagactgcctttgcttttgctttttctttggttctaatttgcagggatactttttttctcccagctgttctattagtgactgaaccattaggttaggtcttatccttactctgctagaataatccttttttaatcctagtttggtttttctcagtcacagtaggaataagtgtcatacagcccccagcttttctgactacagttgtatagctttgaggtttttcactgtcagccaaacctcctatctctcagagttttcaattcttaaaacacattactaatatctgactttcaagctacacttgggcaaaagcagcctcttgaatcgctcttttctggcctagtcatcttacccagagaggcccacaacatcctgaagttccttttcagcacttgagaaagtatggttacagtgttaataatggcagtggctctgccgggaggtagggtctgtattatagccaaccctttttccccacagattgatgacttacgctttaatcatagtca

SEQ ID NO: 127267 - DNA, 1025 bp, Homo sapiens
cttggtctcaaaaaaaaaaagaagaaaaagaaataacaccctcttctgttgtctgaattatctgtttcctcttagattaaatgttgcctttattttgttccttttctttgataaatccttaaatatttgtaaactttcatctgcatttatgaaggaacaactttactatttggggtaggcatggcatttctctgcagttacgtaggtctacttctcttggacagcttcatcacaaaagcgagtagggaggcaggtagtatcagaggcaggcttccttgaaggctgcccaaaagtatctggtcctgcagcagagaggaagcaagcaaattatagaccccactgaaattgtcgagggaaagaggctctctggtagagagctttaatgtattttccaggattattttgcaagtgggggctcggggttgactgggatgtgctttgcagaagctgtctcaaatgctgtggccacacgtccatctaaacttcttcccgtgttaaattaagggacagctttagtagtatatagataatagacttttaaagaaaaatctgagtatctaatgttgagaaatctgcaacagtaacttcctttagtgtaagtgtgactattttgtggctttgagaactttaatgctttccaccacgttacaggtaagcttggtagcaagctgcaacagtaattggaagaactgtgaagacatcctttagtattaaaacagtgggttaatgaatggtctctgttagaagcaaagtcctctagcacctcctctagaagaggagaaggcatgagggcccagggtttaatgctgccctgctggtagagattttactgggcttgtatttttattaggcttgtttttactagtgcctgggcttcaaagttccatagggtttacttgaatgatctgcccataaccctatttttctcacaagccctttttatttaaggttttctgtgcagttttgtggtaaatatatgataccagttatgcctgtacttttgccaggtatcaaaaccttttgct

SEQ ID NO: 127268 - DNA, 1793 bp, Homo sapiens
cactctgttgcccaggctggagtgcaggggtgtgatctcagctcactgcaacctctgcctcccaggttcaagcgattctcttgctgagttcagcctcccaagtagctgggattacagatgcccaccaccacgcctggctgatttttgcatttttagtagagatggggttttgccatgttggccaggctggtcttgaactcctgaccttaagtgatctgcctaccttgcctcccaaagtgctgggattacaggtgtgagccaccactccggccagggctttattcttttccatatctgtctttctcttatttcatggggaccttgtaaaggatggtgtttggacataagttctcagtagatcttgctgacctcctactagcattctatttatttatttatttatttatttatttatttatttatttatttagaatagtgccatgatgtgataaggagaagggggcattcgacatggttactaataagcattatttatttatttatttagaatagtgtcattgatgtgataaggagagggggcatttgacatggttaccaataagcaaaacttatgggtcttttctatgccatttctcagcccccttctctttataattcctgtggtcagcacagcactaagtgttaaggggaataggaatggagtttttataaatttttgtaactcacagtagtgattctgcttaaaagggatttgctccctttcattctgagtgatcttttaaaaagtaataaaaattgtagtaacattttcaaaagaaaataggggaaattgcctgttatttcatcctgctaatataatagctcctattttgggggtgcttcttttgagtgctgagtgcttttttttttttttaaagaatataaaatttagaagcagaaaaacttggaccactcggcataaggttgagatgaagtctaaggcaaactattgttgatattaagattctatggaattttttttgagacagggtctcactctgtcacccatgttggagtgctgtggtacaatcatggctcactgcagcctcaatctctgtgggctcaggtgatcctcccacctcagcctcccaagtagctaggaccacagctgaatgccaccccacctggctaatttttgaagagaccgaggtttagccatgttgctcaggctggtctcgaactcctgggctcaagcagttctcccaccttggcctcccaaagtgctgggattatatcatgagccactgcactggcctgggtatttttttaaatgtagagtttggaagtaaataggtctgaggtaaaaaactcagctctactattagatactgtgtaatcatgggccttagttttttttgtttttttgatttttgtttttccagctgtaagttagagataatagtatatacctcataaggatattgtgaggattataggtgatactgcattttaaatgtttagcatagtgactaagacataacaatcaaatactaaagtgagccctaagccctccagaggggagctgcttaccattgacctaattttaaaatctaatagtttcttccatctttctctgtcctctttcccacctctctctcacatgtccagctatttctttaagctcaaacttgattttatattctgttctctttttcttcatcacactccctgtggccaactcatccactaatgtgattgctacccaacagattcttttaaggatgaatttagtaagtagtagctacccaaggtttaatttacaaaacaaaacaaaatgcctcattggattatgg

SEQ ID NO: 127269 - DNA, 1359 bp, Homo sapiens
cagggactgtggaaatagaatcagaatgtcgttattctacaacttttctaaatcaaatttatttcccaagcatgaagtgttaacagcaccctacccactggaatattttgagggacaaaagaaattctgacttgattaccaggactctcgtctccctcttaatatgtctctaagaggttttttgccctggaatccggtgcccggtgatcttaggacaattccccatttgcagcataatttataagttacccattctctctttcccctgtaataacaaaattgctgtgatagccatccaaccagttaaaaaaaattcaggtaattcatttctaaattggaacttgtttcttttaaatcagccttgtaatgtattacagacatcactctcagcattggctacagaagtgatttaatgctgagtttttaatgattccttcattaatcctggtattctgggatttaacactcactggccaatgatgaaaactttgatttcatgcatatcagataacgctgggcagttgctgaagccatgaatcttgcctctgtagtggcatgtatgattgagagtgttgcggatggatgggtgctctcccaggccgtgcactgctgctgaagaggtgaacacgatatctttatcagctcagggtgacctcttcccagcacagttgcatttgaagcaagaatttgcactgacagcttcgtctcctagatctctggacttgtgaagtcaagcttcaccttttcaactatttcctaaaagatgctttctttgagaacatgtcccttgatgtctatattttgatttttttcttctaataaagtcatataattttttagtagaaagacatcgataggactatctagtccacctccctcattttgcaaacaaggcagcggagtccacgaggagtgacataactaggccaatgctaataataatgaaaattaataacaacagcagtgaccgccaacatatataatgcttactgtgcgccaggcactatctaaatgtagtaattcattttttccccacaaaaccttcaggaggtaacattgcacagcaagtccagtatcccacacagcttctttctgtacctcctgctgctcttaaaagcagagaagacagtgttggttgcattccttactcttaatggaagcattacaaatgttccatggaagcgaggtgccagtttatttactgtagagtcttatggccagagtgttaatataccttgaaaaaatgccatgttctttcttccctcaaaaaaaaattattgcttagtgaagaggaagtcaccttatccatagagtcttctcagaggctgtcatattacagtgtgctgccttagttacttt

SEQ ID NO: 127270 - DNA, 1112 bp, Homo sapiens
agtctttcctgttagaattttattactttgctgccagtttaattttctgatttctttctggtgtctttctcccttttttcattctcgccagttcagtgctgactaacccttttctttgtataccttgtcaaagtttttaatatgatctaattgaaggcacttccctgcactatggattttgctggtctactagagacagtttttctttattttcagcatgccccttttcagatgcatctggaataacagctgcattcccactcctgaataaaatgggttaggaaagcttctcattggcaaagcacctggattctttggcaagattggaggtaaactccagaccagatccatcaccaggagaatgggaggaccaatttttatagggtgggggtagaccatatgaatgaggatgtgagtgaactcatgttatagaagcaccatttatatctgttaaatgtaagggattagataatctgtcattatgctaattctgggtaacagatggtggagagttctgcatctcaacagcagtattcaccatgggggaaattagcttgcacccagatcagcagttaggcaggaattccattgagagagaaacactattgatgattacattagtgtatccctctgagagcatctacacatatggtgggttccttcaaattatctatagttgacatatgcttggccatggcccttactaagttacaggacctctgtccttctatctataaagaatttgaagttcgtttaggaagatcaagattggaagtaggttaggaaatgtggctcagagcattattgtatcatacagtttttcttcaaagaaagatgccatacagatgtcaaaaacattgtttgtctgtctttggaaatgaactccagaaatgaaatgagaagcaggaactggatgtgttctttgtaagtgccataccttatctttggtacaagattaaacaaacaaacaaacaaacaaaagatttaattaagtcctttggcttcacattctctaagggactgtcttgattctgtaattttttttttctcctttgtggttttgttttgtttgtttcgtttttgagacaaggtcttgccctatcactcaggct

SEQ ID NO: 127271 - DNA, 1075 bp, Homo sapiens
aataatagctttgattcccaccaggagctgaaataattaaaggtgtttgatgctgcctaggtgttccttggggtattgagagaaagcaatttcattaggaaggtagtgatttagttatttatatgttaaagaattctgttatcagttctttccttctactcttgccatccctccactccatgcactcaacaaggcagatccaagcatttcgtacctgcaggttttccccctcttcaaatcttgctgcataatactcctggattaattttccataaatgctgttttaatggtgctatttcactaccatggctattttagactttgaccgcttttgtccaccaagcccccctacttaactatatctcttcctatcactgtcagcagtctcatctcttactttatggagtaaatatagggttatcaggaagatgcctttaacttcttgttctctcagcttccagtttgccttccttgttatgcttgctttcttacctcctgccttcccatctccgtagacagtttcaccttcttctttccaaactaattgttctgcctacatgctctagattccagttcttttgttctccttgggattttgtgctattggctattctctttttaactagtgttatttttaattgtccttcagtcttctatcctattatatctgcttttcttcttcttgccttctcttcatagccaagttaattagaataattaaaagacattttaattctgtcccgtttgctattcattcctttcccttctagctttgaaccttccccatcattcaccaatgcttccctgaaggacacttctcagtctttacttttacttgacctctctggagtatttaatacttatcttttaaaatcttgttttcttctaccttttcagtataccacactttcgtggatttccttctacaactctgataactttttctcagtctgctttgaatgctccttaaatatttgtgcttcctaggcttctgtcattgtccctcttcttaccactattcagtctctgggtgatctgatggtgatgctgctgacttccctttccctgtctctag

SEQ ID NO: 127272 - DNA, 1928 bp, Homo sapiens
taattgtatgtgctatacatttataggattcacagtgcggtaggtttatttttaccagcatcaccacaaacttgtgagtaatgcattgtgctgcaggctatgactacgcagtctctaggccatagcagatttttttagctccattataatcttatgggatccacctgcgtatatgtgctccatcattgaccaaaacatcattatgtagtgcatgactgtatgtaaatgtgaagatgagtgtttggtttttcattattttcagtgataagttgcagaaaactgtatcttatcactgaaaataatgaaatttctcctgctgccatagcgctccaaactagaaatgtgtaaggtatgcttaatgctcattgaaatgataaacaatcttgttggcctcaaacattatcatcaagtgtcattataaagatatggatagaagtgtgaatctacattgaacatgcactacgtgactattaataagtagatcctagttcatgttaaaaattataggctgggaggagggactcacacctgtaatcccaacactttgggaggccgaggcaggaagaactcttgaggtcaggagtgtgagaccaacctgggcaacatagcgacaccccatctctgcaaaaaaatttaaaagattagccaggtgtggtggtgcacgcctgtagtctaattcatcaggaggctgaggcaggaggattgcttgagcccagaagttcgagtctgtggtgagctaggattgtgccacgtactccagcctgggcaacaaagtgagaccgtgtctcaaaaagaaaactcattataatatgtctgagctagaagttattttgtagagcatttagatctagcatctcattttataggtatggaaactggcacaggcttagcacatttacatgaggtgaagcagctatagagagagctggggtgagaacccatatcctctgctctgtgttcctgctctgtgccatgtggggttttgtgaaacaggctcagaattgctttctggcctgagagggctggaggaagtgcataagatgactttcagtactgaagaataaataccaatgctgtgtgtaacttctttcttttgttggtatggatgatggagaattaattgatcagtgtttattcccagcatttctgtttggccatatacatttgttttgttgtgctcttctcactcttcacctattttttataatttagatgaggatttttttttcctgttaaagtgttgatatgacacagtatcttacattagaccttttttaacacacacgcacacacacacacacacacacacacacacacacacacacacgactctgccacgcagtgaatcttttttagaatgttggtttcctcttttctaagctttagaaaacaaacataataagctaagctaaaagctgaatatatttttggtacctacagatgtgaaattattttaactggtaagaagtttactgtctgcgatcgatttttttctattgggaaaatgaatgtagttggggagtcatatttggttagaaatgtaaagaaaataactaggagaatatctctttgaccaacaacagacctacatcacatttaccttgttcattcattcttaagagcacctaaattgatctctttgctggaatatagtggtatctttgtgaaaaccagagattgatatgttcttgactttaagatactcatctcttatatattccaccctttaatatgccgttcacggatatttctaaacttgattttattcttcacccagtggcagtatccttgaagccaccttcacttcatcaccagtcttctcttgcctttctcctttttctgagcagggtgactgaaactgttgggtttcaggtgggttagggaacctcacaggaatttatgtgttcaggtagagaacacgtcattaa

SEQ ID NO: 127273 - DNA, 1092 bp, Homo sapiens
ccttccctcttactctatcctaagtacctaagcagaggattaaagattaatcactacccagccacctttcctggactccgtaattggagtgggatttgcccaaccacccaccttagacactgcagctggaatgggaattgggtaatacagggcaagaccgagaagagaaaatcctgttgtatgtccttacctgagccttcaagacttcttgaagcctaactgtgtcacctacctctcaccctgggcctgggctccggtgtttcctagtttagaagaaagcatggcctatgcaactcaggcttagggaccatttatttttattttgttttgttttgtgttttttaagagacaggctgtgttgcccagactggagtgcagtggccattcttaggcatgattatagcatattgcttccttgaacccctagactcaagtgttcttcccacaacagcatcccaagtagttgggactataggcacatgccaccacacccagctggactttttattattcagctcttgaaatcgaacctcataatgtactgttaagatccttctggttgcaagaaacaacaacaactctgactattctaaacaaaaggaagatgtatgggacattatgaagagctaatagaactcactggagcatcaggcttggaaaatagatggagaacagggctcctgcaaagggccaagaagcaggatgcagatttgttgtcttaattaggagcagtctggccaggacaccctcccttatggtgtcacaggggcaggacaccactgtaaatgaaatttgactcttccctctattttgtattactctccacgcagaagcatttaataggcagagactctgtcatgtgtctctgccccacctgccagggacagggacagggtagtcatctgatgattttcatcttctgtggtgtacagcttagcattgcatcctattaagagtacaacagtgtgatatgttaaaagggagataacagttgactgttacatccattgtttaacatgtgaaagttgactttcaaacacatattgaaagaccatattatgcacaaaagtatgtaatgactgttatcatttt

SEQ ID NO: 127274 - DNA, 1019 bp, Homo sapiens
gtgagtggaccagtttagttggattggaagttcatgtagtttactttcttcaagcttgatccagtatttgattggtctaatcttaatgtttttgaagtatctatttgtttccttctgggaaagaagcatgtttgttgtatagcaggagtgtcactttggggacattaccgcatgttctgtcccatttagagagattcagacaagtctatgcagtttctttctattgaacaggtttctttttcttgtttttcttctctcattgtgatgattgaagatcagggaaaatattagatatttgaagatggacattgttttattaccgcttatatttaatatgccctgcatacttcagccaacattcatcatgtcctaacttccctagatattttgctgacatggaaatgcagtggtattcagagaggagctggcatagtggagtctaataccagttttacttgtcttataaagccataaccatgatattgctgaataaatgagactatcaaataagaggtggcaacaagattacagtactgcagaaatcctgggggcagaataaaattgtctatttactaagcataactatttgatataactgtttgatgttatgccttcttccttctcctttgctaaattgctttggcccatacttttaacactgtattctctacttgccagctttataaagtgggttagttgttgaattctactgcttccatgtatatttctatcttatcttcctctgcccgtttgttgttctttcctgagatctcaggtagatgctgaccaattccaaatactgccttcctgggtaggaagggaataagtagaaatgaggtaatgggtatgctgtttctcagagataccttggagcagaccagtagctcttttggctaggggattatgaagtgacatttctctatcatccttcttatttatttatttataagaggtgaggttttgccgtgttgcccaggctggtctcaaactcctgagctcaagggatccacccacctagg

SEQ ID NO: 127275 - DNA, 2371 bp, Homo sapiens
cctcaaactcctgatcctcctccctcagcattccaagtagctggaactacaggcatgcaccaccacactcggctaatttttaaatttttattatggagatgggggtctcattgtgttgtccaggctgctcacaaactcctgggctcaagtgatcccagcgcccgggcctcccaaagtgttgggatcataggcatgagccacagcacaaagaatttcctttctactagaatgcctccctcctgcctgcctcttctctcttcattcatagtcttatcttttccaagcccactttgggtagaagatctactctcaggagttcttataagagaaacacttcgttatgtaaaaccaatgtttctaacgttgccaaactaaaagaagacattttctggttgttctgtcggctagaaagattttgagaaatttaggtcatgcttttatatgttccatttttttctctatgtgcctaatattttatagcagacttttcttgagggcagtggcttgtttataacattctgtaaatagcctggtgcaatgtgggctttttacagatttttttttttttgctagtttttaatatttggattgatatagcatctgactgtactaaccagaaaaatgctgagctagggaactttgttatttaaccttttatttggatttctagcttagcaactcataggtcttgaaaccttggcttctctctccctctgccagaatgcgttaagacctccaggtgctaactgttattatttctgttgactgagccccatatgcacttctagtgctcactgacctatcttttctgttgcagaaacattgctgaggctcttgtcagcaaaggtctagccacagtgatcagataccggcaggatgatgaccagagatcatcacactacgatgaactgcttgctgcagaggccaggtaagaccaaacattactaaacacatggggaacccacaccctcacttttttctttcccagttttgtgcctatacctgagcagaatgtgttggaaaataatatgctgagaaagcatgtattattattctagattttccccatgaaaagaaggacacactttgaacttgctgtctaattttgtttaagtgcacttggtcttccattttaaaaaatatgtaaaataggtatatattagatatgatctccctttgtagctgtataaaagaaagcatgaatgagtgctctataggagatatgtttatcatcattccgggactaactgtgaagccgtgcttatgtctgtagtacatttgcctctgtttcttacctccaaaggcctctactcctagcccctcccgtttaccacctctagaccttttgtcatgtacaaaggaaagaaaacatttattaggaaatgagttttagtttcaaacacttctgacagctggcaggagaccatttgagaagccctgtgacattttacttttgtccttcatccctgtggctggttgccccaaggacatgcatgctgctcagcagtatttctggccattgtcatccctcaaggctcttactcagggagtcttttgtcactgggtagtgtggtagttgagtgattcccagacttcctgggaaacagagcaagaactgagctacttattgctgaactgacttggatagctcagcagactgcttggactcaaccaaaatatatccattgtttaaacgtgatttcagaggcctgcctcactcagcagtttttccatagcctctaggacccatttagttctaggagtttggtaattgtcaggttattttctatagttagaggaggaatgattctgggcacatgttatctaatctcggcttcagattttgtcattgagatcacttctcttgctctttggcccataacattgccctgatatgtgacatttacctctaacaccgtgtcacatcctgatggatagagcatctgtagaatgtcacacagaatgtcagccgagaaatcagtctgtcaggctgctgtggcttttggattctttcttgtgggcttttcccaatagaccctgttgaggacctcattcttaagtacaaagaatccagtgaaaatactcacatctttggttttttaaagctcattaatggtcatttaaaatacgtagttcgtgattggtgttttctcataaacctccttactttcttctctccctacctatattatcagtaagcaagacagtcccaaagaactcatgatgagaaatgtgatcatgatttctcatgatcttggttctgttttgttttttttttaatttttttaattttactttttgtgagtatataacagatgtatgtatttatgggttacataagatgttttgatacaggcatgcaatgcgtaat

SEQ ID NO: 127276 - DNA, 1135 bp, Homo sapiens
ttaatgagcattcatagatagtgaaattttttaagttttaggttttaaaatgaaaacagcctttttagtctagtgcttattttgtgcagaagtaatgtaacaagatgcttgcttgctaaggcagtgagctgcctagagataattgtgttgagccattgctttcagactgatggtgagaaaattggcttcagggtcattgcactgttgcaggttgagtaaacggagagaattaaccacttccctttgcccatgaggcattgccataaggaaatacaggccccataaagaatggggagaaatactcagcatgaactgtgagtgaatttttatttggagcagtcttgtcagtgagccccaggactctaagcctggtgccatcttctcgatgctaacccccaggaaagtgaagtcagattcaagaaagatcagaatgcttgctagataggaatggtggttttgtagccattaaaaaagattttcagtgcagaatccccatcctcatggtttggtgttttgttttggtggctgtggttgttttgagacagggctttgctctgtgtccaggcgggaatgcagtggcacaatcatgactcactgcagcctccctttcttgaaaatggtaaagttgaacacttttcaagaccacttatgtcctgacactggcttatttgagtttgcctttagtttgaagcacctcgttctcctatgaacattccccatgttcccttagcattcttctcacctctctcacgttacagcgtgtcagagctctttcactgctgcttctgccccttatctggccaggtattgaatattatctgagtttagggttgttttttcctagatagattagctgtatgttttctaggtgaactctgctttgtgattttatgcccctgtcaatgcattttctctacctcccagcttcgtgtcctctgcagatctcattagtgagttgtttactccttttctgggccctgaataaaacccctaaacaagaatggctttggtgttgaccccaagtctctcactgcttgaactatcacttaactgtcttttgtttatcattcttcagccactttttaatcttcagcgattgtgtactgaaccaagccagtttgaattaatttcccaa

SEQ ID NO: 127277 - DNA, 1033 bp, Homo sapiens
ctaccagtagctttattttaagaattcctagaaattgttagaatctggctctttgcaggaaaacacagaagttatgttagttcagaagttggggctttattcctttaaggtatcttttaattctaagatttgcaatttcaagatcggatgtatatattcagaaaagaaattgatgctccagcctgactgtaggaaagcaattgtattgaacaacctagtgtctgagcagatttaaatgaatttagattcagtctggtcatacataatgaagttagggttatctcaggagaagagaaaagggcaggctctctcttatcttttcatgtgtattctatttcttgcctggcacactgcagatttagaaaaccatggtggtgtcatccatctttgagaggcaagtgtgaacctgccctcatctcagcatcgccttggctacttctcttcctggtcccctgaaggactcatttttctgattcagcaaaccctctttctaaaaaacaaaaaactagcactccagccttgctgtgttctacatctccaatctccaaactccaaaccccataagcaccagtctcttgctttttttagtgagattggcagtgccctcatattttaggcttctgtgtttgaacctgtaggaaatctgtgctggcatttctgtcacagactttagtcaaaaagctataaacatatcaataactctttctttcttaaaccaatatccctggctattattaagagggattcagtattaattgcatatctctcttggtaacgcagttaatgggggccacagtgggctttctaagttccatatgtttgtagcagtgacttgtaaatatattttgcaattccattgaatgaagagcttccactgggaaggaaatgctcttggtcttccaccctggacttagctagaggagctctcccttttttctgatttatagggaagtttttccataaaatttcaataaatggaaaaagtaatgtgtgccttaaaaaaaaaaaaaagaagaaagaaactgttgactgg

SEQ ID NO: 127278 - DNA, 1338 bp, Homo sapiens
ccgttcttttttaactttggaaatgcacaccccaccctacattttggggttgcagttaagtgtcacgatcatgaggttgctaactggattcagcacgtgtcattatgtgtctgtggagggtttcgctgttggggagtagggaagataagtttttgcaagtggatgtgataacaggaaaatgcattaaaagagctggtgttgggaagtgatttgacgatgcagctgaacgtggggaaatttagcttttccctttcttcagaaaagatgatgcactcaacatccaaatagcagtaatcaatctgcatttaaggcagcacaaatggccacttctggagagctgtatgatgtctccatttccaaatagttttctccttcaggatattaagaggatctgttcactccctccatcccatccttctcttccctccccacccctagttccttctgacataactcatgctgtgagacttttctttatgattcatgaggggctggggtatagctgacgccctttagctttatctcctgtcttgactagcaagccgtgggtagtcctgcagatcatgggtggatgattaactgctggaaagcagtcctccttggctctgttctgtaatcattagtctacactggttgtattccttcagagaggacattgttctaggctaaacttcctacatgaattagccatcaatgtgtcttcccccacccccatccgccaaaataggttcagctatgaccacttatctgtccagagccacttgtctattttcttccgtctcactctcctcttggctaagaggctcttgcttctttcacacaacccaaaatatttgatatgttgggaggttcttgtactgggaatataatttcaatccaaaataaattgtaactataaagtgataacacttgacccttgactttcttgaatgtcttacaacttgcttccctaaaccagtggctctcagaccaggcacatcactatcgctcggaaacttgttagaaatgtgaattctcagcaccctgccccctgcagtctaacacattctttaggtgattctgatgcacactaaaatttgagaagcactgccctaatcagttcctgatcattgtaaaacaaatcaaagtgtatgccctttcatggaagattgatcatttaatcttcattgtaattggaattacagtcgtggttataagtaacagagaacaaggcatggaatggatgagctttggatttctatagtatgtcccagctctttattccccttgactcctgtctctttcccccttcctcagactctgagttcatggctccttaattcgattccttctgaatag

SEQ ID NO: 127279 - DNA, 1041 bp, Homo sapiens
cttaagagaagagcagctttataatcccccctccaccaaatcctcttgcacagactggctactcagcagtgtacagtgtgacttgtgtagtcatacatccccactttaacaaccctcgcttctctcttcatttttgcaccctcctaccccttcccattgtgattcttgttttaatcggtttttctcttcttccttaacagagctattaagaatggcaaaggattgcatagcaagaaggaagtgcctatccaccgtgttgcagatatatctggggtgagtcgagtccctgaatcaagctgtgtggctcagaggctcaagagcgtgtctgcatatttgctgaaggacttcagcttatgtattttctctagctcgctccttttcaggcactgactgtgacttttccccaccccggggcatctacttaggtatctatagggagcctgttttattatctggaaaagcagaattaacttcattctttttctttacctgaactgtttctatgttgctttttcatttttaattactgtattttgagtttggaaggtagttcttcttggttgtattaaaataaaattgcctctttttaaaacccctgtccagttcttgctgtgagtgggaagtcttagtagcaaaaggtcaagtatagatttcaggagaagtatatgaattcatcatgatttcctcatgacctcttgttcctctgcttgcctgtaagtgggacagaatggagaaatgtatgaacatcctttgagataattacatatagataataaagaagaatcaatggcaccaatattttagagctcccaataggctgtgtccaaatgtttctttaactgtaaggactttacctttgaatgtttagggtctctttggctgcatagatccgtttgatagttgagctagtttattcatttagtcaacaagtatttgttgagtgcctgctgtatgccaggaattgctctaagctctgagaatataacaatgaagaaaactactgaagtccctgcattcaagttggaaagggaggcagttgca

SEQ ID NO: 127280 - DNA, 1042 bp, Homo sapiens
aaagctgttatagtaataaaagggcaaatttttggtggttcctcagcaggagaaaaaagttataagtgctttggaaaatgcaatgaaaacccgtctacacaaagggccaaatatgcccatccaaaaacttatgtggggcccatactccagggccttccagaagctgatttcaaccttagggataggctctctccttgggcccacctgagttcatttctagttctgatttggcaccaacagtgaggtgaagcaactctaaggaggttttgaggttcaggcacaccagtctcagggttgtcctctccacacccctcagtgtggtatcctaaagatctttattgctgtctctgaatcttatgctgcctcctgccttgatgatttctgatgctttttttattcctttatttccgttgtcattagcagtgggtcttgtgaaacttgtcttcatttatttatttacttttgttcctaccccaccaattcccccttaaactctagctcagtttcataccaatttttattatcttttctgtctcagtattggaggattggtttgctcttaagttaaacataaatgccaattaaatttctctcagtcaccacataaataaaagagtaaagcttgagcaagtgggagactgaaagtgaaaaagctgctcgatttaaatggatgtcagatatgaccttgtctgcctgaatcacaaattattcacctaagagtgcagtttttttggtgccctctttaatagaggagttttgtcttttcccaccttcttcccttctttccatcacagtgttaagtctgtgtgtatgttgggtgcccttgttcaatttaagtgagatgtatgggttttctgcttcctgaagcatgctggcaattttgctgtctgtgggacaggtgtgaggtcagatgggcagacggcttacagccagatgaaaaataaacagggaaaaagacaatgtaatgcacatatacgtaatggtttcacagaggtttcttaattgttttttaatctttaactgtgttacctactgccccaga

SEQ ID NO: 127281 - DNA, 1122 bp, Homo sapiens
gttggaagtgactcatctaagcacaggagtgtgaggtttatggcttagaacgtaagataccagcctctgtagtggccaaataagccggcctttttgtttgttattacagatgggttttgatgtcaaggtcaactgagttttgagttgtccataagatggacagaacatctgcatataacaccaactgaatgaacccccagtttgtctagggctttgataaaaaatttggccctctagaccgggcgtggtggctcacacctataatcccagcactttgggaggccgaggtgggaggattgcttaaggtcaggaatgcaagaccaacttggtcttgtagtcagtgtagtgagaccccatctctaccaaaaaaaaaataataataaatgtgtgtgtgtgtgtgtgtgtgtgtgtgtgtgtgtgtgtgtgcgtgcgtgttgacccatctgcgtctcttacacctatttttagggtaaccactaaaggaagaaaattacatactcccaagctggtaccttagatcctgaagaagttactggttttttgttatttccaatttttcacagagtaggaactgggctattagaagtaccagccactgctgccatttctatcatagtctagtttcctttcaagccagggtgttccagagtgtgtagaaccagctgagaatttgaccgacttggtactaggtcttacttgatttgaaggatggttctgtggtgactgacttcatacatacatgttttcattattagttggttttgtttttcattgatcctgtctgagctccctccctcaccagcatagaaaaaattggagtatgtgtgtcagtgttctttatctcaggtttctcagctgttctttatcttaggtttattattgtttttgctgtagcctgctccgtaataaatacaatctcctgcagatacagagtgtaaaacaggcaataaaatggggctggtacatggcttactgttgttctggtagatcagacaaatcaattatggttctgagattagagagagctccccactcctcaagttgcagccagccctgcgagtgctgattttaccatttacctttacctccacttctccatcttcctcttatatgggagtagga

SEQ ID NO: 127282 - DNA, 1226 bp, Homo sapiens
tatgagttaggtctgtgttaaattgcagtttttcttatatgttttctggcccacctagtttagatttatttttcttaccctcatatgattctaatgttcctttcagctttctgttttttctagtctctggtatttgatggcacaaatgctctctgagtgtatttgttttttgttgttttaaatagcccttcccttttttaccccacttggctaaaatcatggccctacatcatgttctcacgtctctcttgccaactgcagtctaagttattgtacagatggcacaacatcaaggcctatggttctgccgggtgggtttctgtgacctggaggggttgcctagcactggagcttcattcacacagtagctgctggctccactgctgggctctgcatttggtatccgagaaaatcccaaaggaactctggaagagccagctcactgtctgcagaacttgctctccagagcaggcagtgtgtcctctctaaatatggttggccccttgcctggaagccatggttggtgggagtgttgggttatcctggtggcttccttgcctccctgttgtgtttcgtagctcaagttgtcactaatttaggaaaagctattgctctatttctttcttcttctttcttcaagcaaagtttattgaactctagttggactacaatgtacaggtgactggcttggatcctcactgcacagaaacatgccatcacctctgtggcacacaacctctgatgccaaagtggcagccacctcgtaagtttctcccagactttggaaaaaacttcaaactctttctctttcttttcttttctcttatattttcaatttaattttttatttcaaaaaaatagagatggggtctcactttgttgtccaggcttggtctcaaactcctgggctcaagtgatcctcccacctcagccttccaaagtgctgggattgcaggagtgagctaccatggctggcctcttttctctctctctttctctcttttgttgagatggagtctccctctgttgcccaggctggagtgcagtggcgccatctcagctcactgcaacctctgcctcccaggttcaagcaattctcctgcctcagcctcctgagtagctgggattacagctagtttttgtatttttagtagagacggggtttcaccatgttggtcaggctggtcttgaactcctgacctcatgatctgcccaccttggcctcc

SEQ ID NO: 127283 - DNA, 1547 bp, Homo sapiens
agaaactgtgtcttatctctagatctgtagtttttaggagtttcgtaacaataggaaatgcatacatgtacataatgatggcgtctatgtagttttgaatgagtgaggaatcttgagggcatccatcagcaagtgtgcactgatggagaaagaaatgacaatgatgtgagatccttaactgaacaaactaacttatgttatcttcaccaaagctatctcaattctctgccatcacttacgcactctgtggtacatcattttccactgatagacaaggtccttagagtctcaattctagaaccccaatataatatccacatgtggttacatcataacaaagttgtaaagccactgggtggggtaagattaattctatattttccttaagaagaattagaattcccaaatacaccgaaagcactaactatatttctaactactttagaagtatcattctgtaaaagtagtttcattattgtttaagcttgttttcacgtatttgtatgcatgcatgtatatgctttattaaatctatttctgagcctgactgttgggcttttacaagttgctctctttactaggaacaaatttttattctcacatcatattaatgtgtggtttttgtttgttttctacccattgtccacactcttttttgcgcgggtagctgtgacttcaggcacactaccacacctggctaatttttaaaattttttttgtagagagagaatctctatcctatactgataggatctgctatgttgccagagctgatttagaactcctgagctcaagtgattctcccacctgggcctcccaaagtgctgggaacacaggtgtgagccactgcacgcagccacattaaactcttagtccttagaaacaggctacttagtttggtgtcgttagtaccataaaacactgtgcttaaatctgtttttgatggaatcacagagcaaatttcacatgcagcttcaggtcaaactgtttccacatcagtttacagactttattatagcatcaataatatttatttgtttcaaaatatgtagaacaattaattataagaactaattcactgcagtgaatgttgaatgctgacacttacaaactaaagggacaattagttatctgacctttaataatttacaagtttatctaggcaaagcttaatcggccatagattttttctttttttttttttctttttcttttttagacagagtctgactttgtagcccaggctggagtgcagtggcgcaatcccagctcactgcaacctctgcctcccacaagttcaagtgattctcatgtctcccgagaaggtgggattataagtgcctgccaccatagccggctaatttttgtatttttttttttcagtagagaagggctttcaccgtgttggccaggctggtctcgaactcctgacctcaagtgatccactcgcctcagcctcccaaagttctgagattacaggcgtgagtcaccgcccccagatgactttttttcttttagaaacaaaaccttaggcatatttttcttta

SEQ ID NO: 127284 - DNA, 1006 bp, Homo sapiens
ttcgtagaatattttagctgaaaataattggaaggtatacctcccagtgttaaactctcctataaacattttcttcttacaaattggtatttctgaaccactatctcttattcctgtgtttgagtagatacaattaagtttcatactaaaataaattttcttcacatcattactaaagcattcagttatttcaaaaatatagtacattactatactgatgaataatggaagaagtttgtctgttgattcaacatattcaagagtaggatagtttttctcctgaataaaactacaaaatcaatagtggatttacttacttgacctcaaagagataagacattttgtctatgaaatagtttatagttttttgtttgtttgttaaacaaaaatgaagggaaataaaccaataaagcagaaggcatggattgaggaagcaatctgggaaaggttgtgaaaagaattgccagagtcttggtcaaggggaatcctagcaagccaccctgcagaggtcgcaggaggatggaagaactcttgggaggaagctctctaactggagggctatcatttacaaagccatgatactataaacactgagtattgagttaacaaaaaattgtaagactagtgtgttgagaagttagagtatggaaaaaaggggaaaagggacagtttgggatgaggtagggaggcagatttattcatggaagcttttctatacagcaagaattatgagccatacctttcagatagttctgtgggttggcagccctcatcacctggcacctttggcactgccttgatagctgcctctcacccaagttagagaaagaggattgaagacaggaagaaagcaagcttatgtgcttgatactttatcctaactaggtatattcttatttccgccctttttacttgaggcacagatacaccatcatctgcactttctgtgcctaacttatcttaacaaaaaaaaaaaaaaaagcattctctagaataagccaagggc

SEQ ID NO: 127285 - DNA, 2311 bp, Homo sapiens
gatcccactgtgatggccaggctggtctctaactcccgggctcaagcaatgtttttgcctcaggcaaaacattacaggcatgaggccaccgtgcctggctcagaccattttctgagggtccctaatctattcctctaacattatttcactttatcttagtgaactgcggtgattgtccgaatggtgctttgcatgttttcattctaaacatagagatgtgtcttctcttcctaagtatttgccaagttctggtttcatttctcagtattgtacactgtggaaaggaagaaataaatggtgggtaggaccaaccaaataaaagtgtttgtagatgtctgactttcttagggctccttaaactcttagatgatttagttccttgcaagtctgattggagagtaattgttttcttccatatgttggagtgctatccttgcactactttgccctgtggcttccttcttctagttgggcaagcataccattcctgccccctttggaaactttgcttagccaggatatttcttttaataattgtaatactctctgttgagggcatcactgattggaatgatacatcctaagctcagggctttcttccagcttaatgctcctacagatgtccaaatgtcctcttgactcatgctcccagaactggagctcagagcctgggctgcggtttctcctatgttcaacatggtgcaggcctgagtgaggtgctttaccaaccaagtaaacagtgtgagaatctgtaaaccacagacaacacttaatgattttccattttttaagagacaaggctagagtgtcacccagggtagagtgttgtggcatgattatagctctcggcagcctcaaactcctgggctgaagcaatcctcttgccttagcctcccaagcagctgggactacaggcccgcaccaccatgcttggctaatttttaaattttttgtagagatggggtattgaactcctagcctcatgtgatactcccatctcagcctctcagagcgctaggattacaggcatgcgccaccctgcccaattattgaaagataattgatggcctagctttagcaccttttttttctgttgtaatttttttgtttgggggtttgtttttgtcagtgttctcctctgtgttcacttcattcctgttaaacttgcaattcactgaagtttacgccctccctggtctctctagtacacatctcaccacaaagcattgataaccagccagggaagagcagtttcaaatttgaaagtgctttatggtaacacaggagctcgagggcattctcagagtatcctccccccgcagggttccatgtatttcaagagatgatcatgctgtataactggctcttcatcgaatcataaactcattctgtgaattaaaatggcacttggggccatagcgcccaagatgtggaaaggaggaagagtgtggagcgataggtgatggttttgccttgctgataggagatgtagttgtgatttgtcttccatatagccacaaaagtaattctcctggtctgcacaacccagaaaaacatagataacgatggcagtgaatgatcaccatacaccatacaccatacacaatacacttaaaatgagagagcacatttgcttcagtatccttaacgatttgttctgatctccacactcttttttttcctgtgtctgtcctcttgttcacaaggattttgctgctttagagcacatttgcttcagtatccttaacgattcgttctgatctccacacttttttttttttcctgtgtctgtcctcttgttcacaaggattttgctactttagagttaagattggttagacccagacagcactgtgccctggagtcctttaccctcaggtcagccctggtgggaccaagcagtacagagagcttcataggaagaaacatcctgggatgggcagtagagcatatgcttgcacctccagggaggcccatcaggattgatgggcttctttctagctgtttctcaagtgctggtagagtatacttccccagtaataagttctgcatgtatttgtttgtagttcattttcctgtgatgttaatcaaagattgtgatgatgagaactaattcgtgatcttcattattaacaatttccatttgagtcttgcatatgataatcctgagtggttaattgttaactaataggtttagtctattcccattttcccatgctgttttctgtgctgttatgtttacctctcaccagccctttctagtttcatgcctactatttggggactttcattggagaaatcatgggaatca

SEQ ID NO: 127286 - DNA, 1022 bp, Homo sapiens
atttctggaatagagctgttgagttgtgcattgagacttaggaggagtcaggaacatgtattgatttttatgacatgggtagcactaaggtccctttgaggctccttgattattctcagtctgagtaggtttctctctttataaagtaggtaagagtttagcaaaaaaggaagagagggtgctgcaacctccttgttagtttaaacatgaaaggcatgcctgtgtgtgtgccattgttattcctataagcattttttccagataactacatccaaaggatagtgatgagtagaagtctatttctgaaaaatgtaatttgctctgatcttgaggaaaaagaccttctcttctgagatgttaggttgcctcatgatttgcgataatcaatttgataattgttgttgacttactggttcagctcatgaatagtgtcccagatttagactagtatggcacaaggattttaatcaagtagtgctttctttcccatggagcatttatcttgtttgactgttctggacttcagccagctgccagacaggcatttttcatgtgtatatgtgtaggagaatgtgttgcttaagtgttcaatggggaagtttccaaccccctaaagctcatggttaccttgccttttaccactgtactgttagagacactgagaatggatcgctgtctctctttttctctaagaatccgtttgatgggaagcatgaatcttagttactatgaatactgttttcatcccagcctacctcactgcttctgaatgagaggagcccctttggctgctctgaaaactcttgaaatacttgatggcttgttatgttttcattatctaatgtgcattaatttaaataaaatagctctgttgttagaagaagagtcaaaaaggaaaagcttggctgggtgcagactgcttgtgtcacagaagtcaggaaagtttgcagaacttggtgtcctcagagggagttttcagttctgctggctgggctgaaaacctgaaactctaaaatccagtg

SEQ ID NO: 127287 - DNA, 1082 bp, Homo sapiens
tcttcctctctggttgggatatgcaaacacagtttctagattggatcctcctgtgcctgcagacccagcactgcaccccctttctgctcctcatttctaccaagcacaggatgtaggagtagagcaacttgcaagcacgcagcccttatagagctagagcaaaggaagttccagactaggaaaataccagccatggaattctcagagttggccttcattacccacttgaaacagactgcccatgctatgttagttgtggggaggcctcagaggagccaagacactcttcccctgtagctccccaagcagtgccctttgtctccctttcattcttttcaaatgccattaagatcccagtcctttatgaaaccccagccatgacgttgctttcacacgctcttcccacatcgatagtatttcttgttgtgctaaggttgacgtgctaaggcaaagatgctcctttctttgctgacttaatgtgtgtcttaccctatcttttctggtagcttaatatttcacaagccagaaggctatgtataaactgtgctctttgagcaatttacatttatgcattcaaggaacaaactgcttcatttctttgctgctggcaaataatagttatttatttccagttggtacttcacagagactgcagtctttgagggaaagctgtcattttacttccaccaccacccccaccccgcccagccacccttgcacacacaaatattcattcacttgcaaaagacatatcccgccgtggtccccagatgcacatggtccccaccttgccttttttgctagtgtcctgttgtctcagcacttcttacattgaattactgaatagaatttgctatggggaaagagaaacgggagtcatgcttgctgcctcctgccagatcgccttggcctccttttcctagaaggcacaggtagtttcttgtctggataagggtctccctcaggccccaactaaatggattgagttatgagagataaatcactccctgaacacatgaccatggagctcactgctgctgcttggctgtcacttctcattgtggctcttgtacatactctta

SEQ ID NO: 127288 - DNA, 1281 bp, Homo sapiens
taagacagtcatgagatagcattcttctggaagccaagggagtgaagaattcccaggcaccagcagtgtcagagtttacataaaacatcaagtatataaaaactgtaaagggcttttatgctgtttatcaactagtaagtcacaggtaacctctcggtacagtttcatcagagttgagttgattaaaggtagattacaggtgactgggaagtaaaagtgggaagtaagaaacagacttagtaagtacagattgcacttccctgatatctaacagagaatggaaaagtagtgcagaaagtaaaagccaaagggtgaaggtaacattccgaggatgtcagcatcttgtgcgcttttagaactgtaattcttattcaagaatcaagaaggtatggatagctgaaaaggctattcagtacacctattgttttcataatataaattttagaatgtaaaactcaacaaaatattggcaaatgaggttataaaaaaagatagagtgagagattatcctggggaacatgaggtttgaaatattgagaagcactcgtctgaattctgaagagaaggaatcaggaaaggctgcacagggataatgaatggagcagtgacctagaagaagcagaagggatgagatgcatggagaacgtggtttgagggagtaggcttggagagagaaagatcccttggtcttttaaaactacctacaaagctgaaagtgagtaggcatgctattcatgttgtgggattgttcgcctgggcagcgattgtcctgctagagctttgcagatatctgccgtatgcaccctccattatgtaagtgtggcattctgctggaaatgtctctttgcagtaaggagggggtttgggttgtgattctcaaggggaaagtcaagataattattgggagcagtcccttatgtgctgctctcattaatcccagccttttggagagccttctgtacttcaaggtggggtggacactttccatttttatgtggccttttttcaggcagacggccccacagcttgatagggagtggcatttggcccaagccagctggctgttctgtcacggttcctgcacccctgtatgtagaatgatcgcttggtcagatgggatagcaggtggggctagagaagtcagctgtagccaacaggtcagtgcctcctgaacgctcttgccctctagtcctttaagcacctgccttaggcttggctggtgagcaggtgaccttacagcatcagaactgagactgttcaaggtctctctgcctgctgctg

SEQ ID NO: 127289 - DNA, 1046 bp, Homo sapiens
caccatgaatcatccccagaatgagcctcatcatacttgtgggtcattcaattacatggttatttaataatttttttttatattcagtgggcacaatgctaggaatacagaaatggatgatacagttccagcctttgagcaaagtaattgtgtctactggagtaaagaatgtattgacatgaagaaaaaaatattttaaaagcataagggtaagcaaaacatggcttaaatactatacaaatgagaacagctcagattttataaaacaataagagtaaatatgtaactgctgtcaaaaaggctgtttcaaaactcggaaatacagaacgcagagaggagtggagccaggtactgacccagcccaagtcattgcattcctggtggtacggtgtaccatctgaggaccatccttttaggaaggacatcaggaaactgcaggtggtcagatcagaggaggatgaacaaagatgctaagagcctcagcatgccaatacctgaagattgggagtaggaattaaaagacagacttccatgacataatctagtgtttcagggtaaaagagagagaaacatgatttgttcagtacccattccagagtaataaataaagtcatcactaaaaataagatttgtttggcctggtttaatggcagtcacagaccttggagctaaaacacttaaagatgaattcttgccctcctgcttcctaattaattatttccgtcagactggcctgcttatcttggtgtgatgctggtgacctggaggtgagggagacagcaaggccgatgtggcatttatgtgccagcctatctagggcctcctataactagcaaaagatagtcctagtggtgtcatcgccttctatggagtcagactgtggaggatggtgtggcctcctgattggggtgttcagcccttaccatctactgggttttatgtgccaagaaaagatagatgttgatttacccttgctgttagatgataggcctgtggattagctttggatgggtaggtcagtgaggagtttccttcctcctgaattc

SEQ ID NO: 127290 - DNA, 2083 bp, Homo sapiens
ccctgtgggggagtccatttggtcagactaatagtagaaaatggcaggacctggatgcaggagagggagtgtaaatggtttggtaatttgaaattaaaggttaatgctttgaaatctggtaatgggcagcgccagggtgaacagtgcacactgctgtaagacttaatcctggttgctatggaaactacctcacaaatctcccacccctttcaaccagatttgactgggtttaaaaaataaataaataaaaccattcttcatcattgaaaagctgtttgcccccttccccaaactccaggtcattgctcaccttgagtttctttcaaaagtttttctgaggcttccccagtcagatgggctggatctgttagagtttgggcctggctctttgtgtggaatttgaataaatagcattaacatgggaattagaagacacttaagtgtccaatgtgggcagcatgtgcaagcttgctctcctgctggccttgaggaggcgtcatagtttcagtcctggcactggacagggccactgaccacagaatgcacttcctcattccccatgtatggggggctctgaggaagcccaaggagctgctcttcgtctcagtgctgtggagtgttcccagattctgctgcagggctgccaagcactggcctatgaggagcaagaacaatccacagaagttcgtttcatgtttggaaggcatctgagacacaactgcattctctccgtcattttatttcatcattagagctttttccaatttacttaaatgaccctcttaatctagaccttgtaagtttttgggctttttttaaccaaagcttcttcaccctttgcctatgatgaagtaaatgagatctacatctcatttggctccctgcaagattagcttataggcttctaaagtaggctttgtagaaaactttctattcaagctttctggattccctgtagtttttccttaatatacttattatactctgtaatgctgttacaatagcattcctcagtaaaccctcgtaactcccatgcttacctttactatgagtaggaaaatatttaaatccactggttagtctgcggctggtggagaagttcccatttccctgcccttgtgtgcctccttttcctgagcttgtacatctgctagtgatttttctagggttaatttgggtgtttttatttttaaattggaacatggtgtctgtctcttctctgtgtgtgttttggatgcagcccctgtgctaggcatgcggttattaactccactgatataccagttcgctcattagcatttgcattttaaattacaagctagagcagacgacatttatgctatatttgtaccattgccttcttcatgaatgatgtcgtatgtgcagggaatgcagaaataactcttctaaggccctgatgtattttagtctcttttttagcaaactgctatttcttttttactcttgattcttattgtttgatagggagtttttttttttttttttttttttaaattttccaagtttagacctatttgtgagtgctactgattgggaagtgctaacgacagaccagcccttcatatcaaaataggcatattgcgtagagtggccatttttccctttcacgtggtgctccttgtaagcagcctgccttgatttgagaggagggagttttttcctccacagtttggtgggtgggaagacatggtaacagttacttgttcttgctagtattcttgctcacatccctcttttttatagttgactagtcagtggttatttaacacctgttaattacttgacactgcaaggggaaaaaaggaaatagtgtatgccttcaagggtcttatttttgacaagcatttatattgcactacagtacagcatatacttaaatattaatattgagtgtaaaataccaagttagaggtgggtcttttaagtgagatttgccaggagcaaaggtctcgtggagcagccgttgctcttgccagatggtacaatagcttcagcatctgcatctcaagaactgaatcagaaatgcacagtcatagatcatggatctgtgactgaagccttc

SEQ ID NO: 127291 - DNA, 1049 bp, Homo sapiens
gcctcattgtgcctaacatagtgtctggtttctagcagcaggatgagggcagaaagcgagctctggtagataggtctgtgtttgtgccattttgctttcctctgtgagctctaattttggttctctgagttctgttgcagagtttcttcctgttggtgaatgctaacttttaaaacatcacatgaaaaatacagggaagtcatactggaggtaaatgtgcattgttgttaggcaagcacaaattctgcagttgatagaaactatttttatttccccactttctccctaaaggttttctctgatataatcttcattcttctaatagctgttggaataaccaagacacgaagagttgcatttgatgctgataatccaagtacagatgatacattaattcagaacctgatccctttaaggagtctcattgctgcacatggcatattatacattaataatatggggtaatagcattctgagcctcttacgtggatccatttcatgctatgaggttggcctcacagtgaacattgccatatcatactcactccttattcccttaaagaatacatcttactattggaatgagtgctgggtggttggtagctttggttccttcaacacagtagcacttgagctgtgccacttcacaatccagttctacttcatgtttgatacagctttgtatatttcttttgattctattaatcattgtaataatttcttacctggaatctattgattcatagtttctaagaaatccatacacagcacatcagagctccaagtggggtccaaagtcatgtgagggggtccttagttcccacctcacctcaatcttcacattagttcattttccataaataaaaatactcatgaaattcttttgaaaaagtgatgggcaggaggacaagacaaaattgataaagaattgttacctatctctgtatttatcctacgaacgtggtccattttgggtccattgtttgctgtgcccttctgtgtcttccatgaaatccaggctccagacataggcctttgtgcttcaatct

SEQ ID NO: 127292 - DNA, 1029 bp, Homo sapiens
agtctccattttgcagatgagaaaactaaggcctgggaaagttaactcacttactaaataaatagcagagcatattttcttgatctcctcatttagaacgcaatgccctaattgacattgaacatatttatctccaggtaacaagggacctttccaatcttccctccattcactgcatctgcgtgtactctcttattggctaggaatcaatctggtactgcctttcttttgggatgatcaaaagcaaagcataagaatgggacagtggcagtgaccctaagtaggaagtgtagtaatgaaggtatgaatttttagttgtttgggggtttggatttgttttattgtccccagagatgacaccaataggaacatatctaagatgagagcatggctaagacatgtgatcatagagcaagagagagcaggtcagacctgtgggatgggtttatgagctggggcatttatggataaattaaactttagccctgagtaagcaaagtcctaagccagttattactgctctggcacttctaatgggccctatgcaacccttataaattattcagctactttattaataaaagaccaagcaacttgcctagtcctggtgatacttaagtgtatagcttagagagtgcaagttagaggaatagaatatttgccatccaccaaggaatcctcttttctaatatggaggtgaaagggttaaactgactaccttgaagagcagagttttgagatagagtacatgaaactggcattgaaatgttaacagtgtctgctaaaaaagggctttcctctgaggaagtggctgttgagatttcctggactgttgcatctgatgcacctttcacagaatggcatgactatggcgagtaagtgtcccaggagatccaccatttaagcctcaagttttttatttttgtttttaataattcttatgcctctttattttgatataattttacacttacagaaaagttgcaagaatacaagtacaaagatcttccatttaccctttattaaatt

SEQ ID NO: 127293 - DNA, 1028 bp, Homo sapiens
gcttggatttggccccagcacagggtgaaatgtgggttagatcctctgaagaaggaaaaggtgcttccctcagcctttgtcagcactaatggccagctgtgttttgtgctctatcactttgttttgcctttcccttgtcatttggtgagccaggctttatgctgaatagaagataaagagtgcttatcctccactcccttccctctcagttctcttcctctcactgtacttgaaagaaaactggaatgctgggacagaacttcttgatttgccctttagagtagaagctgtaaagagactgtggtcaccaggaccccatgagctttaggatcccaagagctttagaatagtgctttccaaacttatttaatgggtctggagttgggccagagaatttgcatttctagcaagtttccagacgatgtcaatgccagtgatttgcagacccctcttttgagaagaaagggcctagacttccctccccctttttttttcctctaggtttgggaattacgaaatattcattgtatacacaatgcgttaatggctaagagaacaggttctggagccagtccccacctagtctaagtttaggctccctaacttgctagataaatgaaactctcagtttccgcattaaagaagtggagaaaaaatagtgtcattgtgatcagcagatcatccttgtgatgtgcctcttatccggtgacacagcatttgtatgatgcaaagaaagccctaagtggccatttcgatccagtacttgatacatgaattgaatcctgtccacataaatgctattgtctgggaaggcctttgccttatgacattttagggcatatccttgaaccaatactgtacatgactttccctcccatccatgaaatgaaactacagtcctgttacattccctccctcctgcccagattcgcccttgtttggtaagaggtgcagagctcttagtgtgcatactaggctggtctgtcattgtggccacatcttacagagatgtaatggtggctgcagat

SEQ ID NO: 127294 - DNA, 1061 bp, Homo sapiens
cctctcctttcttgttgaacagggcacatgcagcttctctgtgtgggtgacgtccacataaggagaatgccttatttattttaggtccatgagcttgcgtaatgtgcctatttaacaccctcctaaaagcgcttttcagcacatgagcaagtaacgaagcccactaaatcctgcctcttctgggcacactgggctgtttaaggttgttcctgcgctgtgtatttatggataggagctggagttatgacatttatttctgttggttagggcactgatatatatctgcctgcatctcccatggagaaccgcaccttatcttgagagagagatgagagcattcccataactcatcctgccaagcactgggactgtcagggtgggaagctacttctctccccctagccagtggagttgtgggggggtggtggcacgtggttatgcagagagactttggtggtaaaattatctaggatttaaaacaggagagagaaaaatgtagctcctaataagctctccttttgctgtcatgctttgttcaacctgccccccagtcccctttctcaggcatatcatcagcaatccttggggtctatagaatcagtttattccagtcttttgctctgacaggattctgtctcctaaccagtcttcttctgttctcatgacccttctggcctgtctgccttgtacaagggagaccattctaagacacatatctgctcacatcatgccctgcttataacttctcatcagttcctttaccttcaaaataagacatacatggccttcatgatctataccctgttcatccttctagcttcgttacccacattcccccaccatccgctcttcctgagcaggagcacttgaagagtccaaaactagtcttactggcctcaggcatctaaccctttctgctctctacttggaatgcctgttgccttctctctttttatcatcacctcccagaacctggtgtaagtaagtatatggctccaaagaaacctcagtttagcatacatgtctctcttcctctagcctgtgttccttgtttatctcca

SEQ ID NO: 127295 - DNA, 1282 bp, Homo sapiens
tgtgtccattctcaaccagaataaatcagtgcaaatgccagtgtccactccctcgccagacctttgagacctagttggaagaaaaagggtatattttatcaagctacgtgaaaatcaacaggacaccctcctgcaacaacagagttgccctttgttggccgaagcgcctcttatcattacctgtgagagctgattggcctgaatgctctcagcacctgccctgtgcatcacgtgatcggatcctataagtatcctaagatcatattgcacaactcttagaaatgagtgagagaatttaaaggtagaacagctacattggtacacataatttatgccttttcttgaggttactaaaaagaaaaagtattccagagagttctaatataaagctgaggaactctttgtataagggagtatgatgtgttctctctctgcttggaattgctgtgctggaaggaagatggggaaagggaatgaatatagtcaaataaattaagccttgaaacccaaatagtgctgtgtaagcaaactgactgcaaatcaaacagaggagtgttagcaaaagaatacacgatcttggttgaggctgaacaaaaccaggttctttgtatatacgtatatatttctctggacgtgtgcagagttgttgcatttctactcccttaatctcagacatctttggcaaaatgtgttatctgtccatgaagaagaaaactgaagagtgtatttcccccaaatggcaaagcgtaggctttatcaaatgtagacatgcctgttggcaacagaaagcaggatgtgtatggcttttctgtctttaggaatgcccatgtttcctatgtttcttaccatttttctggctagcatataaatctgaaaggttaggttatggtgtgggtcataaccatcaggcccagtctattctccatccccactctgcaggcagctctgacactatttctggagcaagcattgaaaactatccgactgtctggttttgtagatgaggaaacagcacaaagaaatggagtggcattgtcatagttacagactgtgtgagtggcaaaacagaggcttcatccactggactttcagctctacaacttgcaatcaggcataacatgttcttaacttgcctttttgaaatgacacctctctgagccaaagcttctctaagcatcagttcaaatgactccatgatctcttagagtctgtaaaaaacttgagagtagaacatattttcttccttcttagaacctcaagtcaaatcaacaattactttata

SEQ ID NO: 127296 - DNA, 1873 bp, Homo sapiens
cttagaatcaagagtagcaggaagactggcttgtgctctcccaagcataacacaacagatccaacatctcctgaactgggctgtggttctcagaagaaaatcaagggccctggcagggcacatatagtttgtttttgcccccaactccccaaatccttggcttccttctattgtaaacatctggagcagaatcagcaaccgcccccacagttgtgcttgaggtatggtcctctgggcagcttttactcagtctttacgactcaactccatccagagttgcctcctgcacgtccttctctacctcctctgtgttcacccaccatcttttgctgcctctgctattgcctagtccactacctagtaactgttcctttgcctggagttttgacactggcaacacagtggaagtaaatagttggtggtgggtaggtgggttctgagtcctgaggaagaggattacagtagaatgtacatttctctggttagtcattacgggtgccttgaacctgggaagggaggaaggtataccgagctgcttccaccacatgtccaagcagaaccagctagcccgctttctgtcccctcaaacactagtgcagtaacgtgctgtatgggaagaagtaaatgatttaatatacagatgcctggtttctgatcctggctccattcgctcgtatacaaaatgagaaagttatacaataagaactccagctttaggctgggcgcagtgactcacgcctgtaatcccagcactttgggaggccgaggcgggcagatcacgaggtcaggagatcgagaccagcctggctaacatggtgaaatcccgtctctactaaaaatacaagaattagccaggcatggtggcgggcacgtgtagtcctagctacttactcgggaggctgaggcaggagaatagtgtgaacccgggaggcggagcttgcagtgagctgagatcgcaccactgcattccatcctgggcagcagagcaagactccgtctcaaaaacaaaacaaaacaaaaaaaactccagctttgtaaattcagtgatatattcctttttgagggatgcactttactgtattcatttcacatgtgaattttagaatcacaggaacagtctcaaattctggatatgccctttataatccccgtgatctaggacaacttgcttaacctatctttgccttagtttatcttctataaattagagtttctctaagtattacctagcatgatgcctttatttaaaaagtgcttgatccagtgccctacgcagcagaagggtaatttcacattgtagtcattattgttatgtgagtttcttctccagtagtctatatagtcacttgttgtactttaaaaaacttttaattgtatgtgaacctagttttgataatacagctatttcctatgtttttttaaagtctatcatagtctatcagattatctgttcacttgggaaaagacatctaaaaacagaattcctttggataaatcaggtaacctaagtaatataaagttcattcaacctgaactgacaggatacagtggaaagaacaactgcccatcaaaagatagggtttataagctgcattttattgccaagttgccatgtgaccttgtgtaagtcattgaacttctcttatttccagtaacgtcctctgtaaaaataaggagtttggactcgatttctaaggttctttctccagctataacattttgtgattctgtgaatgcttaggtgatacatgaagatgtctttgctgtcactgtcttttcctttttaggcagggaaactaggaaagataggcagtgtgattttctttctcaagtttttttttaagttctgcgtgtcacagaatggtagtcaaac

SEQ ID NO: 127297 - DNA, 1049 bp, Homo sapiens
cctgggatcaagtgatcccctgtcttggcctcatgaagtgctgggattacaggtgtgagccacagcacctggccctatctttgaacttcagaaatggaatcacaatcttagtttacctttttttcttgagacagagtcttgctctgtcacccaggggcccaatctctgctcgccgcaacctctgccctctgggttcaagcaattatcctacctcagcctccctagtggctgggattacaggtatgcactatcacacctggctaatttttgtatttttagtagagacagggtttcaccgtgttggccaagctggtctcgaactcttgacctcaagagatccacctgtcttggcctcccaaagtgttgggattacaggcatgagccaccgcacctggccattttacccaactgttgtctatgagattcatccatgttactggatgtagcagaaagtcatcttttttcattgcattatgtaattttcaaagatccctttgactgctgtatggagacaagattggagagggcccaaatgaggtgaggaagtctggctgggaggtggttgccatgtgtctgagaagaggtgtgcagcctgcctaggccgcagagtgggaatgaagaggaaggagcagccctgtttaaggaggctttaaacctggttggtgctttgatagtagagcatgaggaagagagaggtcagttttctggcttgttaataacacaaggtttgatgaggtcagttttgacaacttggatgttagatgactgtgagtgtttgcaggtccagatgaattcaatagaaatgtcagaaatggagattaaaactttgagagtcatcagcttatagtggaattggaagcacagagagcaaatgattgcctagggactggatttggagtgggaagcagctaagaacagaccattgtgatgttcggaggcttctgaactgtcagaaaagaggatctgacagcagaggcttagattgagaagaggtaggaagggcactaggaggaagggcaaacaaagcagccaagccaagggcagaggag

SEQ ID NO: 127298 - DNA, 1043 bp, Homo sapiens
ggctccctttggagcagcgatttcattgccctctctcattcactacctcgggagccatttggtttccaaggagatacagaaatgagcccactttttatgccggtccaaaatactgacattatttaggtgattgagcttcttcagattccaggctgtctaggagaattccccttccaaagcattcacctttcctcctgactcaggcatgaacagctgtctgctaagggtgggtgaattcaagaatataggattttccagtttagtgacattaggggagacagcctccatatgaaacacttctcttgtttttgtttttctcttggctgttaggctgtgaaatttgcctcaccgctcccccgcccttttgctgacagctgtcctctttgccattcaggagctggtgtctccctaggatggttgactgagaaagaaaaggccatcttcctttgtcccctgggtcttgagttgtattgctgaagagcatcttgtgtcaggagatctaattgccttcagacctggggggatccatttgggccagagagtgtccaggcactttgtgaattgcagagggagttacccaaagagaaaaagccctatttgtgactggccacttgattttgtttgttttgttttatatttttagaggacatacaatttctttaatgataaaaactatgaaaaccaaaatacattgttacacaaaagaggcacacacaaaccatacagcttttcagactccccaaatttccctacaaggacgtgcagcgcatcgtttttccattaatttaggtgtttttgagcaggccacttgtttacaccccagtattgagttgagtgtagtagggagacactcaggagaagcattacttgtgtttgtatgtgtgggcgcgcgcgcatgtgcgcacgcgcgtgtgtatgtgagagattgactcccctcgtgtgtgtgtgtgtgtgtgtaagagagattgactcccctcgtgtgtgtgtgtgtgtgtgtgtgtgtgtgtgtgtaagagagattgactcccctctgcttgcacccc

SEQ ID NO: 127299 - DNA, 1141 bp, Homo sapiens
tgcgggtctgttgggtacctgattttctccctcactgccctccttcttttcaactgaagctttgtgtccagcatgacagttgaaatcctggtgctttggtgcactgttgccacactgtgacaggggctaaaaagcttccgttgagtgcactgctgtgccttccctgtccactggccacagtggtgactgaaatactcatgtctgcaatgttgcatcagtggaaagtaaaggatgcagaagtccttttctttccctcaggtctcccaaccagggaaaatcatcacttcagtagaacaatctttccctgaattctgcaaagtgaattctgggcagtggtttggatttgctgttcctttttatcccttaaagcccagtgaatgagagaaggaaatgaatagactgcttgtcacaacaccaccagggtctccacagtgcctggggctgctgctgagagacagagaatgaaagctggaatggaggccgtggaggcaggaaacctttgctgggacaggctccacctcccctacatggtgtcttgagggcttcccatttccttcagtctggggattccgcccgcactaatggagctgtctcttgctgcagcatgcttcctggaggaaaagtccaactctgcctggccacacagagagaagactgatatgcagtctctccacacccctcccccgtttatccaacaaagcagcacatttcactgcgaacgcttccggagtcggctctcaacagtgcagaaaaagggatgctccctgttgcacactccaccacccccattggacgtttttaattaaatcaactagaaagatattttcagtttgaagattcacttcatcttatgtaggtttaaagaagaaagaaaaagagtagaatggtaagaaatcaaaattcacgtctcatgaggaccttagaaatgttcaacccagagaaaataagacttgagaatgagaagaaatagatgttgcaagtctcttcaaatatttgaaaaggtgtcaaatgggtaatgcatgttttatatggtccgaaggaattggaccagatcttagaaggcctaggatgtcagattgtggagttctgattttgtttggaagcaaataaaaaaaaaagaaaataagaagcagaacattgt

SEQ ID NO: 127300 - DNA, 1038 bp, Homo sapiens
tgaggttctcatagaaaccaactcctcctccttgctcagacgtagcatttgtgcctgttagatgctgtctgcacagtgccactgtgttacataaaagcttgagccatgtaggagctttcttgtcattcagaacactgcagctctagcttttgacctcagatactttgttttctgtgaatttgttaatgaaggtatgaggttgttgttttggtatggataataaagagaaacccaggaaaaaaaaaaaatttttgaaaggcacaggtctctcccatgcccagttgttctttctgctagtagctgatggtgacattattgcagctgctgcttatagcaatccccaaaaatgaacatgggcattgggaagcggacagcctgcgatctccagtccccttcccaaacacacctccagagacagcctggtgaggtgggttacagcctgctcttgggatgccacagaaagggaaaggcctcgttaatcagtgagagggttttttttttctccccttaaaaatcattgttttcagatcttgctttgcaatggggagaattataaaaggttattcccatgctggcctgattgttatcttctgtaccagctccatctaaaaatgcttttttcccatttgggagagattgtgtggtgtctaaagctaacaataaatcaaattcagtgaagctggttttgtacattgcctggctagactgagagcaagatattcagtataaggcctctaagtcatcccttccttgcctcttccactggctgtggtcaatgattgagcatttaaccacacactcacctttaagtcctgagaataagtagtactagaattcctcatcaatactccacaggttaactcatatgcatccagaactcttggaaaagcaggttgttgtaacaggtttggtgtatctgttattgctagattttctcctctctggcattcatgtagcaaactgaattattgagcatcttctgtttgccagataccggggatgtagagagaagtggcatatcccttacctcaaatgact

SEQ ID NO: 127301 - DNA, 1054 bp, Homo sapiens
ttatcagcaggcagcactgcactggtatgttatcagaaaagacagctattggtggtaacatgcaggatccagccaggcactttctcaactggctggggagaacttctgcagctccagtgatatctcacttcatatttacagtctgaggccctgtgtggcttgggagcgctccattgctgcctgtcagcctgcccagctgagcatcagcagccttgggtttgctttcttagaacccaactttctttcccttcatctgttttctttaacttttatttttaacgtccattttattgcatcaccagcccagcagtgcaggcattgcttgaggaaaggtgcagcatggattaggttgacttgctccctgagctcttgggagaggagggcacagcataataactctgctcgctgccagcatgtggcttcatctggctttcagcagcaacgacaactgactttttggctcagaatgttaccatttgtgtggtctcctctctaccagtggacagcatattttttgctctgttccttggtcccttagtacacaaaagcaagtctagaaactggataaaccctcagttggagcacttttttaactctgcaagaaagccatcaggacctgccccgtccttccatccttctgtctttacacctcagtcaataccagtgtttttcaaactgggtatttgtcccactagaggttttaaatcaattcagtgtcatagccgttttgtttttttccttaatgaaatggtgaacagaagagagactgtcagtataacatatactgacatatataactaacatatatagtcaagattaaccattgttttgtggaaacgtaataattgctaagctggcctccaataaaaataaccccccaaataaataaatgaatacataaatactgctctgcaaaaggtaatatcaagatggcagagaaggaaacctcaggaaatggtcttcctgcctaaataattgcactggcagaatctgcctgatgtgactgttttgagactctggaatctattgaaggcttcttacttccattggttgt

SEQ ID NO: 127302 - DNA, 2787 bp, Homo sapiens
ttttctttgaacatttatttgtatctttgagtaattgtattttctgtagcgggttttctgacttaatttaattgtatttctgtttctgcctgttgggctggctcttgcatgcaggagttaggatctcagctgctgtggtgcccttctacctgctaattttgctcaagccttcatcaacagatccatcttctttccaggagtatgccagccatttgtcctgctaggtgggcacaagaaaggagcagcagggaggtgtgcttggctcagccttaggatttttgaatctgccattgtccccatttcttttacagtcatctatagggtccctccagctttcataatactcacagaggtacaagattatagggtcctagaggctgtctctctaatgagtcttcgtagatctttgagagcagatgcgtggacttctttaggatgctcagtgataaaaatacctgtttgtaagcttcagcctctcaagctgatttgaattgctaagaaatacatgaggcgtgagagaacaagagaacacgccactccgagatgcttatgttggactatcctggccttgagagaagtgttggttgccacctctttgattctttactgcttgccttcttattttgtagaagaaagtggagtggcctaacaaatcctgaattctcagttccatttcccaaacatcagctacaacaatctgggtatcacatctgctttgttggctatctgtacaatgattgggggattggggggcttaattgtatcatcagattcacattgccctccattttattttttgtgaagatgcatgcaaagtaaaaatccttatattgacatggaaggtgcttccccctctcccgttttgtagttacacaatgctgcctgaatttttatcaattaaaaataaccccgtgcaagagaagtatttcaaaaatccaaacactccagttgtctataagtgcctgttgcagtttttgaagtgggccagggattaagtggatggggcagatattgtagaatttccctctaattttggataatgaactgcaaagtaactatgttggtaaaagcaggtgagtctgttcaaattcataacttaaagacattgtgaaggatgcagcaacagacttttgtttgttgtgctttggatggaggaaggaaatcccttcattagattgcccaagacatcggttgatggcattctcatcatttactgtctaagtcaaatttctcaccatcattgtcttcctactgtttcacatctcctaaagtttctttcccattctttttcaactgtctttttcccaaccacctttcttcctgatcatgtttctggcccactgatgagatccaaaagtacaaggggatcaaagagaatactgatcactaaaaggagtgagtggcccaaaactcttttactctcccatggttattgcgaccttacctttgtcttatatttgctaatacctgactgttgaaaaagattaaaattttccccagttttctttggggaaactctttggtgctcttggtatgtaattgagtttgcagattcttagtctaacccagagttgatctttcttgattatagtggccccatctttcatatccctaggttgaggatctcaataagaacctttctgcattttcttagctacttatatgattacttgggttggctgttttgaaagttctttacactgagaaaatgtgagtatgtcctaaactatgaataattcaaaaatctgactaaaagatccagtaataccctactgtcctgaacatttcctttatattatatatgaaaactgttttctgaacagtgtaggaatggagaggtttgtgttttgttacaggcttattcatttacttttacctatgtagtacctccatttttatttcataagttgtcttggggaatgcttctctttgtcctactcccccaaccccacaaagatctagcagaagaggaaagtcccagtacattggtactcctggatgcagaggtccttcccgccctcagcagaagtcctgagcaatgcatggatgcctgaatgtgggcccacgacctcccacctcatgcagctcttaccttccaggcagcctctatcttgcccacagtgcacgacagtgcaggaactctcctggagctgagccaccgctgggatggccgcagttgaactggttttttgtgccttttacctgttcccttgatcatgagttttagctcagataaccaggtattttgaagacgtgattgtccttggccctgccccatcccttccctttaaagttttaaatttttttcatgtcttttctttggccagaatttctctatcccctgcatgccttcctcggttaccataaatctgcattatcctaggaaagatgaagcccacagattgtacgatttcagagtacttcctgggcccctgtgtgatccgacagaggcctggtcatcaagttggacttccctatgtgaaaccataaactaacctgaggaagatactgaggggagaggggctgtgtaacggtgactgcctctaggccagccttctgccaggcagagaacaggaagctggcatgcagggtgtctggcactggtaaaatgacaccatgtttgtaagtgcattgtcctggcttttggtgggccgtgcaggagttcctgcctgaattatagtctttccatctcatatcttcatgtggagccctcaagctttagacaagtcttttatctccgttttcaggtggctcccattatcttgagacctcataatgctgctttcc

SEQ ID NO: 127303 - DNA, 1029 bp, Homo sapiens
acaggcatgagccaaccgcgcctggcctggccatgctaattctttcatgtattgtctataactgctttcatactataacagccgagttgtgtagttacgacagaggctatatggcttgcaaagcctaaactatttacgatctgttcctttaccaaaaagtttgctgactactgctgcatatggtatgctgaattgggtttaaatggcttgtaatagccctgaaaatttaagttggctctcctgtcccctgccgttgaggctggactgcatgagattattgtatctgttggctgtagctgtgactatgagctgagtgccatgtcccattggatagcatgtacttggtgacccctgacccacatacagctgactctttaaggcagttccctgccacacagtcaaggacaggaagatctggtgtgatttcccagatggggagttgtgcctattactagcatcccccagaagtagtgagagatagcattagctaatgggtaaataactggcttaaaagtgtaaactcctaggttttcacactccagtttttatgtggtcctggatatgtgattcttttctgccttggcattcctgtctaaaacactgatctagcaatcccaagccaccctttcctttttgcggcccttgttctgaataaaacagtgatttcatgtctcttctcactttcttccagaaggcagctagccagcacatactcactgaccagttgctgcctgcacagcagtgttttcactgctgtgttggagaaacccgaagtcttaaagggccataaggtattatttaaagagatcagtgtcatagtttaactgtcttcacagttccaggctgtaggaggtacagtttctgaggacaggggcaatgtatgtgggtttggtgatcatttctaaggcctttttcgatgacccctttgtcctttctgacacattagaattgctctttgctgctgcctgaaaaatgatgtcctcatgctggacagccccagctgaaaactcaggctgctgccttgaccta

SEQ ID NO: 127304 - DNA, 2047 bp, Homo sapiens
ctgtcttaatagcgatcaaaccttaattttatatagcattttctcattttaaaagtgttttcatgcataatgtttcattttaatctcacagcaaacctataagaaaaatattaaccctgtcttacagttcaggacaccaaaatgcacagtaacttgcctctgttcacagagctaatggtaagacatatactaaaactcaaatatctgcattccaaatcaaatgctttttctcctcaaatcatgccagttttgcttttagaaggcaataattcttttagccatattttaccatttttcaaccatagaatatctggaactagttaaaggaatagtagaggacttccctgaaggtcccacattgactaagagtcagtcttctatagggcatggattctgatcctgaatgcttccaagactgcagaggaatttgaagaatttgctatgcccatgcctcccctaaatatttactctgctcttcccacagctcctgtgtctgttgtctgattcctgcttcatctgctgtttgatttttgtgggccttacttttcccatttgctcatgtatgtctatattcctatatctaatgtttcttaaaagacaaatctgactgtgtaggtgcatttgtttaaaaaatataactccccattgcctctgggataaagtcttatctcagtttacatatattcttgataacctctccaactttatgtctcaccacccccactcacttcgtaattcgtgccttatcagaatggacctgttatactggcagttcaccatatataccattacattttgtttctcccatctctcaggtagacttacactttcggcccagcacatcagtcatcgcccttgcttgctttcctattcactcctgttctggaaggtgcaccaccttttcttggaaggcttcccttgctctcccaggctagatgagatgtccttccatcagttcccacagcaccctgtgcatgtatctgttgtgcacttaccaatagtatacaagggatctatgacccaagtctctccccactagcttgtaagctcctcacagacaggaaccatgttttgtctttgtactccagtgcctagtatataagagatactcaataaataaatatttgtcaaatcaactaattgattccttgtgacctaattctagagaatgggaagaaggcctgttattttgttgtcctttatggttctttaggaaagctctccaagcttggcatttgtcagggtgggaggaaaactgttgaagtattaagactggacacatggctgctaattcatcagcttatcattgaaaaagtccatagccaaaacctgactgtgcacttactataggaccctgacctgcctgggtctccctgtctctccagccagtatatttaaaggtaatgagataatgatgagtgttttgaaaaatgtttagtgttcaaatagaaaccattcgtgtcccttcactctctgaacatagtctgcaaatctctccctctctggtatgtttctgttttgtggattagactgctaaataagcgaagagttaattttgaagttcaggtcaacaaattcctgtttggagacgggctgttcctgaataccaggttgttatctgtctattacagccccttcacttctgggctcctggccctttgcgaagtacttcagaaagcctagagagaagagagggccctcaaatcccattccagcccctaaatgaaagtggcatcacaaggagaaaagtggaggtagaaatgtaccatgggggacgttgccccattgcctttcttcccctgactactgggcttcctctatcagcttttaacgcctggaagtagctgagtctccagtcactggtggccttccccaagtgagctcagcagcatgtgctaataggtgccaatactgtgctggctccagtgggattcctctctgcaaagctgctggcttagcttgactgtttccctattcctctccttagaactttcatagccagtcaagcatagaattgcatccattcttctgaaataggtactgtgcc

SEQ ID NO: 127305 - DNA, 1050 bp, Homo sapiens
aagaacttctgaacccagagcattggccaacacccatacagacttgagtgtgagcttgctttgcttttgcttctttttttttttttttttgagacagggtctcactctgtcgcccaggctggaatgcagtggcacagtcatggctcactgtagcctcaacctcccaggctcaggtgaccctcccacctcagcctctcaagtaggtaggactacaggcccgtgtccccatgcccagctaatgttttgttattttctgtagagacaggctttcaccatgttgcccaggctggtctcaaactctgggctcaagagatctgcctgcctcagcctcccacagtgctgggattacgggcatgagccattgcacctggcaagtgaactttaatgtggtatgtttggagtgtcttcaggcttcaggcctccctgttccgtttgtcctaaacattgcaagccatgcccattgtctgaatatcccctatggaattacataattcaactcatatctttttagaacacagctcttaatgtataatagcaaggctgcctgagccaccagcagagcacaagcagactgtagatggcattttttctccaggtaatactaacgttgtggtgtttcacatgtgactcgcccaaggacagaggggcaactgttctggtggatgagctgacctttaccctgccctgttcttgccattagcatgcccactccctgtgtctgttgccaaggacttgaagagaacctccgtgttccaaacctggctttattgatgaactttccacttgctactccacccgtgacggtttctggtcagctgcacttaaatggattttgaaaatgaaagtgaccaatggtctgttatgaaatgctgcggtgcatgaaataagattatgagcaagcttgagaattaagaacagagataccctaacctggtcaaaacaacatgtttcacatagtgagaaaggaatagctcattcttagtctcttctttaggacatttaagggcatcttttccttcttaatgaaactctgttagcatgtgaaaagtc

SEQ ID NO: 127306 - DNA, 1050 bp, Homo sapiens
ccctgagtcagtttctggagattaagcaagggtgccaggagcgttgtgaagggctctcattgtttttacatgtcagtgactgcctgccttggttttgccagctgcaaaatggaagaactaagccctcttttgcctagagaatgctaaaaggtgaatactcaggtgtggtggggaggtttctaaggacacccagaccccagatgatgcactaagagtgctgtgtgacctgaagagggacctctggtcagaacatttttttctgtcaccagcaactgaataattatgcccagttggtagaataggagaactgttggcctgggaccctgagatctgaccatgatgttccccattggactaaactttggccaatatttccttttctctatgccatgaaatcttttgcattgcctttttctggacatgagtagagtactgactttggcttctgataagcagcatatcctaaagagaatctgtcccagaggacttaggggttccttcagtctttgccgctctggttgcactattcctgagctaaagatgaaaacagacatcagatgttcatctttgtgttatgggttgttatccccagccatcataaccgtgtgtcttatttcctggttgtctgcataaggccgtatttacatagagtttgcaatcttgcctgtgtggtcagtatccgtttcaccctaggtttacagccagacctctaacatttggacccaggcctctgatattcatgccatgtcttttgcccagagtgtttaaaaggacaggcctgtgccctagctgccgtaatctttgttattttcaagtacgaagcaagatagctttgccttatttgctgtctgtctatattttctgggcatgtcagccagggagtgaggttagtaaggtatagctagagattgcccttgaagcttttgattcttgctttcctgtccagaattatagtcagttgttgagatagcctatcccaacaccactaacgtgtgacaacttcaaaaattcatgaggccttgggattcacagcacctctcaataatctag

SEQ ID NO: 127307 - DNA, 1674 bp, Homo sapiens
gaaggcaaagcaaatattatatgggaaactcaatctagttatagacgtttctttgtcaaacaaactaaaatagagcttttcctttgttggttagaaaaatttaggaatggaaatctacatttctccaaagagcattgagtgcaaagataaaaaccaaattataaatagaagtgagtatgacccattcagtttccaaggacttgagcatacagccttcataatactgaattatagcctttcatagatagaagggatctagaggttatatagtccaatccaaacatttcacagtaaatgagaaaactgaggcatgaagaagttcatcacttgatgtgcactttcacatggtaaatttcatggtagagccagtctccacattcctactgtattgctcttacctttatccccacagtgcctcccagacaacagcctcatcatccacctgaagtacaagtaataatttgagaatatgacagtggcatataaaagggagtaggtgatgtgatggaggcagacagaagaggtaagcgggtgcattctctttaaattgtattattttagtgagaaaaggatgggagcctaagttagagaagtcatccagggctttggccttctgtaaggaaactcctcctagacagggttgcaaagataactgcacacagattgagaacgtgtgctagaggaggagtacaggtgtctgacagacctggaattttccatcgctttccctgatatgtagttgtagaaaagctgctgtctattcgtgccaaatccaagcttcagataagcccggaggaaaccaaggagtgctaaactcttacaggttgggggctttttctttcctttttttttttttttggaggggggttgcattgttttgatttttgaattgagagagttgtggggaggtcaaaatgcccatccacgattgccctcgaactccctaggtgggactccagctcaagcactctgttctggtcaagttgaggcagggcacagggtgggcccatgagtgccatccctttcctctggtatcccatgcccctggacccactccctctactctcccatgaggctgatgcaggactcatgccatgctgtcagggtctgggggtttctcccaccctgtagcagaggcaggttacccttcttgttagcagtgatgtctgttcgtcttttaaggggttgtccaagtgggggaggaacaaatcatattttccagcaatttaattttattaactctgatttttttccccttttccaaagcacagctaaatggagctaaacatagacatgagggctatatttagtcctgatggtgtggtagagtagagaaggcacaaacacagaggtttatctgctacctagtaaatatggggaggtgtcaggactgtagaattcaatagtaataataagcatttttatggtgcaatgacagctttgatacagggcataattttctcaggattgctattaattgtgcttctgcctatgagcggccccctggtgaggggcttggaacaccacacaagttaagctatattaaacatcaattaaaacagcataaaatagaaactgaataaaatatgcaaaggtcagagtggctgtgaacatgcagacaaggtactggggaaagaagggttagggcctggtgagcctggtgcactggcggat

SEQ ID NO: 127308 - DNA, 1078 bp, Homo sapiens
acaaacttccacattttttcataagggtcacacacgatgccaagaaatgagaaaggagtcaatgccggatcaagtcagacaaccttgtccttatccttgcctccttttctcctgagagcccctagtcaatctaataccaagtgtttcccactcccagagagaaaagaagggaatggctttggatctctggctaaagatcacagactgcggagtcgtcactgttcccactgaacatctgattaagttgctgagtctgacccttgagtttcccagaacttgccaagattcagaattcccagatcatccaggcagcacgctcctgacagtctttggtccttttggcacctgaactgaaaatcccttttcccatagctctttcaacacttgttgaatgcttataatgaatccattcattaggatgacacagtatagtggaacaaagcactacacctgtaatcagaaatcccatgtttaagtcctgactcttccatttactatctctgtgaccttgacaaaatcatttcacctccctgaggcttcatcttccccaataaaaatgagtgttttggactaaatgacctgtgggtactaagaggatgaagaaaagagagccagagaaagaggcccttattgcaaagcctgtcttccacatagcctcccccttctgatgtcagcctgcatttaaagcagccctttcctgaggccacggagaggcttccagtgagtctagttaccactcaccccacccacaggttgttcagcaccagagacaccatgagccagactgcatggcattactgcctctggtggttattgtactcatgtgaacctcagggaagtcaagactggtcccctattactttggcatcctcagagatgccgtaagaaggcaagaggttccttggcttaggcagtgggtccataaagcaagaggggttttgtagttacctgaagtatgcagatctccatgctggctcaagggctgtttgccagccttcctttacccagtagtcactagtcactgctccaaggattggccccagccccccagagcccctgtggagccgccaacactgca

SEQ ID NO: 127309 - DNA, 1033 bp, Homo sapiens
ggagagagtgcccttgtagtatacaaaggattcagttctatgccttgctgacattttaatgcttttgttttccttctcttcatcctgtctggcatgtcacgttttccttggctcttttattgtgtaacatgtgatcaggggctaaaggacattcgcagagcttgcttcagatcccagagcaggatcagggtagtggttcttaccccagctgcacattggaatcatggagtatggaggcttaggaaagctactaatgcctgggcctccctccaaagattctggcttcatcaagcaccagctttttaacttccccagatttattagttgataccaaggaataactttgataattttggtaggcataataatggcattgtggttatgtaagaaaatgaacatattttttagagatacatattaaatgaagtgtttaaggttgaaaatggcatcatgtctgggatatactttaaaatgcttccacaaagaaaagggggatagagatgaagcaaatatgacaactttggtagttgttggatctggatggtggttatatggaagttcattagtatcctattttcagtattttgaatttttcacatcagaaaagggttttaaatatatacatacattttatataaatatatattaatgttgaagctccccaggcaattttaatgtagaactaagattgagaaccactagttagtttaggggattaaatttggatcaccatgccctaaaagatgtgttttgtctttggactttgtctaacctaagcctgatttttctggataagttttcatgagtaatctggactcttggtaggtgggggacaggatggcacaaagatcaaattagacctgtatctggaatctgacttcaggagcgtacaactagacaatattgtctcttccactggatgaactcactgtaaccgccctgagagctattataccttggagtttacctgcctcatcacttgccagcactgcatgtcccatcctatggacctctctggctacaccagggcaat

SEQ ID NO: 127310 - DNA, 1838 bp, Homo sapiens
gttcttgaggtataggtcccaaggacctgaactgacaatatttgtcttagtccttaaagtaaccatcagattcactgccagaaactttagccagcaacaaaatgtggcagatacactaccacccccacaccccctgttatgtcagagaacatccctgaagctgctcagcacagtgtagaggggacagcagagctccaagagggatcctgctttcctcatcctgcagtgaggtgtgattcagaagagcacacagcacgccagagccttggaggttagggtagggaggttcttccccctgttctcatgtggcttacctgcaaacctgcctagatggggacttacagagggctatcatcaccccagagtgcttggactgctcagatcaactaggtagctgcttgctaccaggatgtccaggacatgagggggctacgtaagtacaactattaatcacccaggaagatgttttcctgttgtcccagtacagggccacctctcaggctccatgtgtcgcattcactgaagttttagacatgagaggtggctctgttctctctgggggacaagtcaggaaaagattgcctagctgactcttccctggtctcagttccgaatgaaaagcctgccatgcggccttcagcatctgctactccccgtgccacacctgatcccatctcaagtcatttcacaccagcagagggaagccctgttccaactccagcagcagcaccactcggggagggggggcaaactctttacccttgtggtattttgtaaactgcagcagcgaagcctgaacttccaggagggaaatgaaatgaccttggcaggtaacaggttcaggacagccagcatttgtcttggttgttggtttccacatgttaaatgcttctagttgctcctgaccttccttgcctgcctttgttggtcaagtcctataggcactgtggcatttgtgcagggagcaggggagaggaagcttttctgctttactctggcacctgacaagggctctctatccagcattggcattgccagtggggaactgctgaagtagcactctagagtatcacccgggagacccctctgtctcctgccaagctaaacaaaccctgcccatgcactcttctgaatcacacctcactgcagctttgttccttcttccccagtactgctcagggcaccgccttatgggaaagtcctgtgtgtcagcaaaagaagcacttgaggagaaacaaattgatataggaagggggagtgccacccagtcatcttttaagtacaaagaaaggtcatcggagctgtatggggtccaggttggattattgttgactctgccttgctgtggcaaaagggccagctctctgggtccaaccttgggcattgccaaccccatccagctgctgacagcccagcacaaagaaaacacatgctgtgtacacacagatgggtttgcatgtcagcatgagcccatttttagcctttggccaggaagggcagttcacaacacagtaatttaattaaatttgcctccctccgtggcccacatatttgaagaggtttggggggaaatgaatctggctgaggaacattaccctgccgctctggcactgccccagagccaagccactgtaccataaagggtctcaccatcctgaatacgacccaggacatctgtctgcactgcaggctctctggccgggctgcctgctggcacatctggcaaggcagcctctggaagcagtccgtctctatcacaggcaagccaccaggggcaaaataagggactccctaccccctactcaagacctgctggcaacaactttagcagtaactca

SEQ ID NO: 127311 - DNA, 1184 bp, Homo sapiens
gcctgctagggaagagcattctctttggttatctttctctctccccatcaatagcacatcctcctggctaactaatgtctcttgtgtaatgatagcagcacctctgagagaaagggaatttctctggcacagttcgtctcaacaccagcataacacaggctgttgcttaggagtgggaatcattagagtcaggccattattggaggggaccggtctctaggggagctagcagaaattgccgctccttaatggatggaaactcatttgcctgaagcccctgccctcctctttattttctctgcattcctcacctcccattgcttcccagctttgaagttgaaaagagaggtaactccacccaatgcacatttctgctaaattaacttggttagaagaaatccttgcctgaaagcactgttcttttagaatgtttctattgggacttcacttgaaaccatcatgaagaagacaaattctaattaaatgtatgtgataaaattatagccagggccactctgttcccaagagaggatttgagatgggaggaagaggggacaatttcctagctttctggaccccagtttcagggtagacccctgagtcaacctgggctgccagagctttccctctgagggtccccttgcttacacaacactaggaaggccagggaggtagagcgggactccaggcttctctgcttctccaagggtctgcatgaccttgaacagacctctaacatgatttagctttctgcaagccctcctgtcatgttgggatagatgttaccttactaccctgcactcttgtagagagaaggggaaggccatggaagcaacacatgccccttttggtttattagccatggggctgccatcagagcacacatgccctgaagagaaaggaaagttgcctgatttctcagctcttcctgtttgaatgaaatcatgagtgggcaccatctgtctcagagcattaagcacagataacagtactggtgggaaaggccttcccccctcccaaaagggaactataaaggattgcatcaaactgcaaactccagggggcactaatcactttgccatttctgtaaatggcgccccctggagttgtaagtcatggtggccctgccggcgctcagcaattgcgctaggtcgcgaacccagagactacaggtaaggtctctg

SEQ ID NO: 127312 - DNA, 1062 bp, Homo sapiens
gtcgtgtcagaaggatgccattgtcagttcacacaggcagacactaataggataaagtattatctgacttcctttaagtccagaaattaagtcttcttgcaatggcaatagattataacttataaccactgtggctggcaggctgcagaaacaggctgttagtatctgaggcctcagctccatttctgggcctattgtgagggatgcactcagcattcctccaaacacagctgcatgatccagggaactggcacttggctcctggatggaactgcctctgtggagagctgcctataactcattcagttcacctgccgtgggagaagctgtctgaatggtcttaatgaacctggatgagtgggcaggtaaagggaggaagccagggtcttgaagactgggaagaagtagcccgaggcaaggaaaccaaactttgcacagggaacacttagtgtgtgaaagctcttctcagtcatccttgctgactcattgagcaggtagtaacttatctagtgactaaatcagcaccagcttagagacacagggaaatgagggttgagaccttaaaggaactgtaaaagagactacaaattaaggagttgccctggagaggaaatatcatgagaaatgttaggaagaaagagccatcattcttcaaaatggagggcctcatgcaggatttcctaggtcctgttatggcagatgagtgtactcaaatggggaatatgggacaggaaacctgatacaataattaattgaagggtatttttttattagtggggctataagaaggtaggtgggggctgggtacagtggctgacgcctgtaatcccagcactttgtgagcccaaggtgggcggattgcctgaggtcgggagtttcagaccagcctggccagcatggtgaaaccccgtctctactaaaaatacaaaaattagccaggcgtggtggtgcgcacctgtaatcccagcaactcgggaagctgacgccaggagaatcgcttgaacccgggaggcggaggttgcagtgagccgagatcacaccactgcactccagcctgggcaa

SEQ ID NO: 127313 - DNA, 1242 bp, Homo sapiens
tctttttgtggacaaataccgagttgctccctctcttctccccagcacaccccacccccctccccatgactgtgttaatagaaatgaggaaatgggtttagagcagatccctgagtgagcctgtcagggtcaggattaaattacatccctgaaggctgggttgcttccccaagcagtggacagcctccaggatagggaacaggactgttgtgggtaggtggtttggcccaagtactgacagcaaagctggcgtgtaccagaggataaaacctgtgatcatcctaaaatctaattctagcctctcattaggaaatcaaaatgcattctttcttcgcctctcttggaaagttgatctccctgcttttcttctcctctgtttcatgccatgaatttcgcactaacagtcctcccccatccagggtccagccagcctcttgcttgctaaggcagaggaatctccctggctttcctccttgactgcattgcagccccttagcctgtgtatctgccatagagctccattcttctctcatttgctccaattatggtgctttttgtctgcctttcttttctcctagctctgcaatactgctcggaagccccaccggccctttcagtgctaccttcttcctcctagtgcctccccactccccactcccagtcctggtaacacttaatggtcagggaggatttcatcactgacctgagtaataaggctatgactgctctgtgccagagaaacatgggtaggggagaagacattaggaagtttaccttcttggtaaaggacctaggcttcccaaggtcccagccctcagcttatgcatgactatcagcacctttactttcttctggctcaccacaaggaaaggtaatctattcctggactaaatcagtgccttgggacagctatagtgctggtgtagggatcagagcacaaggcaaggttttcctgggaggataagtataaccatgtttttcacagtgatcgggcttatagatactattgtctctgacttctagatcatcatccttcttctctggagtagcacaataggcatgtctctctttggacatatacaatgttcaagaataggggtggtgatgggggcttctctgttgatctgtgtgtttgtgtgtattgtcaaataactgttatctagcatttgctatatggtgtggagcactaagtgtgagatctatgtcacacacatacatatataattatatatgtaaaatttc

SEQ ID NO: 127314 - DNA, 1033 bp, Homo sapiens
tggcttgtaccccacaacgttcccaagattcccccccaccccctttaaatagaacttacaagttagaaaatatttttgttttgactttttgtctttaaattttaatataatctgttttttttaaccagcccatagacttaatatataagcatatacaagaaaaagtctctccccactctgtacaaaagttgctgtctttgtgtgcattctattgcattttataagttttttgggggaggggagtcatatttgagtttcctgtaccttgtccttggtatgggtctgaattatataaggttcagagatagtggtgactgtggggtgcagagagttccccaggctgttttctgtccagtgggccccatgtgctggtttgtaggtgttgtagttaatatggtcatgaattgtgggcagcactactgccccctcacctgatacaccggacggagctgctgttgctgctgcggatgttgctgctgggatgtcttcgtccacctggattatctcaacagtccgggcggctgtgactgtactccgctgctggtgccgcttacgaagtttatagaagacaatcaacatggcggcagctagcagagtcactgccacaaagcagccaatgatgatcttggtggtcttcatgacttcatccaggctggtctgcatcttgtcagtggtgtctgtcgcgggtactgccacctgcttgggcacacgggtagtctgaatgagcaccgtggtagaggtggtatatgccggctggtaaccagtggacgtggtaggaacaggcttgtactttcgcgttgtgtcctcaggcgagatctccgtggtctccactgttactgtggtgaagaagctgtagttggaggtgttaagctcagccgtgctcacattgaggtaggccgaggcgttggagttgcctgcaacattggtcaccatgcatgtgtacaccccagtgtctgaaagcagcacgtgggaaaagttcaaggtgccgtcgttgaggacagagatccttgggtggcgggaggcgtggctgagc

SEQ ID NO: 127315 - DNA, 4099 bp, Homo sapiens
tctccagtccgccggctgccggcacgcggggcggcgctccgtccggcccccgaggaccagcggcgtggcggctgcgctcggacccggtccgccggccggaggagcgcgcggcgcccgcggtcgcgcccgcaccgcaggccccttcagagagtccgggggcgggcgcgggtccggcggcggcggcggccgcagcccccggcggcgcgcaaccgcccgtcgccgcccgccgctgcccggcccccggcgcgccgccggctccggctttgtgcggagggagcgagttcgcggcttcggctcccggcgccctcagtggccgcgccgccagcggactgctgcagcggcgtgagcagcgggggtcgcggctgcgggaaacgctccggagcccaggaacatagtccccgctggctagcggcggcagcagcagcagcggggcccctgcgcgcggcgcccaccgtctcctcctcgcgccgggctcgcggtgttgcaggcggcagccacgcagactgctctctcatccttttgtccttcagtcagaacgtgaatgtactgctgacgcatactgttctgggagaagattagcgtgatgcagtgctcttatgtattagcgccgctccccctccgtcgcctgcctcgcggggttaacgccggcgccttccagcgccgcgccggccggcgccgcgcagccccgcgcctccggccgcccgtcttcctctttcctccttccttcctcctctcttcctctctccccctcccccctcccccctccccgggccgcttcctccccgccccctctagacgagcggagcggggccagggcgagcgggcgagcgagccggagtgagcgtcaagtgaggggccgcgcgcaagtcgcaggcgttcgcagctattttgggccggtcggagggagcagttgggtggccgctgataggctggagcggcgcggggctgcggcgggagagcccgcgccggcccccgccctccggcccgcacccggggccccctggctctgaagagcggggctcaggggcccggcggcccgcggcggggctgctgcatttggcctgcctctcgcccggcccgcgtcatcctcacccccgctgactgctgacggggcgcggactcgcgttcggagttcggaactgcgtggtggggactcgggggacggcggccggggccacgaggctcccaggaccgagagcccgggcttcgctgctgcactgccgccagcccctccttcgctttgcctcacccctcctgtgctctcactggggctttaaatgagggtttccttaatgagggttgcgggggcgggaaacagtggcaggaatgaccaagtgtgatgagctggggaatggcaacctgggacagcacagaggccggcaggaaggattgaggtgaactcccggagcccacgacacagcccgttcattcatggagctgcagccgcggcttctcagtcttcgctggccggagtcgccccttgctccccgctgcccccagagaactgggggaagggaggcgggcggctgagccccctgccctgtgagctcgccagcccttccttggctaggactctgagaagaactgcgtagcagccaggggtagcgattgggagtgggggtggaattcttgctcctatttctggtaggagaccctaaggcatttgacagactagtgtaggagaaggggactaggtcagctttttcccacccccctgaaaaaagactgcccctttctctgccgactgtgggtgaggcaatctagctgagccctgggaagccggtccagtagaatatagcatggtttaatatcccttcccttcaagagctgcctccagactcctcaacccacccctctccccgtgtgatttctggcaggctcgcttgataaaccctcatcacctgcgcgtgggctgttgcttaagaacgaggaggtcccagatttctcagctctctggtttctaccacacctatttctgagtattgtcttttgcccagtaacctgaacctctttaaatacgccatggaatacttgaagtcctggaaacggttcctttgtaggcaagttggagtccccattctttgccaagacctttctgttatcatttgctgtcaaataataaccttgttagtttctgtttattgaacccttactctgtattccactgcaaccctattattcattttatatgagtcaaacgttgcctagggtcactagtaagtgatagtggatttgagcctcagcacgtctcagatgtcaagaaacttgggtgtggaagtgattccccaaagtattctcctagtgggatgagaactcaggtttcattcatccacttcaatagtcatttactgggatgcttatctactatgtactatccaccataccaagaacttatatctgttcttgtttaatcttcatttacccagtgaaagtaattgccacacttgtctccatttcacagatgaaggcacttagcttaggcaggcaaataacttgcccaaggtcacacactagaaagtaacagagccagcctttccatccagccttcaaaccctgagtccgatgttttcatcactaacaggaatgcccgctgtgtctactcttcatagagtaaatggtggaggcaagtggaggggggaggagagagagactgtaggaaagttcagtgaaggatgtgtcagagaagtaagatgaagggtaggagacgggctgagaaaatgaactctcatcaagaaaaagaatgagggagacatggaggtaagtcaaaccctgatactggggtttagttccatctgggcactcagactttctggtgagaggttctgctcctttatagctggcaccgacctagtagagtcatctattgcctgaggagacccctggccagggtctggatggcagcgattaagtatgactatccttccctcctcaggcaacagggtctctgcctgggctggtcctctgctactgtaggcaaactcaaaccctgtctgttcagctccaggctccacaaatgaaagctgctgccccgcactataaaggtagatgaaagtgggggccgagttgggtcagaccagtacttagtaatgaggttgtctctcagtaagtatttgtgactgccatccatgaaggtgactatgcccaagctctgtcgagctctacatcaggctgctttgccccctgtaagccagctgggccaggaaagcaccactgaacctactaactggactacagaggaggctgtggggccgtcgttgcacacagcccttctgagctgaaagtgggattgcagcctctcattttggtaacccaagtaccatctagctatggcatcttgctcctcacagcccgtggctctgactgcttcttggatttggaatggtgccaccaaagaataagaaggaaagaaggctacttacaccctaagaggaagagacagtggattcagattgttttcacttgcagtttcacacagggagactgctgtgataacgccagagagagctaaaaaagccagcagtgattggggaaggcctgtgtcagcagcctggtattatagaatgagccctgtgctaagattgggatacctgagttctagtcccctttagacatgtgacaaatcttaaaatagctctaaacatcagtttttccatttataaaatcaaggaaatggattagaaagtttcttaccgctctcttagtccatgattcctgtcccatctcagatatgtagctctgtgaaggttgatcctttggaattgtagccaagtcttggaaatgggccacaaagttaagtgagaatgctttcttcatttaatctagagatccacagtgctggagcagagcaaatcggactgtgttttcccagctactaaaaagacacatagatcacagaatgttaaactaaagtggaccttggagattatctggatttaacctctcactttacagatgtcactgatgaagctcagagaggcacagtgacttacctaaagctacatgactgattagtatcagagtctgtcctttttgacctcagttcctctaagtaacaatgtatggctaattggcatttaaacctgggccttgaagatatttc

SEQ ID NO: 127316 - DNA, 1080 bp, Homo sapiens
ccctgcctgcacctctgccctcaggttttatcgtcttcctcctcattccctgcccttcagctacactgaatttcttttcctggaatactcttacatggttctccccattaaggcctttactctccccacaacctaaaatgttcccccatatcttcaggtggttgtcctgtccagagtagccccactcatcacagttatatcactcagctttatttttctcattttattttccattatctgaaattgtcttgtttatgggctgtctattgtgcatccccacaagagcagaggcccctgcatcttgtttccaatacttagacctagcagtgagtttattatttcagagggatgaggactgtttttgatatcccacgtgggtaagagctcaggccttcctaattttatcgatagccctagccctaccctgctctacttacattctttgaagaagcaggtgagaaattactagcctgatttttttttttaatactggaaaaatgaaggagaatcctagtgaccttaaggtgtctccagttctcaatttttagaattcctagccccttgctgacagatttatgaaggagagttttatggaggtatcataaaggctcacgggttcttggcagttgtgaatatgtgaggagtgagcataggtgcacaaatacacattatctgtgctcatgtacacataagcctgtcattttcaaattggctaaagtgcattttctccaaagggagtgggggctgttgagcctgaaatagggaacaccaggacagtaagatcaaatgctttgaaagtggctgtgccaacgctttttgctaattaaagaatgttaggacaatcaccactagcagcagtaaagggcgccccattacctcgctttatggagagctgggtaaatttaaaggcagctataaatatcccactgagtgccagagctatagcacagtcggcgggtacctgctgggcaaggagaggagcccagagcttctggtcccctttgtctagggttctcatctctattacctgtcagtccccaaattttgcttgaccaaggaagaattccatcaacgaaccct

SEQ ID NO: 127317 - DNA, 1128 bp, Homo sapiens
ctctcctctcttaactgctctttccccgaaactgcccccactccatccctccaaggcctcccgacaaggacagtttcctcttcaggtgccattctgacatgaagcccaccagttccccctcttcctttcctttcctctcaagtccatcatagttctaagagcactcacctccccaagcaccacctgtcattgataagaccagaaggcttgaggagcttcaagtctagtgaagtgtcagtgcagcaggatggcattatggtcagcagcgtggaccttggaatcagagacctgtgtttgaattctggccctgtcacttaccagctgcatggccttagacctaaaccacttaatcctttaaccttcagggtcctcatccataaaatggggatgataatattatgaagaattatgggaagaaattggctagagtgtcccagcaacgtatgcaggagaggatagaatgatgaggtccagggtacagtggatctctggggcagtgtgaaggtaaaagagattctgagctaatgtcttagaatcatcaagtgaaagcttggctggaattggggaggctggggtaaacgcccacaaaggaaagggttctcagagagcactgcattctgaataaaaacagaagtgacctcagtgacattctctgtctaaggcaggtagcctcagagactgcatggttgtttccactgggttttcgtaagaagactgaaccagacatgcaagcactcgcttacatgtatgtgtgtgtaaaggagacgttaacaggacaagatatggagcacttaatttacccagttctccctcttctttctcacctccctctttttagcatgtggatggtttttctgtttgaacgcctctatggaggcatttgcaaaagtcactgttttctggccatctttaatgcatgtttatgtcatttgcagacaaattgaggcagaaggatccagcaggtcctacagaaaaaagtacagtagaaatcccatacctcattgttcttctccttacctcttttccccagataacttatcctcacagcattgagtctgatactgagaaaagaaagcctctgcaagtttagcttcactgacgtgagcagttcagttactgcactgtagc

SEQ ID NO: 127318 - DNA, 2107 bp, Homo sapiens
ttttggtcttccatctcttcccccagtcttagggcccaaatctctcttccatttatcatgtcacctgcaaatcaaatctctgttctctgcattcccacaaccatctacctatgacccagccagccttttccagaaacattccatacttatttgacagaaccattgttaatccaagaagataggcagagctgccgtgatgaagggctctgggaggcagcagggctaagtcagtcctcctgagctgagaaagagcatcatttcctagatgcctctgagctcttttctgtgtcgtctccattttgaccgtagactccaccaaatccaccgctgggcccatgcgagtggcagtagcttcacttgcttgagtgaaagcctcagatccagtaactgggaaggagggggctcaggctttccagagggtggagtgctgactgctccttctctggttctgccctgtgtgcttgcttccagagcttcccacagcttcccagtgcaggagttttcctcctggacagtgtcaccaaatccttcccatggggtatcttggagccactgtgcaagttcatgtttctgcccctgagtccaccctcccgaagacaaaggcagaggcccaggaaagacatttgagatgaacaagactttttactgttagaacagaaaaatcaaagttcaatatctcctgtaagtatgagagagagagagatgggctgcagcttccaatgtgagatggccacaagtcccatgtttaagttcaaaaatcagttacaccattacaagatgaaggtgacctagcttgacagcaatttacatgaaaattaccccacagggttttatttaccaccaactgtagctaacagtgtgaagtgactgataaaaattgcattcatagagaaatcatatagatcaaaggaggtaattattctgcactgcctaaacagcatctgagatactgtgttcagttctaagcagtgtgtttttagagggatcctgataaatggaggggcattcctaggaagggacctgggtggtgtagaatatgggatccaggtccaggtaatggaattcactcgggatggaaagaaaggacaaacactgataataccaatggttgtcatgtggaaggaggcaaggaacgaacacttgtgtacttactgttgctaagtgctgtgcccatcctttgacggagcttctctcgtttagtcctcaaggtagccagtcctctgagctaagtgatacttgggttcagagaactttctaaaagtcatccactggtaaataaaaaaaatggatcagatgtgtttccaattgctccagagtacaaaactaagaccagtaggaagaagttcaagttagagggcattcacttgaaagaggacttttctaacagtgaaatgggcttctttgaaggagatcgaagttgatagacaccgatatcagaggtgtaaggatgacatttgctttggggaggaagcattgggacagatgaccttcagttcagttggagtgctctggaactcactagggctttctgagggcaacatcaggcccagaggagctgccaggcaggacggaaggctggggctgccagtggtccatttcttctgcctggacttagggattacaggccatttatgtccagctctagctcagtgccccagctttagcctaatgcccatctcagctgtctggacaagctcccattctggcagcttgtccatcaaggttggatctgtctctcctcccgtttgtgactccacttcattgccacagcttgtcttcccgcccaggaaagggtatttggaagaagctccatcctgtctccttttccccattggtgcaatctcctcctagcagcatctgctgaaaggggtgtagtcatcctggccccagacagagctgtcttccaagtcacggatgttgacgaggcctgtgtgtgtatctgcatgctcacaccgcagcctgatcgatgcctgtcagagctcagcatcagagtgacagctgcataccaggctgtttgctgaacacaactcgtccgtcaagggaaatcagatgaaatccatctccttgtccaaagcctggcccgatgggctgtgtctggaatgccagt

SEQ ID NO: 127319 - DNA, 1023 bp, Homo sapiens
aaaatcattccctcggatttcagtgttacttcgatgggtcccttggggcagaaaaattatagttaagaaaattatgtgaaaagaccaatagtcagccctacccttcagggacttctagtttagagctggtacctactgtatggatagtgcaagtctagaacacacaagaattggcatatgattatcttaaactggttggtataaaaatagagcataaatcaaatgcattgaataaaaaaatttgcttacatatattgaataggcattagccagattaaatagtgtgttgcagacaattggtggggaagggtctctttagagagtctcattagagacacaattatggggttttaaggctttcagaattgacaaggacaagttttggcagaggttctatgtttgtaaaccatttaggactgcaggaagctctgtcaccccatgtcttggcagtaagccaaatagctgcttctgtttcctcttcctaaagcctcttttatcccatacaagcatgtacctgaaacttcaagaagcccctctctagcctcagccactccagcacttccatttcccaaggctttgggcacttaagtggagaattgccctgttccagctctgtgagatgctgtgagctaattctctccccttagcctgccctgtcttcaggagtctgagtgactctcagggttcaaaaaaaatggtgcaggaggccagagatttcggaaggtaatattttccccccactacctggaaaactgtggaacacaaaattgttcaaaagacagaagtgagatacctgggcaatgggggaaagaaatcagtccaggagcaagaggatggaacatagcagctgagagagagtgttttctggggtggaaggggacttacaaaacccacaagcagaggatggggatcctggataaatgggagaccagggaaaagccctagtttcagagcggcacctttttcctgctggtcctcaaagggcctttcagactagggaaggattctctggtattgcttccc

SEQ ID NO: 127320 - DNA, 1057 bp, Homo sapiens
gaccaggcacaaagcattttgcttctcttttatgcagagaaggattgaaaattcatgcatctgaccacatctggtaaaggctgggccttcagcctttttctcctctttctgactcctttgatcgctcttgtaaacattctgactctagttcagcgtggtccattcacaagcttccacatgcatcatttcttcccatgtcattctcccagccatcacaggatttttatacatgttgttcaggttcctctcgttccgtccctccttccctcccctccttccttaaaaccagcccctgattcctccatccccgatctgtctcagcaggtgggtgggctctgactgttccccttgcccatccttcaagtcagctctctccagcttttcctctgagctgcttgcaccttctcctggcttctgttctccccgtcatcccgtgtttctctaatgtctacttgcacctccactgacctcagcatggctttctgtcccaaaattctaccctcgttccttcttctaccctgccacttatgcactatttctaaagtgtgaccctagacattccctatgctggaacatgtctgcctttctccccacctgtgaagtcccatcctttaaggtccgatcctacctgaaagagtttcccgactcttcagtgctcagagctggctctctcccttgaacccccctagtacctgctgcctgtaccactcagcagtcatgtgttttacatggcattttgtcattgactgacaggatgtggctttatcgtgtcttctcatctaaatcataggctctttgaagacagaagtgaattctctctccttttagacctactgcagtgcctaatacagtgcttttctgcttagaagataacaaaaacccatttcttggtcagttgattaaagtgaatgttaggtctctttacatacttactgatttttatacatgcacgttctctcaacatgtgtcttctcactttgaggaaccctaatcattttttgaatgttgtcatatgtttcatcagctcaactaggcatcccagtccttctctagccct

SEQ ID NO: 127321 - DNA, 1056 bp, Homo sapiens
tccagttatagtcagtacaggcaaagccaagtgcaaaacagccccttctgttcatggcgtctgggctgtgctgcctctgagtcatcactgctggcctcactgactgaagccagtttctgcccctctgggtcccacaagcatgcttgtcgtggcaggggcagctgagggatggtcctctcaccttcgaggagttcttgaaataggccttctccagtcagtttggtgccatgcatgtacccaaaggtagtattctgtccagggactttccttctcccacgtcactgctggcgatctggagaagctagaatattttgcctttcctcatctatttattgaatgcctaccaggtgccattaataaatgcccattgtaatactgtcatggtgatatgagtaaagtgctgtgagaacaagccctacccagataagtaatggagtggttcaaataaaatcacatctgtgcagaatccaaggggtaagttgggtaggagtttacaggtgaagtcataggacggaacattccagccaaaatgaatagcatgtgccaaggcctggaaccatgcaacttgtctgtggagctgggagttgtgtggcctgactaaagcaaaataatgaaggccacaatggcaggacttgagagcaggaagagcccagctctgaggcgcttattctgtgctgtactgaggaattccaacattagtggagaacaaggaaaggatttcagcagaagggtgaagtgatcagattgggaaatttttttttttaagtaacaacatttattgagcacttactattcgccagactctccttaagtgtttaacttgaatcagttcacttcctcttcactgaagccctttgaggtaggtagcattcattattatacccatttgaccacaaggtaaacctagacccagagaggttaaaaaaaaacccactctagattaagccagtaagtagtagagcaagcgcagaaggaggtggtctggccctagagcctgcatctgaccatggtgctgcactgcctgtgatgagccacaccctccagtatcatggaggg

SEQ ID NO: 127322 - DNA, 1053 bp, Homo sapiens
tggagattcacctggtggagctgaattctgaagtgagcgctgcactagaggcgaaagttgagttctataattcagagagcagtgggatgcagggactgtctacagcttaaaatagcccctggggaacgttcatattcaagggccatgttgttggggaagaattcacaattgctactaagaaagcagggagaaaaagccaagattgggaaacacaggcctaaaaaaagaaagtttccaaaaggaaagggggtgcttgacttttacagatatttaaaaggtcaaaaatgattaaatctgagaagaaattatttaaatggcaattaacaggtctttgaagtaatagtgacattggagtactgactggtagccagctgcattggctacagaagtgaaaaggggctggcaatgtgcagagtactctctgggtaaagagaaagaggtagacttgatgggatatgagtcaaagcaagacttgctaagatgggcaagatgtttgcaggtgaagagttagatgccggtgaaaaaggaaatcgggaaggtgatgacagaaagaggtaactgatggaaatgggtacctgaggaagcagaagaggttgtgatctggagccaagttcatttctttttctgcaagatggatggaagggaatgaagtaatcatggatgctaaatgcttcttaacagcaaagtgtgggtctccgtgggaaacccactgtggttcaggtataggagcctgagaatcaaggtccacaaagcagagcggactggccccattgggggggtcacaggtcagctacttcctgcctgggaacagggcaggggtctgtaccatcccacagcaggccttgaggtcagttatataggtacaggtacctgcagaggggaactgacacgtgaacttgacctgattggacaacatttggttactttcagaccaagtcagagatttaataacctcatgcagttactccatagatcatacaccgattttccccaagaaaagaggccaactgtcttctcacacccctagctccatccctttagggcttgggtaca

SEQ ID NO: 127323 - DNA, 2149 bp, Homo sapiens
tgctggttactccagaacactactcacattcttgaaaaaagctgcagccaggatgagtgggttgggaagaggcaggagtaccttgggctccgagtcattattcagttcccgtctctccatttcccgcgcccccctgcaagttctcctacaggacttgatcgttagcaaatggggcttccctgcttgcccttctctcctgtggaactgttgcttttcatctctcctgttggcttgcaggcacagtctgtcagctttgctgcccccattctctgacctcagagaatgcagagcagagagaaccttggaaactttgttcaactctcatttcccagatggagaaactaagcccaaagagaggtgcagtgtgcccagcccataagaggcaggattggcacctggatcacagttctagcccagggcctttctctgctcctcagctccttcttcccatccaggccgcttgctgtgattgttgctggttgctttaggaatattgaaagcaggaatatggccagacagcacatggaaatgatggagaattctgcctctaaagcctgtctgtggggactctgatgtcaccttcccacaggtagccctgagcagccccaccctgctacctggaagaacttacagccagcaccccactttgtgcagtgacttccttcccagatgcctcagggcagtggcgccctgtgctgggctcttttctacttgggacctgcctgtcctgcttgaggcagcccaccttccttggtacgggagcatcctccacaactgttttcaggcaacctacagcctcgcaacccagggctctgaggttggctgaggctcagtaattttctgtactgcctcaggcattgtgcactgcagtaacgcctgtgcacttggggaagacagtatctcttctccatcctcccagaaagtaaaaagggaaaggcttgtatgtgtgtggggtctccctgtcctccccccattgctagtaaatcccctgtgtgaacgctctcctttgggtgccctgagtcatcaaggggaatgtgcatccccctgctgtctttctctagtctccatttcttaattattttgcccccagtgccctcggctcccttatttaagccagccttaccagaagcagcctccagtgcaccttctcccgcctcaccctccccgcaacttcaccatgacctggaggaggctttaggagagggacctggatcttcagctttgcgcctacttggaagcactaggcatccagcttggctgcaggctccaggcgagttaaggacagacacagctaaatcaacccccagggcagtcagaatttcctccgtggtttgaaagctgagttcttaaataatcttccccacacttaccacatgcatgcacatgctcactctctccctccccccaccccaaacccttctttctttaggaaagatttcagaatctgaagtctaattgcagagggctagaagaagttgagaatgttgacatttctaaagccatcatccattgcctggctttcacttctcttcctttctccagacccctcagccctgcattgtaccccaggccaagaatatgcctcactgcttagagaaggagaaggacttggtccccactgcctgtttgactgaagtagtttctgttttaaggagctgacagaatccagacaatggggagaagaggaacagtttggggtggggacagggaccaagtgtatatttctggagcccagggcactgagactgctcagaaaggggccgcaggaaatgaaacaagttcctggccacccccttcctccatgtttgatttcagccacggagctgggggctgctccatgctcttcttttctcctcccccttctccccttcctcatccctgggaagggtgagaccacagctcggctgggtgatcactgaggtatgtgtgttgcctgggcatggggagctcttcctcggtaattaggagacatggaaattaacagcctgtgccgtttgtattaatttggtaaataagccagaacaatttcattagtggcatattaatgtgcttgggagcaggaggacacgtcccactgtgaggcagcagggcccactggctgctctagcccacagtcaggccaggtccagcgtcgagctgctctcctgca

SEQ ID NO: 127324 - DNA, 1497 bp, Homo sapiens
gccagtcagtgtgctcagctctggagaaatttcacagtctggaacaagcttccttccccatggagctgacagtctacttggagaatgaagacatttagaaatgaaataactgcccctaccaggaagtaaataatttatgatgatcgtgttgaagcatttatgtgctaagcacttttctaagtgcttaacatatttatattagttcatttaatcataacatccttgaggtagatgatgttgcaatcccagttttacagtaaatagaggcacggagaacttaagtggcaccccagaattcatgcaggtctagatagtctggagccagagtccacacttataacctccatgctgtacactgccccacaagtgccaaagggagggtgaacccataggcattcagagggtgattcatggtaggccagggatcagggaagccttcccggagaaagtggcattgaagcgggcaaaggtgcagtccaggtattcagcaacctcaaaatccccacccactctgccagcatcaagagcagagagcaagagatgctggcagaccagcagggctgcaagtgaggcagactgcaatggctgtcaacatctgaaggtcacattgaccttcaagcctctaggctgttcgcttcttaaccagttaccaccaagccccttcctcagtgtggcaccacctgccccttcttatagtctctcgggaggtacccccctcccccagaaccatgtgtcttcctaggtctcagcttcagcatgggcactaagtagaggggaatcgagaggagagccctcatctgtccctcgcccatgctgcttgtgtacatgcacacacatactctggtgccctcaaggccatatccacccacatgtgcacgtcagtgcatgctctcatacgaagcctgctcccagccttctagcagcctgtggtagtcacctaagtcacctaaggcctaaagtcacctgccattataggaggcctcctgtggaagctattgagtccagagctcttcctgaaacactccaagatgcccaagagatgagtggctatgttatagcagtttgcaaattacacaacactccaccagtaggatctcatttaatgcttgcagtagccagttggacaagaagaaatttcttgtctatttacaggaatgagcctcccctaacgtgtcttctgtttgaggcaacttgtgagacatgtctctttatagtctccagtttgaggcaacttgtgggaattaactctatgtgtctatacagtatacagtcgatcttcattattcaccggttacatatttgcaaattcaccaaaatctatttttgtaaccccaaaatcaatactcatggtacttttgcagtcatttgtggacatgcacagagtgacaaaaaaaattgagtcatctggcggggcacatttccattttaggtggaacagggtagaacaagacaacactctgccttcttgtttcagctctgatgatataaacaagtgtc

SEQ ID NO: 127325 - DNA, 1028 bp, Homo sapiens
ttttcatgcaaccactttaattaccttcattagacacgaattcattcagctctaccaggaaaagcagcctccctctccccaggggttgcctcgctccctaaggacctgcctgtcttctagcacagagctggggagggtgctgaagagtgggaggcaccaagacctctgcctgcttcttcacttgctcctgaccttcagctgcgctctctctctctctctcaggttaaggagaatcccgtttgccccggtagctttctgccgcaaggaggggaaggggctctgagaagagagtcgagttttggggtgtgtctgttcccgtgagaggctgaaattgaagggttctgggggttcccagaggttggcagcggctgccaaggcctgtgagcccaaggcttcggcgctgctgtcctccccacgggcacagcccctgcacactcaggcctggcccccacaggcttacgcctgtctctctgtcccaggtggaggtggaggtggagagcatggacaaggccggcaactttatcggctggctgcacatcgacggtgccaacctgtccgtcctgctggtggagcacgcgctctccaaggtccacttcaccgccgaacgcagctcctactacaagtccctgctgtctgccgaggaggccgcaaagcagaagaaagagaaggtacatgtggcagcccagctgtgctctccctgccctcccgtcctcctcacacactaatgctgctgcctccagagaacaggaggaagttctctcatccccacagagtagcccaggaaggtgttggtctcagaccccacaccaaggccacacacaggcgaggagaggctgccagctgaggtgtcctcggccacagcctgttgcagacctgaggtgggcctgggctgccagcccagaatgtcatcagtgatcccaggcctgctcaggtggtcctgaagcagaaatctgtctaggtgactgtggagccatgggacaaaatgcccggggcgcccctccctccccagccctgacccttctctgtca

SEQ ID NO: 127326 - DNA, 1769 bp, Homo sapiens
cacagtcactcgcccagggccgatcccatttgcccaaaacccctttcccagtgtcttttttttttcttcttttttgagacggagtcttgcactgtcgcccaggctggagtgcagtggcatgatcttggctcaccgcaacccgtgcctcccaggttcaagcgattctcctgcctcagcctcccaagtagctgggattacaggcgcccaccaccgcacccagctaattttttgtatttttagtagagatagagtttcaccatattggccagtctggtcttgaactcctaacctcgtgatccacccgcctcggcctcccaaagtgctgggattacaggcatgagccaccacgcctggcctcccagtgtcttttatgacttcacttcctcgccctcttctcacctctgccgactgaacatgcaggtctgggcccactatgaggagcagcccgtggaggaggtgatgccagtgctggaggagaaggagcgatctgctagctacaagcccgtgtttgtgactgagatcactgatgacctgcacttctacgtgcaggatgtggagaccggtgagtgctcaggccgctggctcgtggttcctggcttggtccagctggcgctgcctgggggtagggggcctctgcccagtgggtgggaggaacaatgcctaggcagtccaggagcctcccctgaagagctcacgttgccgcccctgtctccctgccttgtcccactgctcctctgggcttggagttacttcaggagccttcacatgagccctggcttgggctcaggcatggaggtgctgccggacaggtcctctggacgcaggtgagataaccaggtttatctgggtggagctctgagtctcttaggtgattgtttgttcctacatacccctggctatgctgggcaggatgatttgtagcccccagaatctgtcaggcaccagccaggcattgctcagcccgtttccctctgggggagcaaggagtggtgctgggtttgtctctgctggggtttctccttctctagaggttaacatagccctgagtgatagccagtttccatggaaacaggcagcgctctaggggaagacatccccgggcagtctctgaaggaccttctcctccttccgtcctgagtggtgtgcactgtggccagggtcccctgggcagagacctggggtttctggaggccaaagggcaggagagagctctggcagccgctagcccgactacacctccaaccgcttacgctttccaccctgacctcccttttctcatggccaccctgtgcagggaaacagttgagtttggagcggaaggaaaagctcttagagctgcttctggatcccaggaaacaaatcatggtaggcacaggtggacagagggggctagaagtgtcagcagcacttgggcagtcccccagatggcaggacacagctctgcccagcctcctcagcccaccccaggtccgctccagccccgtctcagccacttccctctaatgctgtttcccaggcagctgcctttgtggcagtgtcatttcaccaggaaaaacttgaccattcctggccctgggctggctgtgcttgaaaaaggaaaaacgcaagggggaggggtagagatggagcccacgagcctgcgggattaggttctcttgaggtcagccacagtcctgctgaaagctgctccagcagttgcctgaatgaaccggggcggtggccagcctttagggctgggtcatgtgacagggaaggagtcttgtagtggt

SEQ ID NO: 127327 - DNA, 1048 bp, Homo sapiens
gagccgttcctgggcagaggaaccagctggaatccaccaccccaaaatccccgccagcccaccagagaacttgagcaaaaggatgcgatcactcccaggcaggctctactcagcctctgggtcctgctggggaggacccgccttgactcagaacaagcccctgaagtcttagagagcagaaatctgaggcagaaaacaagagaaaagagaaaaccatgtgtccttagaatgctggaagagaagggagtgaggcccttcctggcaggccacctggggatttgtggtgggctccagagaggaaggcccctgccctctggtggctccatggtatccatggagatgaacctcaggatccacagccccctctctgctgaaacctttcatcccctcttgggtggcatcctctcaccctgtctcccttctttcaattagagtctgtcttcaagagggatctgacgaaaacattgccattagctgcaaatgaccagtgaggctctgtaaggacctcccagagggctttgcctgttggcaggagacaaagtcctgcttctgttgccttggagcaaaaaaaatgaaagtagaccaagttagggaggaagctgtctgtcaaggcttcttaatccctggaatttcactgtctatggcaaggagcactgtctaaagagaattatagagggctgaccactgggtagggagaggggcggctgctaccttcaggcctctgtcgtgtggatgcaggaccagtggcctctgcagcagcttaagagtggacatacatccctgcatgcttatgcagtttattttcaatgcagctgaattattaagcaccctgcatgcattggggattctaccaggctttgtgcaagtaaacagaaagaagtgagctatgctctatgccctgaaggagctcacagtatagtagcagggaacttataaggctgactgtggcaagtgtaacaacagacatatgttgcgccctccttacagcactgccttgggcctgaagataaagagaggagccccacacttagaccacagatccacagtc

SEQ ID NO: 127328 - DNA, 1049 bp, Homo sapiens
acagctgctgtttagtgcactgggtttaaacagcagacatcaatctagtcattagtcttgttgctttatgccccaaggacacattaatctgctccacatgctcctttctccctcttctgctcccagctatgctctgattccattaggtggtgaccacagtggccgaggctgggcctagatggagtgcagttactgtcccctgtgacacccgttgaacccaggcagggaaatgctgtgcccctgccccgccattgctgaggctctgggagcccagagtcctcagggctgtctcttgagctctgcccatgatgccattgcaggtaccgtgcccgagtagagaaagtcgagtctcctgccaaaatacatgtcttctacattgactacggcaacgtgagtgttggggaccagagtgttggaggggctatcaaacacagcagcccccgagtcaaatccatctgatctctccaaggtccctctgagcttaccaatagaacaatgagcattggggcatctctgctgtgcgtgtaacaggccaggccccctcagtgacctggcaaaactggggtctatgaccagtggctgcaagcactgataggtcccgcatccagaccccacggatgagtgtccagccacacccacagttcctcttctgcctgaggtctctgcagaatgggggcagggcctctgtagcacatggagggcctttacacccacagttcctggtgttcaagccaaactgggtgtttgttccatgcgctaatccccggcacatccccaaactcaggtttgctgggaagggacagtcacaaggtgacagtgactgactggcacccttgggagaaaaatttctccggctgggcctgggagtctgttgacaactcctgggagattctcttgaggaacagcagccagctggtgagaaaactgtcattcaggagggtgacgctcctgagtcatggcactgcttgtctgcgtacctcccatgccttcctcaagtactaggactgaggatctgttagtagagagcccagagttgggccatgctccca

SEQ ID NO: 127329 - DNA, 1224 bp, Homo sapiens
ccctccagatcacagaatacctgaatgcccaagagtcagccaagagcgccagggtgagttcttaccttgggagcccccagagggtaccgagttgaggggtttggccctctgagttccggtgggtcccgtatccctgaagagctattgtctgttttttcttacagctgaacctgtggcgctatggagactttcgagctgatgatgcagacgaatttggctacagccgctaaggaggggatcgggtttggcccccagccccgctcacgccagtccctcttcctctgccgggagggtgttttcaactccaaaccccagagaggggttgtagattgggtccagctttgcttcagtgtgtggaaatgtctcgtggggtggcatcggggctgcggggtggggaccccaaggctttctggggcagacccttgtcctctgggatgatgggcactgctatccacagtctctgccagttggttttatttggaggtttgtgggctttttttaaaaaaaaaaagtcctcaaatcaggaagaaacatcaaagactatgtcctagtggagggagtaatcctaacacccaggctggccgccagctggcacctgcctctatcccagactgccctcgtcccagctctctgtccaactgttgattatgtgatttttctgatacgtccattctcaaatgccagtgtgttcacatcttcgctctggccagcccattctgtatttaaagcttttgaggcccaataaaatagtacgtgctgtctgcagcccttattgatcacagtgtggtccagagcatggagtcttggcagcttcacccaggaggagacctggacacttgaatgacccccaagatagtcatccaaatgcctggacattctccctagaaatagagccagctggggaaagcaaggcagatcttcagagtctgagcaagcaactcctggacccagtgggcaccacttggcaccatggccatcatgcaggaggctacaggtcttttttgacttcttgcacatggctgttttcaaggaccttagagagttacagcagcttggccagcagcacccaggacaatttacccactgtgaattgctgggtctggccttaggcagaccctgccagatccccaagaaaggattcaaaaggaatcagctgagagcaatgaggtgatttccctaattcctgctgtgtctgggatagagtgggttagaacgcaggccccc

SEQ ID NO: 127330 - DNA, 1172 bp, Homo sapiens
gaggtgtgacctggatagggctgggaccagggtgaggcaagccacgcgccaagggtgcagatttgaaggaggcactcacagagtgcgcacacattggcatgttctattttcatctgtagctgtccactcagcaccagcccttgcaccagtagccagaaaaagctctccacaggttcctcccactccccctgagttataaaaattgcaccttggcctcaggattgtgggttctgcttctccatccacctttcctgttgaatagtgaagtctcttgagcacctgttatccatccatttaggcttcctccaagcagggattaagacccagatagtgccaagcacagtgttgggtccagtgagtgccaaggtcatctctctgggctctcgaggaggcagcagatgcatgctatctataacaagccacagcagtgggtggtgccctgggactttaagggacagaggccctggcccaggtggctgggaagtttcccagaggaaaggagaagagctggggctagcagatggtgggaaggcatcgcttatctctgggcagcttgaggagtctcctggtctccgagggtggatgcagcagagcccagggcttgggaaagccaccagggaagtattggtggctgagactcctccgcagcgacctcatctccctcctcttgctggtggacaggattagtagcgaaggcgggcagtggagagaagggctcccgtgactgcctccattttatttattggtttgattatttttgcgtcctggggagagagtggaccccgttttttgcattagcccatattgggaagcaatggggatgggctagaaagctggtgcctcaagagtggttattgatgtcctaattacaagaggatgctaatttaatttgaacctaattacagtgcactaccctgggtggcatgtgttttaataattaacgtccttcagatgcgtaggagtgtaataatatttacactaggttggccagcagcctgtggaggcggactgggggcccatacaccaccttctccctggacagcttggctgtgagcaggtggggaagaaggcacatgggtcctggctggcgagtatcttgtcatccttcccatgtaacatgcttgggcctcatttccagccacttccttgacccagcaggcagctttgctctg

SEQ ID NO: 127331 - DNA, 1935 bp, Homo sapiens
aggatcgggggcgctgcaccgggctgggcccctcaacgctcgcagaccgggccgggctgcagctggagatggcagcaatcccgggaggtctccgggcctcttcagggtgcgtccaggaggcgggttccgtgcgacgcggcgcagcccacccccacgagaccgcttaacttcgcgggggcagcctcgggcgctcggagacgcggaggcccagactgcagcctccggatgctggaagcccagactccctggggtcaccggctctcccgccaccccagctgcaaagagtcccattgcttcaccgtccggagcttagtctccttgttcctctaccagtccctccctccgcaggtctctggggacttctgaccgcctgttcttactctccccctgcccccatacttcccgcccttgtctcaggaacggtgatacagtcatcggattgctctccatctcctgttagtctacactgcacacaactcaataatccgctcccttcatccgggtgacagagacacagataatctgagctagtggtgctcaaagtaccggtcccagaacagcagcatcagcatctcttgggaacttgttaaaaatgagaatttgggccgggcgcggtggctcacgcctgtaatcccagcactttgggaggccgaggcgggcggatcacgaggtcaggagatcgagaccatcccggctaaaacggtgaaaccccgtctctactaaaaatacaaaaaattagccgggcgtagtggcgggcgcctgtagtcccagctacttgggaggctgaggcaggagaatggcgtgaacccgggaggcggagcttgcagtgagccgagatcccgccactgcactccagcctgggcgacagagcgagactccgtctcaaaaaaaaaaatgcgaatttgggggccccaccccagatctactgaacagaaactctgtggagcccagcagatgattcccatgcacactaaagtttgcgagccactgatctaaacattctttcatccattcattcttcacctggcccacccagcattgccagtgggagagacacccgcaaagcaccaggctgtgagccccaccgccgtgcactctgagacactgtccactagctttgggatggcaggcagaggtactccagcttggtctagtgcagacctgggaatcaggacctggaaaggaggccccaggtgccagccggcaggttagctaatggcggccaagggttaccccggagtggggagtggggagaagctgcctggtttggcccgtgctgctgcactcaaagcacctacctttcaaagtgcaagaacaggaaagtgaccctcctctgcccccagtaagtgatgacggagtctctggaaggccagacagatgggatcttgctctttgcagcagtgagctatcctgactgggtgggtaaccaaggagaagggctttctgcaggagaggaaattcattcctctcttccaaagtaagggcttctatggctgtctgcctggaaggaaaccaaggcaaagagattaaatgtggaaaaggtcaacgttctgaaagggaagctttatggggtccttcccatacaacgaaggaactaggggcagccacataagccagatggatcaggccagtggggcttaagtagagcccagagcccagctttccttggctgcattcctacaggcaggggccagacacttagagatacactgcaccttccctcaggtcggaagggaggggacggagcccctcctggaaggcttcaggtgaatataaaactagagccctcaccaccccaatctgtgacatcacatggaatctgatgttgtttgatggcatttcgggtgtcccacaaccatgcctgccatgaagtcatggctgatatttatgccctggccccactctgatctcagggagaatatcttaccataaatt

SEQ ID NO: 127332 - DNA, 1113 bp, Homo sapiens
aaaaatgagatccaagcctgcaactggtgagcctcagaaggggcaaccagagcctgcaaaagaccagcaacagaaggcagctcaacaccacacagaggaacaaagcaaggtgcccccagagcagaagagaaaggcgggctctacctcatggaccgggttccagaccaaggctgaagtggagcaggtggagctgcctgatggaaagaagagaagaaaggtcctggcgctcccctcacaccgaggccccaaaatcaggtgagatgcaggagggcagaagcacagaacagtgggtgggttctaagcgggtttgtttttgctgagttattttctctttgtggcatttgtttggttgaaaaggatgtttggtgctatgtattcccacacatggggttaacacgcgagtcttcaacaccatcagagatgtcactcttagatcaatggcagaggggcctcctagggcaggcttttgtgccccttttctcctcttttgaagagcttcctcttgtccagatggccatctctgccagctgagaccacatacttgaggttcagttgtagtttctgtttgggacagcagattagtgctctacaaaagtaaatctttacaaaatatttgttaaataaatgaaggtttttgagatatccatggggttttatttatttatttattttatttttagagacagtgtattattcagttcttccactgctataaagaaatacctgagactgggtaatttataaagaaaagaggcttggctgggcgcggtggctcacgcctgtaatcccagcactttgggaggccgaggcgggtggatcacgaggtcaggagatcgagaccatcctggttaacatgctgaaaccccgtctctactaaaaatacaaaaaattagctgggtgcggtggcgggcgcctgtagtcccagctactggggaggctgaggcaggagaatggcgtgaacccgggaggcggagcttgcagtgagccgagatcacgccactgcactctggcctgggcgaaagagcgagactccgtctcaaaaaaaaaaaagaaaagaaaagaggcttaattggctcatggttccacaggctgtacaggaagcatgacagcagc

SEQ ID NO: 127333 - DNA, 2201 bp, Homo sapiens
cttgtaatcccagctactcaagaggctgaggcaggagaatcgcttgaacctggaggcggaggttgcagtgaactgagatggcaccactgcactccagcctgggcgacagagcgagactgtgtctcaaaaaaaaaaaaaagaagttattgccgtagagatgtcctagcttccaggtagggtgcagatgattccagaatgcctgttttgattcctgatagtctaactggaaacatagttctaattctttatttttttactccatcttatcccaggtgtggtggctatgtagaaaggcaaaatttctgttcattgataaaaaggttaagggttaaaaggagtaggcagtgactaggagctttattttaagaccagcattccctgaattggcagtttctttgtctccactggttccattattgtctgtgatgactaggggtcatttacagaggtagggtttttaaaaggagagcctttctgatgccacttttctgcttgacaggccggacagtggctgtggattgggccgtggcaaaggataaatataaagatacacagtctgtttctgctataggtaagatgtggtagtgttgggtgagtaggggcgttgtataacctgggtgagagtattgaaacaactcctgtgttcatgataaaagtgtaagaaaaaggctgggtgcagtggctcttgcctgtaattccagcactttgggtggattgcttgcagtcaggagtttgagaccagcctggccaacatgcaaaaccccatctctactaaaaatacaaaaattagctgggcttggtggtgggcgcctgtcatcccacctgcttgggaggctgaggcaggttcttgaacctgggaggcagaggttgcagtgagccgagatcaccccactgcactccagcctgggcaacaaaacgagacttcgtctcaaaaaaaaagtgtaagagaacctgcttatcagagtaagactattgtggaagattaaccaaaagaatgagactgggctttcagggaaaactctgaattcctgctggctcagaagtgagtccaggtctgtttgtcaattcatattgtaccatttggtgctctggtcccaaaacctaggctcttttgagtctaagccccttcctgggagtggctgtgagtgagcctgagttcactgtcccctttacttgctgttgtttccaggctgtgcataataggagtgatggaacattaagaatagagaaacttaaaacttgaggtttatttagaaaacaattggctggtaagccaccagggtctcagagaatagaacgcactgagattaaagttcatggcttggctttgccccctagtgagcattttgctggctatgatgtacgaatggtagactgcttggagaggctcagttgccacttctttcagtctgggccagatgaaccttcagactgatgaatgggacaaactctaaaggaatctgggtgttgagagttttgtttatttctgtttttgctttttcttttctttatactttctcctgttatatgcagtaagaaaaatatacgaaattctgtaaaaccgatgaaaccaagaacttggagtattggttacttttgttaaaataacattgttttggatattaaatgaattcctcctttctttacctccctccataggtgaggaaaagagccatgaatctaaacatcaggaatcagttaaaaagaagggcagagaggaagaggatatggaagaggaagaaaacgatgatgatgacgatgatgatgatgaagaagatggggtttttgatgatgaagatgaagaggaagagaatatagaatcaaaggtgaccaagcctgtgcaaattcagaagaggtaagcagctcatcctgttctgagacagcagaggaagattcaagattgtctccgagaggaaaaattctcctttttctgcctgcatcattgcagaattgacatgtgtaatgaaattgaataggccctctgtcagcccacctccttagttctgatctgtgccattgcagagcagtcaagagaccagcccctgcaaaaagcagtgatcattctgaggaggacagtgacctagaggaaagcgatagtattgatgatggagaggaactggctcagagtgataccagcactgaggagcaagaggataaaggtttgtttggattttcataaatgtctttagactttaaaaaag

SEQ ID NO: 127334 - DNA, 1936 bp, Homo sapiens
gcagacttcttgatctgtccttttcctttttgatgcaataaattatttaaaattttactatacaaaatgttaaaccaaaaagggcaaaggtgggttacagttgatatttgtagttttcatctccttggtcctaatattattctttgtggagtcctatggaagaacatgggggctggtgaggaggagttaattcagctactaacaccctgtgtgacattaaccaattcacttactgtcttccatctcaaattacttacttggaaagaaggggtgataatatttgctttacctattttgaggtgttctaaagataaaatgagacaagaatgcacagctgctttggaaaggtttaatttgatatcgacagctaaggcgttggtaatagtggtcataacatctgcagtctctctgagcagtatttattgtttgaggttcttttgtctgggcctcaggcatttattgctgatctattttgaggagtaactgcattattgtgttctgatttttgaagctaccatactgtcttaattcattttctgttgcttataagagaatacctgaaactaggtactttgtaaagaaaaatttatttcttaagttctggaggctgagaagtccaaagtttagtggctgtatctggtgagagccttcttgttggtggggactctgcaaaatgcccagacagtgcagggtgtcatggcgagggggctgagcatgctaatgtgcttgctcaggtctctcttcctcttcttataaagcccccagctccactctcatgatagcccattaatctattaacccattaatccataaattgattaatccattcctgaagacagagtcctctgatccagtcacctcttaaagactccacctttcaatactgctacattggggattaagtttccaacacatgaaatttgggggacacattcaaaccatagcatatacttacctttcctgccttctttggtgatgttttgttctttttgatgttgagttctttgagggcctcatatgtcatggattctctgttttcttgggattatcaagaaagggggaagaaggggagctaacagcaaagacactaaattaaaagaggaggaaggctaacagtttctaagcaaagtggggagggaaccactgataccacccttgtttctcgccctcctgagacttttggcaaactgatagcaagatgggttggcagtatatcctctagcttaggctttgaggatttactcatttagtgctcttggcttatgattctctctccttttcacactgcccctccactccctccccactccattattccagggagtaaggcatgtcgaggctttggctatgtcactttttcaatgctggaagatgttcagagggccctcaaggagattaccacctttgaaggttgcaagatcaacgtgactgttgccaagaaaaaactgaggaacaagacaaaggaaaaggggaaaaatggtgagtttctagtaattgaaggaagtttttctcccagggtgaggaggagcactatgaaaatgaaagagggaggcatggaggtagcttctagaacttaaagctttttgcatttctttttgatctccaaaatcatccagtgtattgtgatactcattttagttctttggaaaaatctggtattccttggtattattgccacacttaaccctgtggtaaatgccatctgtcgccagtagcttttttttctgtgatgttctggcgtagaagtgggtgattttcgagtacttattccattacctcttattttttagaaaactcagagtgcccaaagaaggagccgaaggctaaaaaagccaaagtggcagataagaaagccagattaattattcggaacctgagctttaaggtaagtgagagagaaaatgaacattgcatgttttgaaggcttttagagcca

SEQ ID NO: 127335 - DNA, 1096 bp, Homo sapiens
tgcctgggctcggactctaccgcaccgcctcgctggggaccgggggcagggccagtgagagatcaggggaggcctctggccccgctgcgcccccggagctcccctcccctggggcttggcccgcaggcagcagcgtctcatctggctcgttctgcggactctcgcgggacagctcgtccatgctgctgtgttccagccccgacaggcccccgcgctgccctctggtctgcgtcctcagtcccccgcggccctcaggaagcagccccagcctcccggcctcaggatcctaccaggccctgtccccaccctctcgcgactccccagagcctgcttctgagctgcaggccgaggaggccttgctgcaggagcagttcctggacgcctgccgacagatcgacgagctgagcgtgggcagcgacaccatagacctgtgaagaggtggccaccttgctaccctgcgatatgcccctttctggcgcctgccctgcccgagacctgcacactgtaatccttccccaatcctccctggctcagatacctctccagattccttccccatccaggggtccctgggtgggtgggtcagcagccaggctctatcgattgggaatcagtgccaccttctctggagccctgggtgctgatgccctcagctgcaaatctaggttggcaggggtcccattttccttggcattcaccagcaataaagctccaaggtgctccactcctgaccaccactccccactctggtgctgagtgagaggggctgtcctcagaggaccctgggacctgcctcaggcccccctacccacctctgccatgcctaggaatcccacccctgtgtgaatgggactccctttcctccatgtgacacccacaggggtccatgacccatctaggagactttatagcagttgggtgggaggggaatgctcttaatttatcaataaaatattttcagaggagcaaggtctgacttttttgggaaaactcaattgagcaacagcaccagtgattccatcactagtggaagagaagcagctcttgggtggggtgggtccattccagaccccagggaccttcatacaagaccaac

SEQ ID NO: 127336 - DNA, 1085 bp, Homo sapiens
gagtgcagtggtgtgatctcagctcactgcatcctccgggttcaagcgattctcctgcctcagcctcctgagtatctgggactacaggtgtctgccaccatgcccagctaatttttgtatttttagtaagagtcgggtttcaccatgttggccaggctggtctggaactcctgaccttgtgatctgcccacctcggcctcccaaagtgctgggattacaggcgtgagccaccagcccagcctggattcttatgaatgttgaaatttgctgtagttgccatggagcttaggtatagagatgagagataaggtttcctgtggcccatgggtgagaagtaaagatggaagagggtgaattggagctaacctctgacagctgcacttacctgtacagtgaataaagagggtgtggtaagggggtgacaggctggggcagaccgtgggctcctaggtcatgtcttcctgcccctctgcagaggccacagaggccaaagagagatggagcaaacccaatcactttgcagaggaagtgggttgggcaagggcatctgaagggaccaaagaatgaggggtgaggtggtgtgtgcatttgatcctgccattgccagacctatgccacctgatcagcaagctctccattcccagctaagtagtttctcgtttaattgatggctggtgtctttattagtgttaaggggtgggtaggccatcagaaaagtattatttggccgggcgcggtggctcacgcctgtaatcccagcagtttgggaggccgaggcaggtggatcacaaggtcaggagttcgagaccagcctggccaatatggtgaaattccatctctactaaaaatataaaaattagtcgggcatggtggcacgcacctgtaatcccagctacttgggaggctgaggcaggagaatcacttgaacctgggaggtggaggttgcagtgagctgagatcatgccactgtactccagcctgggcaatgaagtgagactctgtctcaaaagcaaacaaacaaacaaacaaaaaacccaaagttattagttaaacagagttcataaagtgagacaatgtgttgatgt

SEQ ID NO: 127337 - DNA, 1151 bp, Homo sapiens
caaactctggggaaggacataattttctccaaactcccagaggcaaggctggttggtggggtggcacttgagccccatgtgctccctttgcagggttccttggtaccactctgtccctgcccccatactccctggagaggaagctctccagcccaagtcctctggacccagctgcttccctaagttttgcctcgattgcaacaacatcattaggtaagtatccaattcatttgaacttgacaattatttattgagcacttactacatgctagtcactcatcagtgttctgggacccttttatttcattgtcatcataatcataatcatcattctcttcatcatcaccgtggagatatatatgaatggtctgagagaaagtattgctggagaaagtcccacacagagttaagtaatggtcccctgagtgttttgcaatgagaggcagagcaggatgtagacagatgtatcagggacaaacagacacaggaacttcttcatgatttccacagccctggcactaaccccaccctccactccagtctgcctgacctgactccccaccaaccttggggctctttcctttgccatctgatctgacatgacatgctgtcagatatgggaagagctgggtttctcattgggaagacactgaggaggagaccttgagcaggcagatgccaccttcgttcaagaaagcctttcagaacatgcacacggacaagctggtggtacgaggaaagaccacaggctcgggaatcttgagacctggctttgaatcacaatttatttactcactagctagtgactttaggcacgttatttaacctctctgaacctaaattttctcatagacccagggtttaataatagtacttgctagttattgcaaagctcttagcatgatgctgggcacaaagtagaggctcattaaatagtagctattaaccttgcttctgtcccccactgcatcccaaatccacttccagaccctacctctcagaaacctcagccttggccccaggcagtggtgggacaacacaaaccacacagcagagggcacaggagctggaggagaggttctggtggatgaggcagggagtcatggagagggactgaggggctttcaggcccagctttgctctgcaaaagg

SEQ ID NO: 127338 - DNA, 1048 bp, Homo sapiens
agcttccgctgaaaatctggtggaagttctgctccctctgccagaaaaatggacagacacacaatgttgcaaatatggcaggggaatcatagatcctccagagcccacttgtcccacagcccacaaaatcctctgtttccttctactctgatggtgcctgagtgcctcctcctccactccccatgccagggctcctctgcctcagggagcttgtaggccagaccaagatgcaaacccaagggaagcaagccaaagcagagggtccatgggggagctccaggagggaggggtttatttccaatctgggaggcaacctagagattgcaacaaggccacaggctttggagtcacctaggcttgtcatctgtactgtggggatccatgctgcccacaaggatagcatgagatcatggtaacgtgttcagaactacttcctctagttagggaagaggtcgccatcctagctaggtgtgacccccacaaagatgtccataatgcaggacctgtgaatgtgttaccttacatgccaaaaggaactctgcaggtgtgattaagttgaaggttttgagatgaggagattatcagagtttatcaggtggtcccaatataaccacaagggtctttataagggagacaagagtgtcagagtcagtgcaggtgtgaaaatggaagcagggtagaaagacagggaaatttaaagatgttatgtagctggttctgaagatggaggaagggacagccgctagaagtcagcaaaggcaaggaaatgggttctcccctagagcctccaggaggaatgcagcccggaggacccactgtagacttctggcctccagaacagtaagattgtacatttctgttgctttcagctgctaaatgtatagtgatttgttacagcagccaaaggaaactaatacactgggccttgtcaggtagaagccagagcctgctgtggggcagctgtggggcaggagggaggtcagaggggaattttgcagaagggcagggcaagggctgagcctgcaatgagagggaggaggggccaggc

SEQ ID NO: 127339 - DNA, 1052 bp, Homo sapiens
agccgctggtccaggacgccccctcccagcctcaccacgagggcagagggtccccggagccaagcttaagcagccgcttccgcatggccccaggagaggcccagccaggtggttggggtggcttcttttccaactgtctagtccagcgctttttccagttgtgtccctccctgcccacaggttggtattggtgcccctcccaaggcgcgaattattctgtgactgctacccctaagcccaccctacatggggttttggaggaggacacagacccacccgtctgcctctggcttcatttgccttttccgtggtccctaggccagttgccctgcgtgctgcaggcctggcactagctctgcctcctggctgcaggactgtgcccctgccaggaaggagcatcagaaggggcagagtggggatgctggccagtcaaaagcatccctgccttgtctcctgccagccctgccctggcttgtaagcactcctgcttggccagcagtttccctaaacaccaggatacccagtcactcctgaggagtgtctcctcctgcctgcccgtaggcgacgggtgtatagaacacctagaaaatgctatgaggcccagactccagcatttcttctgtggcctctttgctatacagaagaagggctgccaaaggctgggagcagccgaaattctttgtttttttggtggtctttggtgatgagattgaaagcccacctttgatacagttgtcattgaagtcttctaggagaacaccctaggggaacgcctaggagtttctctaggccttagggcagattaatgacccacccccctccaccctgtggcttttccttcctgcgctagggatgcctgctgctttgcttagctcagttcatagtgttcctgaagtgtgggatatttgcttttgggtgtgtctctcaaggcctgctgtgattttagcaggttggggcccctgagctgtgaccctgcacctagatgtacccatgcaggcctgcacttcccttgcggagtttgctgtgaccgtggcccaccctagtgttggtag

SEQ ID NO: 127340 - DNA, 1062 bp, Homo sapiens
catgaagtttgcaatgtaaaatattcttggagagttgctgtgcaactccctggtccctgtgtccctcactggctaagcctctccttcagccctgtgagaggacagaagagtcagggctggatgcatgcatatccccaaaaggctatagattcatcctttcctcttttttctcagggtccagaggcctttcagaaggagaaggcagctctgtttctctgcagaggagtagggtcctttcagccatgaagcatgtgttgaacctctacctgttaggtgtggtactgaccctactctccatcttcgttagagtgatggagtccctagagggcttactagagagcccatcgcctgggacctcctggaccaccagaagccaactagccaacacagagcccaccaagggccttccagaccatccatccagaagcatgtgataagacctccttccatactggccatattttggaacactgacctagacatgtccagatgggagtcccattcctagcagacaagctgagcaccgttgtaaccagagaactattactaggccttgaagaacctgtctaactggatgctcattgcctgggcaaggcctgtttaggccggttgcggtggctcatgcctgtaatcctagcactttgggaggctgaggtgggtggatcacctgaggtcaggagttcgagaccagcctcgccaacatggcgaaaccccatctctactaaaaatacaaaagttagctgggtgtggtggcagaggcctgtaatcccagctccttgggaggctgaggcgggagaattgcttgaacccggggacggaggttgcagtgagccgagatcgcactgctgtacccagcctgggccacagtgcaagactccatctcaaaaaaaaaagaaaagaaaaagcctgtttaatgcacaggtgtgagtggattgcttatggctatgagataggttgatctcgcccttaccccggggtctggtgtatgctgtgctttcctcagcagtatggctctgacatctcttagatgtcccaacttcagctgttgggagatggtgatat

SEQ ID NO: 127341 - DNA, 1007 bp, Homo sapiens
ttgggattgttcaataaagttggtgactgattcagtcggattaattccgccctggtggtcttgtgggaatgaagataactagcaggatagtctaagaagccctgtggaagcagagtcatgagctgtgaatggggacgtggcggccacacggccgcgcccacgccacccgcagtacggggctggggctggggctggggctggagcccgccgtcccaacaatcccggggacgagagttgggcgggaatccgctccacgcaactcggcgcggtcccggggacgtggcgctttccagccaatcccggctatgcgattgttagaccaatggctactcggggacgctatgcgacagcggcgggtttgctgatgattggtcgggaggccgccggcgaggcggatgagggcggggtgcggacccgcttccggttgggcggtgcttgcgcgcgtgagctgagccggtgggtgagcggcggccacggcatcctgtgctgtgggggctacgaggaaaggtaagtacggtgatgcccagccccttcaccactgcctcatctttattcgctttctttctgtccccggtcttgttcttggcgcggcaggggactgcctcactcggtgccgctgtctctgctggcgcccgggtcccaggcctgatgctgctggagatcccgggaccctctgtgtgcagcctgggatggaggccgccgcccgtcttaccgcgcgctctgggaagggggctggtccggtggaactctgtcccgttgggtactgttctgtgcctggtttgctgcgtcctggtcctccatctctaggtcacgccactcaccgagtctctggcaccagagggtcattttttgcctccggaaggtcggagggcatttggatagtgttattgtaagagttccttgccgcctccactcaccatcctgcttgtatctgccagctccgccccaaggccacatcccgacagtagggtgcatctgccaaggtcgtgttcactcacctaaagggt

SEQ ID NO: 127342 - DNA, 1809 bp, Homo sapiens
tttgagactggggcacttgggaatgactgccccccaacccccgcccccattatctccttaggtacttttctgtttgtcttactgtgttgtcgtatttactctagaacactttccactctctactgatatgtcctcctctgccatttcaggacctcccaccctcccccactgagctgccttcccagtgatgaaagaaaaaatgtaaaagcctgaaaacccttcttcttgatttttaatttttttttttccctctaagaccttaaccactctggatagtatcacggggtatcagtagagtgtgctaaacagatgtgtactctgcagcttctttgcaggttttttgtcacatttttcagtcaagtgttccagctttgtgcttgttcattagagtcacctgtgactacagagattctgaaagtttgaatcagggcctgggaatctgtactttgaacagtactacaggtggtatttatgcctaggcaagtatgggaaacaactgtgcagaaggataaagacgttcttatctatgactagaccatctgaatgatttggcctttgaaggtgactcaaggttgagcctggatgttggagacttggtgctatagaccaaggaagctgccaagtatttcgctggttcctaatctcatgaacatcagaatcacctgaaaaacatttaaagctacgaatgtctgaattcagcttcagagactctaaatcaataggagaaacttaaagcttcctagatgattctaataaccagccatgtttgaagaccagaccaccaatgcgtacaagaagtaaaggatttggagtcaacatttaaaccttggttctttcacttttaattcttatgaacttgggcaaaaggattaaaattctactttggtatcttttgaaagaaaacagaaagtggacattttaactataagtttcttatcagcctacaatcagatgaaggaaactggtaaaaatttctcactgtaataattgaagagtctgatattccaccatacttattttatggatgaagtaatatttgggataatataaaagacttgcatagatatgtatatcaaattaatagtttaactcggatgtgagcttttaatttcttatttagttattaagcatactgcctcctgaattaactgcttttcattttcttcaagatctaattatcatggacctgcgacagtttcttatgtgcctgtccctgtgcacagcctttgccttgagcaaacccacagaaaagaaggaccgtgtacatcatgagcctcagctcagtgacaaggttcacaatgatgctcagagttttgattatgaccatgatgccttcttgggtgctgaagaagcaaagacctttgatcagctgacaccagaagagagcaaggaaaggcttgggtaaggtaccacctctcaggggtctagtgtgggtaatgacattctttataaaggctaattcttttcttttctggctcagttatgagtaaagttatattgaactattaatacatcttctgaaagctaaccatggaattactacctctaaaatttcattaaatgcctgatttcatacatttttaattgaataacagttggtgcctcattctacaaagcatcatttttgcataaaagtaccaagtactgcaagacccaacttgaactgcattatcttgctaccagaagaacatagcatggggggatttctcatctcttctcatctctactgcttttaatttttaaaaactatctgtgccctactgacctggcacaagccaagtctttgatgggctaataaacggcacattg

SEQ ID NO: 127343 - DNA, 1954 bp, Homo sapiens
gacacttataaagcttcataaagccactgattctttagctttgtggttttgctttataatctacatactaaccctttcagcttattaacattcttataatcagatatacattcttaccacatcatttcctcagagttctctgttttcatgtaaaaatccaattcaacacagtatttaaaagctgctagccattttttagacaagcatcttcctgtctttttatctgttttttaaaaataatcttgccttgagatataaatgatcccagaacttttctgatatctttgtatttttatcaaaagtgttactttttctaaaatcagctaaatttttgaagtctgatgtaactattttgaatttttagaaaaccatgattatttaccaagaattggagtttctcttctgtaagcaataaagaaaaataaagttcagccacatcttcgctagagaaaataaaaatgaaaacaaggaaaaacaaagttttacatgttgtttgatgcaaagagtggagaacttggataggaatggatattcactcctgaattctaaccataggctgaaatctacctccaaagagataggctgagtttgcttttggatccaagtgcaccagccatgactgtgttgaccttattcacgtggcttattacagaccagtaatggaccatttttttcagttgctggcctggcagttttgttttggagacaattttttatttctgtgcattagccctgggcacacacctggctaagtccagagttctgtgtctttttaaccttttgctggatttctctgcattttctacagaaagattgtaagtaaaatagatggcgacaaggacgggtttgtcactgtggatgagctcaaagactggattaaatttgcacaaaagcgctggatttacgaggatgtagagcgacagtggaaggggcatgacctcaatgaggacggcctcgtttcctgggaggagtataaaaatgccacctacggctacgttttaggtaggtccctactgtctgggggaaaaagccttgtggagctggcaccttgaaacgtaactgttttgtcttgtagaatgattgtagataaaatagacgcggataaagatgggtttgtgacggagggggagctgaaatcctggattaagcacgcccagaagaaatacatatatgacaatgttgaaaaccaatggcaggagtttgatatgaatcaagacggcttaatctcctgggatgagtacagaaacgtgacttatggcacttacctgggtaaggggcaagatgtcagcctggcagggaccgtggtcttgagtcaaagaaacaaatgggtcacacagtaaaggaaaggaagcttatcttaaatagttcaattcagtgctaagctgattccctttattaattttaaatttgtatattatgtatttttaaatttgtttaatttttgttttctgaagtctggaagtctggtatcttctacatttttagcattttacatatattttaccattttttctttatgtcatccctcatagagacaatttttggagtagatttcatttaaaagaatacattgggctgggtgccgatagctcacgcctataagcactttgggatgctgaggcaggaggattgcctgggcccaggagtttgagaccaatctgggcaacatagggacaccctgtctctaccaaaaaaaaaaaaaaaaatttaaattagccaagcatggtggcacacacctgtcctagatactcaggaggctaaggtgggaggatcacttaagcccaggaggttgaggcagctgcgagccatgattgcactgctgcacaccagccttggggacagagcgagctctgtccaaaaaaaaaaaaaaaaaaaaaaaagaggctatgaggctacatacttccaacagtgcaaagcaaggggctttgagatgtttcttgacatggtcccagta

SEQ ID NO: 127344 - DNA, 1067 bp, Homo sapiens
tgcttcttgctctggctgagacccaacaccttcctgatttatttggaattaatgataaatacaaagcaaagagtaggctattggtgatctaaacaaaatggtgtgtaaataaatctcagctccgacctaggcactcacttgctgcccagaatgattcttcggtgctgtgtatgattatgtgcataaaaatctgttgagagctctgttgcctcacaaggcagatgattcaacgtaatgggtatttctgctgcctgagactgcataagctgaagcactggctgggaagcaatgtctttataaggcatctttccccagaggcatgagggtggacagcactgagggggtcatgagtcggcttagagaagtgaggagtttttgttactgtgtgttcttgattcaatttggagttcaggtataaatcatcatagctcttagttaaaatctgtctcaatgaatccgctatccatgagagaaaggttaacactgtctctgccacaaggaaaatatgaaatactgagatctaccctgcctatagcaaaactagatcaagagcctacctaaagctgtatacaggccagctagggccaaaactggtgcttaggataaatacagcattccaagcagagctataggaaaataggttttgtcattaaaaataaagttttggacaggcacagtggcttatgcctataatcctagcattttgggaggccgaggcagaaaggttgcttgagtccgggaattcgcgaccagccagggcaacaaagccagaccccgtctttacaaaaaaaatattaaaaattagccaggagtggtaatacttgtcagtagtcctagctacttgggaggccgaagcaggaggattgcttgagccccagagtccaagactgcattgagctatgattgcattgcactccagcctgggccacacagaacaaggacctgactataaattaaaaaaaaaaaaaattgtatcttcctgtttccctccttatatatatatgtgcatgttgctattaggctatttgagtccagtcaccatttttaccttttaccccaaggagggg

SEQ ID NO: 127345 - DNA, 1844 bp, Homo sapiens
tttacagataaaagagaccaagacacaggccaaacagctagaaaatggtagagttcaaactcaggcagtatgggacttgagagccaccactgccttccagatgtaactagaaaattcaagccttctagtagccttaataccaatagtgaagcataacagtgagttacatagttcaggagccagagttccatgtgaacttggagctgactctgagatctgatgcctggagctgtagcccaaaactaaatgtctttgtactgctgcagttttacctgtgtcatcaattatttcttccttgcatggttttatctttattggaaattgatttcccaccccacacattttcatgttttctgaaagtcttttaagatttgacctaaatttttgttttctagatgatccagatcctgatgatggatttaactataaacagatgatggttagagatgagcggaggtttaaaatggcagacaaggatggagacctcattgccaccaaggaggagttcacagctttcctgcaccctgaggagtatgactacatgaaagatatagtagtacaggtgggtgagatgaaggattctgaacagggactcagtttctctttttgtggcttattctgtctttcccctttagccttatatagcatatcttatatatatatatgctatatagcatatcactgtatatgctatataagtattggccagattcagaatccaaggtctgtcactgtttttctgtgaccttgatcaaggtgccttgggcattctgtttagtatgataataccttctgtcatataatgtattttgccatttcattggtagcttcatattgtaagaatggggggaaatcccattatttaaaatatcccatgaccaatagtcagacattgagtaataacagtgatactaaagaactctcacagaaggcagttactgacaacatagactatctatagctaaacacataatcactggtcacatctcctgttagtgtgactttagcatgactaaggctaccaggtagatcatcatgggcttgatgggatagtttgtcattaagcagtgtcagtgttctgtcaggaagactcagttattttagattgaagcataggaaattgctcatgttttaccatttcttggctagaaatggttttaaccatacagacacacatgcatacatacatacatacatacatacatgtacaagtgtgtttaatgaataataaatgtttacctaaactagatactttactttcttctggcaaattcagagaccaacttaatagtctcttcttattctttcctgtttaggaaacaatggaagatatagataagaatgctgatggtttcattgatctagaagagtatattggtaagtctctgcttttagtgtttttcttagaaaagctgagaagctttgaaaggtgtatttgctggctgggcacagtggctcatgcctgtaatcccaacactgggaggccgaggcgggcagatcacctgaggtcaggagtccaagtccagcctggccaacatggggaaaccccgtctctactaaaaatacaaaaaaattagttgggtgtggtggcgggcgcctgtaatcccagctactcaggaggctgaggcagaagaatcgcttgaacccaggaggcggaggttgcagtgagccgagaacacgccattgcactccagcctgggcaacaagagtgaaactgtctcaaaaaaagaaagaaagaaagatgtatttgcccatagaaacaatttactccaagggtcaattctcactagctcattagctgtcaccagatcattaaccagaccagtgtgatagtgggttgtgat

SEQ ID NO: 127346 - DNA, 4968 bp, Homo sapiens
tgggaaaaaagccttgatggccagaggtacattcttatgaagatcaatttttggaaaaatctatatgtggaactgagtatctggaatttgattctctcttgactgacctttctcagtgtactccttgacagtgttcctgtttccccaggggcgtgcttgtcccaactgaaggccactggtataatggactctttgtagtaattggctacacctttctaaaacaagtggtcccgtttaattagctaccttagggtgaaatgaaatgtagggaacgagtctaagtctttcttgatggtagctctctcctcttatttctgcatttattaaggtataagaactctttgctctcatgtgacttaaaatcagcagctggaaatattcttgttgcaagataagtgattaagcctcaggaaaataccttgctttctaaggtctgtctggcctaaaatacccttgtagctgctgttgggttccaaacaaatggatgaggaaaaagggttaggccagattagcatgaggcagttttggggaaaagacaaacccttcttttgtatgtatgtctgtgtacccaggtgacatgtacagccatgatgggaatactgatgagccagaatgggtaaagacagagcgagagcagtttgttgagtttcgggataagaaccgtgatgggaagatggacaaggaagagaccaaagactggatccttccctcagactatgatcatgcagaggcagaagccaggcacctggtctatgaatcagaccaaaacaaggtaagtctggcgaggcccacacgctctatccttgattgaagtatgcttctaggggatcacctgaacagtttctgttaaggtgcatagagcatttaaggtcttaattagtctaagtcagccaagtatctgaatctggcgattaaaacctttcagggcagcactagctatctgatctcattttagaaatccttttgcccagtgctgatagcattgtaggaaatttggcttcagaaaagagcctttgtgtgtagcctgtgcccagcatgcatcatcaggtatttttagatccccaggaatttttttttttctttgttacttcatttgttcctttacctattacaggcccattctgtctactcaaagctggttgtttccttcttaaatcaaataggcttttttaaattgggtcctttgtatgggctataaatcagcttttctctggagcctgttcaaattgtccttgatcaattaattatctgaggtattttgttaaaagtattgttgtccctaagcccagtcacctgcttcagagattactcctgccctgcttggagtaagctgaaaatcggtctaaagatggagattttcagtgttctgagtatatttttgtctaagctaatcttcaatttcaaattcagttttttattttagagcctttttaagtgttgatctgctttaagttcttgctcaaagtcactttagtagccaggtgttgtgtcctgagatgtatgagaaaaggaaatgcatgtagtcatccctatctaggagatgttccatattttcctctaaaaggagagttttctcctcatgaaacaaacctttatctctagcattgagttgttgtgttatattctttccacccttccacttttaactttcttgataaaagaaatgtttaattggcctggcacgatggctcacgcctgtaatcccagcactttgggaggccaaggcaggcggatcacctgagattgggtgttcaagaccagcctgacaaacatggagaaaccccatctctactaaaaatacaaaattacctgggcgtggtggcgcatgcctgtaatcccagctactcgggaggctgaggcagaaaaatcacttaaatcactttaacacgggaggcggaggttgcggtgagctgagatcgcgccattgcactccagcctgggcaacaagagcgaaactccgtctcaaaaaaaaaaaaaaaaaaaaacaaggaatgtgtaattgctgttttcttccctcttcgtatgtatgtagggggaatgagggctgagtagttcacacttaatttagtagaaatgagaatcttaacttctgattaaccccaattcttctataacagtgtttctgaatttttaatgggaaatatgttcttcttcaattcattgctatctctactttcaggatggcaagcttaccaaggaggagatcgttgacaagtatgacttatttgttggcagccaggccacagattttggggaggccttagtacggcatgatgagttctgagctacggaggaaccctcatttcctcaaaagtaatttatttttacagcttctggtttcacatgaaattgtttgcgctactgagactgttactacaaactttttaagacatgaaaaggcgtaatgaaaaccatcccgtccccattcctcctcctctctgagggactggagggaagccgtgcttctgaggaacaactctaattagtacacttgtgtttgtagatttacactttgtattatgtattaacatggcgtgtttatttttgtatttttctctggttgggagtatgatatgaaggatcaagatcctcaactcacacatgtagacaaacattagctctttactctttctcaaccccttttatgattttaataattctcacttaactaattttgtaagcctgagatcaataagaaatgttcaggagagaggaaagaaaaaaaatatatgctccacaatttatatttagagagagaacacttagtcttgcctgtcaaaaagtccaacatttcataggtagtaggggccacatattacattcagttgctataggtccagcaactgaacctgccattacctgggcaaggaaagatccctttgctctaggaaagcttggcccaaattgattttcttctttttccccctgtaggactgactgttggctaattttgtcaagcacagctgtggtgggaagagttagggccagtgtcttgaaaatcaatcaagtagtgaatgtgatctctttgcagagctatagatagaaacagctggaaaactaaaggaaaaatacaagtgttttcggggcatacattttttttctgggtgtgcatctgttgaaatgctcaagacttaattatttgccttttgaaatcactgtaaatgcccccatccggttcctcttcttcccaggtgtgccaaggaattaatcttggtttcactacaattaaaattcactcctttccaatcatgtcattgaaagtgcctttaacgaaagaaatggtcactgaatgggaattctcttaagaaaccctgagattaaaaaaagactatttggataacttataggaaagcctagaacctcccagtagagtggggatttttttcttcttccctttctcttttggacaatagttaaattagcagtattagttatgagtttggttgcagtgttcttatcttgtgggctgatttccaaaaaccacatgctgctgaatttaccagggatcctcatacctcacaatgcaaaccacttactaccaggcctttttctgtgtccactggagagcttgagctcacactcaaagatcagaggacctacagagagggctctttggtttgaggaccatggcttacctttcctgcctttgacccatcacaccccatttcctcctctttccctctccccgctgccaaaaaaaaaaaaaaaggaaacgtttatcatgaatcaacagggtttcagtccttatcaaagagagatgtggaaagagctaaagaaaccaccctttgttcccaactccactttacccatattttatgcaacacaaacactgtccttttgggtccctttcttacagatggacctcttgagaagaattatcgtattccacgtttttagccctcaggttaccaagataaatatatgtatatataacctttattattgctatatctttgtggataatacattcaggtggtgctgggtgatttattataatctgaacctaggtatatcctttggtcttccacagtcatgttgaggtgggctccctggtatggtaaaaagccaggtataatgtaacttcaccccagcctttgtactaagctcttgatagtggatatactcttttaagtttagccccaatatagggtaatggaaatttcctgccctctgggttccccatttttactattaagaagaccagtgataatttaataatgccaccaactctggcttagttaagtgagagtgtgaactgtgtggcaagagagcctcacacctcactaggtgcagagagcccaggccttatgttaaaatcatgcacttgaaaagcaaaccttaatctgcaaagacagcagcaagcattatacggtcatcttgaatgatccctttgaaattttttttttgtttgtttgtttaaatcaagcctgaggctggtgaacagtagctacacacccatattgtgtgttctgtgaatgctagctctcttgaatttggatattggttattttttatagagtgtaaaccaagttttatattctgcaatgcgaacaggtacctatctgtttctaaataaaactgtttacattcattatggggtatgtatgaccttcattttccaagaaatagaactctagcttagaattatggatgctctaaaatgtcagaatgggaactctcctcgaagttctcccaaactcagagacagcactgccttctcctaaatgattattcttttctccctgttttctggtattttctagcatccttctcaccacagccataacccttttttacttccattaggccgtataactggagagacctgctgctcgttatataattatctgataccaaacacaagcgattctgaatgtacacacacgtttatctatagagcataaggtaaaacaattttgtttaacattttggtattgtttacaaatgttattaaaacatgcaaattca

SEQ ID NO: 127347 - DNA, 1057 bp, Homo sapiens
catcttatgtttcagagcactcttccttctcatgtggagccccgaaccccttcttccctgactatcaaatgccactcacagctttcagggccctcagcagctgagtgtaggagaagcagatgagggagagaggcacaatgaagcagaagatgaagaggaaccacgtataggactcgctgcggtatttggtgcccacggtgtaccagtcagggccacaggaacactgcaggccctcagggatgaacctgcaaaggaccaaacacttgctcactggactctccacaagagtgcagtgggagctgagatgcctggattgtgttctccacttagaacccacggaatgccctaaggcttcaagcaggggggttttctgtcctgactgggagaagctacagcaattccaactgcagagtaaacgttagcacttgtctcccactgccctttcgcctcatattgcaactctttaaaagtagaggtcaaagactaaatagttatacccaagctctctttccacccacatcaacctgagctcctagttaactcagcaccactgccctgcactctcaccggctccagccaaagaagggtgggatggagacgccaataccaatggtccaggtagccaggaccaccgtcagtgcatgcttggagctgaagcggaagttgccgaagggcttacagatgacaatgtagcgctcaaaggccaggaaggccagtgaccatcctgtaaccagacctgtggtgaaatgtgaggataatgggctagacagagccccacccagcctggctggcagagtggcaaacagatcgggtggagcaagcacagagagacagggctggactgacatttggagtgaagactcaaacatcctattttagccaaacttctagtctgggttgctttgtaccccagtattttaaaaagcaccagactcatttcccccagactcctctttaggaaccccctccagtggagtagcaacctttgccttcccctaacccctttttcccctgcagtacctgctacagtgcccaggaagccctccaaagcacaaac

SEQ ID NO: 127348 - DNA, 1050 bp, Homo sapiens
gcagccccggagactcctgagcgcggggcgagggtggggtgggcaaggtccagcgagagaatgggaggagaggggaggggagcggtcgcagccctaccccttcccgcacgccccccactcctccctccctccatctgtaggccacctcagcctttcagcctcttcttcactggctcccgccctctttcagtcttggccctctcctccctgtccccccggactaaatacgcacaccccctctttctttctgtgcaagcaagagggtcctggaacagcgggttctgaggaggctgggaggcagggctgagaggtggccgagagagaggagtcgcagagccgccagagtgagtcaggcacctccactgggattacagatcccagagcctcgaggagctggaagacatgtccccttctttcctctgcaccccagcccgcagccagccccccaccccccagcccctcctttctccctgctctcaggacccacagtgaccactctaggctcctatgaggcttccgagggctgtgagaggaagaagggccaacgctgggggtccctggaacgacgggggatgcaagctatggagggtgagttttcccaaaaggcttctttctttcccctcccctcctcccttaattcccttctttcctccctctgacccccaggcctctgagccaggacacagcccttccctcagttcatcttagcccctcttcctgcagctcagagctccagcccttcccagggctcaggctttgacagaagttcaggatgcatcccttcgggaccccaatcaccccccagctaaccaggttatgtgtcccgagggagctgccagacagagaaagaggccttgttggacagagctttgaagcagcctttcagcagggggtttgtcctcactgcctgccgacccagatcccaagctgtctcttattttaaaaagcaaggaactgggcatgtgaattgtctttctggggccaccaacattaacttcgaatggaagcctgtggctttggttctttaggataccttattgcctgaaagag

SEQ ID NO: 127349 - DNA, 1182 bp, Homo sapiens
tgattctcctgtctcagcctcccaagtagctgggattacaggggcgtgccaccacacctggctttcttttttttttttttttagcgaagactgggtttcaccatgttggccaggctggtcttgaactcctgacctcaagtgatccacctgccttggcctcccaaagtgctgggattataggcgtgagccactgctcccagcctatcatcaatttaaacaatcccttatcgactgacacttagattattatcccgtgtttggttattatgcagtgaacttatatttgaatttgagttgtgaactctaaatgcacattgttttaggtccagtacttaccacaggtaggtcatgggaactctgaggctctgtaatttctgagctctcaggatgaataggtgaaaatagtctgtatacattttttgagtcaggggatttttagaaagattcagggcatcaagaaaatactataaatgaagttaggtctttaactgtcaggtgattccttagaagcatgaaatactttttgtttacagtagactaagtgattgttttggtgccaggcctcaaaatctacttttctattggaccttactacatagagtcactctcttttcccttcttaggtactccttttattccgtccggcatgatgctacacttctctgatggggtagagacaaggttttcaggactttgcagacaagaaataagtctccctttaattttgtgcctctagaacatggtaggttagttcacctgccctcttgatcatctcaacctttggactttgcaggtgagctgcgttctctacgggaggagatttccctgttagagcatgagaaagaaagcgaacttaaggaaatagaacaggaattgcatttggcccaggctgagatccagagtctgcggcaagcagcagaggattccgcaactgaacatgagagtgacatagcatccctgcaggaggatctctgccggatgcagaatgaacttgaagacatggaacgcattcggggagattatgagatggagatcgcctccctccgtgcagaaatggaaatgaagagctctgaaccatccggtagtttaggtctctcagattactctgggttacaaggtatgagagccatcaagtgggtcagtaaagtcaagcagaggaaaggagataatatataggaaaat

SEQ ID NO: 127350 - DNA, 1097 bp, Homo sapiens
aaaggatacagataccacctacaagcagacatggggatccgacccaattatctcaagactagagggagtgagttctgaagtttacttctgctctaggcactgggttctggtttgctctgccctaaagtggatcagaagagattcttttattgtctgcatagacttgtttcagtctaatggcaggcacaatgcttccagattggagtgggcttgactaggcctagcctcaaaactaactggactggcactctaagggtctcccagagccaaacacacctttgcagattgaggggctggagactttctgtagtcttttaagcatgtttatctgagcggtgagtcacaatagaaggccccttactatctttggcctaaaatgaaggtatcaggacaaagcctgcatggctggtgatgccaggcagaactcccttcaagcatagctctgcggttctgaattgcaggacacagagagcaacagagagatggctgcagtcccaaacactgagtatgacgtcagcagagtctcagacttcagaaatggatttcttagagcctgatcctgaaatgcagttgttacggcagcagctacgggatgctgaagagcagatgcatggcatgaagaacaaggtagggcacagagggtggggaaggcaggcacatttcttgtctttctttcaccttctcccagcctgtggtagaaacatctccataggcatccactgtggagggagatagtactctggggtctcacttgcctgatgtaaatcttccagtcaaagagcgccatgctttccccaagcttgttcttggagcatatgtggtatctgtagtaaacaagcctccctgttccatttcccacatagtgtcaggaattgtgttgtgagttggaagagctacagcatcatcgccaggtcagtgaggaggagcagaggcggctgcagagggagctcaagtgtgctcagaatgaggtgcttcggtttcagacctcccacagtgtcacccaggtaaacactgcccggggaggcatctggggtgggggcagaagggcctcatggaggggctgcttcaaccggggtgggcacagtgagtatggctgt

SEQ ID NO: 127351 - DNA, 2546 bp, Homo sapiens
agccacccaagaagcttaccttacagagtaaccaccccctccacacccgcccccacccacagtgtgacacactgctgtccagactgacagaattgcaggaaaagtacaaggccagccagaaggagatggggcagctgcagatggagcagtgtgagctcctggaggatcagaggaggatgcaggaggagcagggccagctgcaggaagagctgcacaggctcacactgccactgccaaagagtggcctcttactcaaggtaactctgccacaggcagctgctaactgcggggaagctgctctgagaagcttccctgtgtgactagggaaaaataaaagggtggggattgaactttttctcttaccaaccactccttactttctcaccactctccccaaaccaaaaagctccatagagccaattagagtttttcttataagggctttaaatcttaaaataccttttatactcaggaatctgtgcagcagtttatatttaggtatttagtccatctggagaaaatgcacctgaagccactttgtaaactacaaaatatatcccaacacaagagaccactgccacttttagcaggtctccatagaagggctcccccgtccccagatgggctctgtgaagtcaaccctgagattcttcagggaattgttcacaacggggatgaggcaccaaggaggcatcagacttcctgtgtgaccaccaccatcccttgcctccttccttctactccgcctcagagtcaggagctactcaccaagttagaagacctgtgtgagctgcagctgctctaccaaggcatgcaggaggaacagaagaagctgatacagaaccaagactgtgtattaaaagaacaattagagatccacgaagagctgcgacgtttcaaagagtctcatttccaggaagtgttggagaatcccgatgattccaaattggctaagtcctccaaatgtaatcgaaacaaggtaaccatagcaagaggtagggagacagttctcctgagcacaacagcatggcagagagagtgggcaccgccgaagggtcagagttgggaaggcgtgtttggccaggggtaaggataaggcaaaagccctgcctttcaccagctgtgaccactcacaggctccattaagaggtggcttttagatacggcctgaggacctcacctagatgccattatcctttatcacactgatattcacagtgcccagttgaagcactatgagcactcagggcagagctgggatgaccagaagtctgtcatcagatcattcgactcattcccagtaagatgtataatatcagtttggtgtttgtttggattcctttggactgactctaaatgtcatctttttcttgagtggaaaagtacacttctcagttatcaaaatctatcacctttggtgttctctatgaggcaaatttggggcctttcatttccaagagaagaattcctagcatatggggttcttagtactgaccacactatcttcattggaactttggtggcagtaacagagcaaggtcacaggggttagaccagaaaattgatgcctctcaagtaccagcaagaggtcattcagatgaggtgacacaggtggagatcaccatacaattctcttcagggttgggggataaagttgttctgaggtctcagcgtgggcaaggaggggcaggtagacagtttcggtttaggccaaatctattcattcagatcttattctgaacaaggagaaccagggagtagcagaagtcaacactgtgaggctggatcatattccaggggcatcagatgtccaggctggaggcctgggtaacacagctgggaaccaggtataaaatatttccttaactgatcagatctcatcctggacatcagcagccaagaagccaggcccaacatgcccagaggccagattcagaattggggcaggagatacaggaactaatagtaagactttgattccaattcttcatattgccgcattcaaggccggggctgattttagaactaggggtgggcgaggggactgagcctgaaggtcaggataacaggtatacctgactgagaagagggtgtggtagggagccagggtgttctggaaacccactcggcactgctccaaggagacagggatgtaccaaagtgcagaaaccagccgaaatgggagcccggaaatcatggagtatctgccctggggagattttcccaaatgagcaagaaactgatacatgccagttacctataggctaagtcagagacataggccggggtgaggtggaaatgtaggtgtgccattctctaaggtgtgctctcagacatctgtaccaggagaggtgcagctggaaggactgaagtgtcagagtaatgatactgtctccccacccctgcccccagcaatccaagctgctcatggagcagatgcaggccctgcaggtgatgtatgacgccggtcaggcgaagcaggagctcttgcagcaagagcaagggaggctcctagaggagcggaagaggctgcaggcagacttgca

SEQ ID NO: 127352 - DNA, 1044 bp, Homo sapiens
gcctcttgaagtgctgggattacactggatggcaagtgagccgctgcgccctgccgtttttttcatcttattagatggacatcatcaggtgcctcaagttaggagaagctatttgtaaaactatttgagaggctcattttccaccgttgaatattttctttattgtctacttcctatgggctttaacagggagatttctgagacagtgacccccaagcagggctgagtttggttgcgtggtcagccaactggttgcataaccagccaactctgggtaactggccctccactaccaacagatcaaagaactgcagaccaagctgcgggagctgcagctgcaataccaggctagcatggatgagcaggggcggcttctggtagtgcaggagcagctggaggggcagctgcagtgctgccaggaggagctccgccagctcagggagaagaggccttctgttgtcaaagaagcccgggggaagaatgctaataagaacatgaacaagaatgccaatggggttaaaatgaaaaaggtgaccaagccatgctcggatacttctgagagcgaccttgagaccagaaaggtgagtagtaaccttggtagccagataagcagaaaggaggaggagatcctgggaagaagcattgcctccacaaccctttcaaccaggcaagggatttgtagagaagcttctgggatctctgaagtgtctacagtggttcccatcttaatggaaagtgggtgctcccttttcctgtgaagttatggggagagtggaacacagacaactcacatcgggaggtgcagccccaaaggaccacagcccctaggctggacaactccttcagtttgcccagccccatttgttggggctcctgttcttcctgggttacatgcccaagagaagaaccaaatagatgaagagggaggaatttgttcaaagtagttatgtactaataagtgaaagaggattgggtaaaagaagagtcactgtaggggtgggaagcaacaatttaggtgcagagcccaagactctttagttgtgg

SEQ ID NO: 127353 - DNA, 1034 bp, Homo sapiens
tgtgaacggaatgtagcttaatgcacagggtggcaactggaggatttgttggtggcacttctctccatttccttttctgtccttcctcctgctccctccccagctttcctgttactcatcttcaagcctccacttttcttcttgactttaggtattccctttactccctggtccacaactgctttagtgacggggcccctctctatgactgtttctcccctgtcaccccccagaagtcttaaggcactacgggtgaaacccaaagagttcagccacagccttccactacctcagacccagcccggcccaatcagagggagaggaagaactgctggtgaagggttctcctggtggggcctgttatccccagagctccaggaggccccaacatgcacctgtgcagccaggacctgagggagcacagtgtggtagaaagcgtggctgccaggcggtcagaagaacttggttgagtctgtctctactgacaggcgttgtcccagggagcaaaatgcacactctgagctctagtttcttcaaatgtaagcaaaggatgatcgaacctctgccctcctcacaggtttttgtcaggaccagatgggttgaagtagatgaaagtattctataaattataaaataccccatcattaataaaaagagcacgcacttacaaaatgcagtcttatgtgtcaggcactgttctaatcacttacgtatattaactgatttaatccttgcaacaaccccatgaagaagctactcctatttttttttatatatgattaaactaaggcatagagaagttaagtaaaacagccaggaagctgcgagtcagattataaggactcaatattagcaacaaataagattccagtcttgcttccctttattgtctctcctcattttgagcagtttctcttcattggtcccaagtaggaagacaccatacttgtgtttaggcaacctcagatcacattagctctttaggtaactaatatattatttatttatttcatgtattttttataagcccctct

SEQ ID NO: 127354 - DNA, 1048 bp, Homo sapiens
ggccagaaagaaaccaggtaattacatagacaggaggcagactcacttgctgtagctgaggtgagggtaccttccagaaccacaggaacacagagaagcagccttctgaccggaagggccccataaagaacttggcatctgagtggggcctcgcaggagggagagggtcaggtaggcagagactagaggcctgaccccagagctctggcccgaggagctgcgcaggtgagggagggtgctctggggcagtggagggtggggcgcccctgagcccgtctgtgccctcccctctgcagacagcaaggccatcgtggatgggaacctgaagctgatcctgggcctgatctggacgctgatcctgcactactccatctccatgcccatgtgggaggatgaagatgatgaggatgcccgcaaacagacgcccaagcagcggctgcttggctggatccagaacaaggtgccccagctgcccatcaccaacttcaaccgtgactggcaggacggcaaagctctgggcgccctggtggacaactgcgcccccggtgagtgggccagtgagcacagcatggagcccttagctcccaaagacagaggggacaagctggggctgccaaggcgtgtggttgtcagaatgcacaccctggggcctgggggccaggatcccctgcagggtttgtcctcctccagctgtggctctccgctggctggtggcaggccctacctgatgagtgtgccagattccgcagaggcaggaagaggtttaaaacccctcattttacagacaaggacactatggcccagagagggctggtgacttatccaagatcacacagcttatctgtggcagaaccacctagagcccagggcctggactccctgccccatgaattttttactgtgccacgaggcactattcctgccgagctgagagagaggcagtgtggtgaccaggacttgtagcaagaccaggagttagatccagagaaggctcttctctgggagaccctgggatgactttgagaaggggttgaggctcaggatgatg

SEQ ID NO: 127355 - DNA, 1044 bp, Homo sapiens
gccagcagggctggtgccaggctgcgtcagccagggcagaaaggcttcattgttggtggtggagagggctgtcctgctcctacgtggtgaggggcctcgaagctgatggggtcagcaggaacctggctggtcaaggcctagagctggtgggaaggggtgtaaagccacagcctctgagggtgttgggtgaacaaatgccctgcatcctggccggctggctgcccctcaccatcgtctccctccatcacctctccaggtctctgccccgactgggaggcctgggaccccaaccagcccgtggagaacgcccgggaggccatgcagcaggccgacgactggcttggggtgccccaggtacatgcgcagatggggcaggggggaaagggggcaggggcagaggttgggtctgtaagtttacctggccagggtgcagggggagactggggctgctgggaaaagagggcgccatgtgacatcactcctttccatcgcaggtcattgcccctgaggagattgtggaccccaacgtggatgagcattctgttatgacctacctgtcccagttccccaaggccaagctcaaacctggtgcccctgttcgatccaagcagctgaaccccaagaaagccatcgcctatgggcctggtatgtgtgagcccctggcggccctcctgggcagctgggcacatgtaggctctccctgagtaacctgggctctgctcctgccccgtaggcatcgagccacagggcaacaccgtgctgcagcctgcccacttcaccgtgcagacggtggacgcgggcgtgggcgaggtgctggtctacatcgaggaccctgaaggccacaccgaggaggtatgcagaggccgctggggacagagggattcacttgggattggaaccagagagcgtggggccaacaacaggaatggcccggaggtgactgccagagccacacactgtgctgtgcagtctggggaaggtgtcaccatgggggctgagtggggctggggtgcataaggcactgtggggtcaggaggggctatg

SEQ ID NO: 127356 - DNA, 2065 bp, Homo sapiens
ttaagcacaccatcatcatctcctggggaggcgtaaacgtgcccaagagccccttccgggtgcgtcctcccggcctgccccgtgcccaccaccaggggtccctgagggagggcggaaccctcgctggagtccctgttgtccctgggctcaggctgggactgaggcttgggctggtgccactgaggctgggccgggtgcgctgggcaggaggatgagccttgagggagggcaccacgctgagctgcgacccctcccgcaggtgaacgtgggcgagggcagccaccccgagcgggtaaaggtgtacggccccggagtggagaagacaggcctcaaggccaatgagcccacctacttcacggtggactgcagcgaggcggggcaaggtgcgcccagccggaaggggtgggtctgggagggggcgggggtgagtcgagtcgggggctgagcccaactcacagcagtgcccgcttctctgcaggcgacgtgagcatcggcatcaagtgcgccccaggcgtggtgggccctgcagaggctgacattgacttcgacatcatcaagaatgacaacgacaccttcaccgtcaagtacacgccaccaggggcgggccgctacaccatcatggtgctgtttgccaaccaggtacctaagctcctgggtactcacagcgacatgcacctgccagctccagaaggcagctggagatgctgtcactgggaacagggagggatgattccgcagacatggtggagccctacctgtgtgaggcagggtgcctcagaggaagcaaagggggcccttttggaggctgcccctgtccatgctgggtcccctgggtgtgtcctgagccagcatctagctgagagcaggggtgtgttcccctcgagagccctgactgagcctcctccacatccaggagatccccgccagccccttccacatcaaggtggacccatcccacgatgccagcaaagtcaaggccgagggccctgggctgaatcgcacaggtgagtgtctgggcaggggctgggactggctcgaggttggggttaggtggctgccaggccctcaccacatctctgggtgggtcctcaggtgtggaagtcgggaagcccacccacttcacggtgctgaccaagggagccggcaaggccaagctggatgtgcagtttgcagggacagccaagggcgaggttgtgcgggactttgagatcatagacaaccatgactactcctacactgtcaagtacaccgctgtccagcaggtgcgctctgcccctcccatgctaccgcccggccggcccgccagagccctgggtctccctcctccagtcccatgggaccagttctggatcctccacgcctttcctgcctcctgccctcactctcatggtggatctgagcttcagagcccatattcaccaccaggatgttgtaggaccttgccttatatccagttctgacctaccattgtacccaacagggcaacatggcagtgacagtgacttatggcggggaccctgtccccaagagcccctttgtggtgaatgtggcacccccgctggacctcagcaaaatcaaagttcagggccttaatagcagtaagtggggcaagagccaccctgggagtgaggggtattcgggtagggtggaccggagtctcctcatggtgtcacttgccctccacgcagaggtggctgtgggacaggaacaagcattctctgtgaacacacgaggggctggcggtcagggccaactggatgtgcggatgacttcgccctctcgccggcccatcccctgcaagctggagccaggcggtggagcggaagcccaggctgtgcgctacatgcccccggaggaggggccctacaaggtggatatcacctacgatggtcacccggtgcctggcagcccgtttgctgtggagggtgtcctgccccctgatccctccaaggtgaggagataggagctggttggggctgggagttggggacttgttgggaagatagatgagtcatagggggcagaggccagagggacttatgtgcctggagtgggcacagccaag

SEQ ID NO: 127357 - DNA, 1283 bp, Homo sapiens
tctgctctggacgggggcacggggaaagctttggggtagaggatgacaagagtcagaagacagtaagtgggaatgggccatctgccaggggccagaccctggctaggcatgggccacggcagagggatgcaagacccaggcccacagcctggtgggtgactcaagtgaacagagaatgtcactacatggagaagggagtgaaggcagaggctggagctcacagaggtgcaggggagggtgtggggcccaggctccgattagaggagcagcctgggagttggggagtgggagaggagggggagaggagggtgagaggaggggaagaggaggggaagaggagagggagaggagagggaaaggagggggagaggagagggagcatctgtgtgaaggctgcccccacccctgctgaacacgccacccctgggctccaggtgtcctgcgggaggtgaccactgagttcactgtggatgcaagatccctaacagccacaggcggcaaccacgtgacggctcgtgtgctcaacccctcgggggccaagacagacacctatgtgacagacaatggggacggcacctaccgagtgcagtacaccgcctacgaggagggtgagggccggtgggccaggctagtgggcagggctgggcaagtgggcagggccgggatctgatgatattgccctcggggcaggaggggtggtgggggcgcacactccctgattgatgcccctgtggctggcttccaggcgtgcatctggtggaggtcctgtatgatgaggtcgctgtgcccaagagccccttccgagtgggcgtgaccgagggctgtgatcccacccgcgtccgagccttcgggccaggcctggagggtggcttggtcaacaaggccaaccgattcactgtggagaccaggtatcctccccctttgctagcctaaatctgtgaccaccctttcccagcccctggccctcctcgctcatccctctgcctgggcctcagccccaccccatcctctctcaggggtgaggcaggagcagaccccctccaggaccccagattggcccctgtagctcgtttctcctcagctgggtccccagcggcctgccctctttcctccctgtccccccattcagctactccctcatcctcactcactggtcttatgaagctgatggggggatgttatctctcaggggagcgggcaccgggggccttggcctagccatcgagggtccctcggaagccaagatgtcctgcaaggacaacaaggatggtagctgcaccgtg

SEQ ID NO: 127358 - DNA, 1024 bp, Homo sapiens
atgacccctcacaccttgaagggcctctgccctaatgtcacgagtgacttgaacgggctgggcttgcacatgagtgcactgtatgcggtgtgtgtgcctcatgggctgtacatgcccatacacccgcctcacctgtgatcttggctgtgaaggggctccccgggatgtgcttgtcatcgaagcgcacgatgatgctgtagtctccaggcgcagtcggcagataggacacggtgcaggtgccatccttgttgtccttacaggtgatctctgccttggatgggccctccacggccagtgacagaccccctgtaggtggaggtgtggccaagatcagaggtcctgccctcacccctgcccctggtgagtctccaccccagcctgcgacctgcagctccctcaccttctccagcatctttggtgacaatagtgaaggtggctggcttgttgaccatgccatggctcaggcctggcccataggcactgacatggcggctgttgatggcatccacatagaactgtaaggggctccctggggatacagagaaaaagggggctgggtcagcatcagggattatctgagcccaccttggccccagcaccttccagcagcctccctgccaaccccctccgtctgtgccgtagggacccagctggtggaggtctgcttcccaccagggtataagcctccctggggcctcgcctggtgtctgcacacagcgggtgctcaataaatatttgttgaaagagggaaggcaggactgaagctacggcctgctcctctcacccaagccccagcccagcccagcccctaactcaccagggatgtggttgccgtcatacttgatccccatctggtgcaggcctttctcagtgggtgcatacctcaccgtgatggtgccgtccttgttgtcggtgatgttgggccgtgccgtcttccccgagggcatccgcacctctcctgcagggcagacacagttacgtggagaccctggtttcccccactgcaacctccctgctgtcccag

SEQ ID NO: 127359 - DNA, 1058 bp, Homo sapiens
tgcctccccagcctcagcccccacctccagccacacacacattacacacacacacacacacacacaaatgtgccacacccagacacgcacagaatcagacactacaaacacctgccttgggggtgaagtgaaggcccagcctccccaccccaccgcgccccaggggttggaggaccttgtctgtgtcaggacagtgtccctccctgggaatgtgacatgagggccgactggggccaggctcaggggcagaggctgggacacaaggggctggcgagggctgcgaggccagggaagccctgagtttctggcggggctgagcagtgggggagcattgtgttgtgggtgtctgtgtgtgaggtcaccctcaaactgcaccgccggccagataccctcctgaccccgaggacttggtctggtctctctggtggctacaaccccagagttttaaggacttggaaaggaaagcacaatcagagaagaaaacagcccccgaaccagcaggagtggcctggcacatggaccggcctgagcgatgtgcactccacccaagccaggctcccagggggcctgatttctctctcactgtctctttttttaaaatggttgcacggctctgccccatggggggccttttttacacactgcgaggcccagctttctaggggacttttgcacatgtcatgcagctcagctgggagctgcttaggtggaaaactccaaataaagtgcggctgtcgcagagggttggctgttccttgggggtgtgctctgtgtggctggctgccctctggcctgccacacgaaaaaccgggccctggggaggcagaggcggcctggctgttccctggaagattgacccagtcgagggaaaggtcctggggcagaagtgaggtctgggatgttggcagagtgcttgaaagaaccgggggtgggggctcggggatgtgggaaggggtcccagcgggagggttcgtggacagtacagggtgtggatactgtgttctacagtactgtcccaggacccctgggaggccagtttcagttcagcttgacctcaa

SEQ ID NO: 127360 - DNA, 1050 bp, Homo sapiens
gagagagagggagatgggggtctcactatgtggcccattctggtctcaaactcctgggttcaagcaatccacctgcctcggcctcccaaagtgctgggattacaggcgtgagccatcacagctggccttcagtatctgcacataaaaagggatctgcatacatataatcttatccttcccctttctgacacatcactgcatattgaatacaccagtgtgcaccctaatcaatcttcattaccagttcacttggaagccttccgggcagtgttgtagaagccaaccctaatcagcgtgaccctccgctttgggatgaaattgattctaggtagggttgacagagggttgagcgtggcagcctttccccttgtcctctgtgccctctgggtcatgctcattcccctccacagcccagcccaacaactcggagagggctgcctgggtaggagagacggcagcccccagagctgtcctggactcccttctcatctctccccacaggcaatttctaaaccgggatgacattggcatcatcctcatcaaccagtacatcgcagagatggtgcggcatgccctggacgcccaccagcagtccatccccgctgtcctggagatcccctccaaggagcacccatatgacgccgccaaggactccatcctgcgcagggccaggggcatgttcactgccgaagacctgcgctaggggactcctcatagccctcagcccttccctcgtttccaggcctctccccaggcttgccatcagccttctttactttttgagcctctgatttccaattccctgctccttcccactccattaagaggctaggtgaggcgcttctaggttgctggggctctgctggttaaggaacaggaagcctgaccatctccctccactacctcttccctgtgctgttacacagtgtcattgttgatgttaaattaaagtcatattcttgcttctctccagatgggttgggtgctggaaaggacatgtgtggggtgaggccatggggcagattcggttggcaaggatggaaaaggtgc

SEQ ID NO: 127361 - DNA, 1037 bp, Homo sapiens
agccagagcgggtaggggatgtcattggcaggaagcctgtccatctcggctgagtcttttttctgtgaggttgagtcaaggccatcagcggggagggagctgagctgaggcagtggagtaactagagatgaagaggaaaggtgtggaacaggcatgtgccaggcagggctgctgggcgatgttgctgcacgtcccattgctgtctgtgctcatgaatgtcaagtgagactcctcagccctgtacccttctccagctgcttgagtgtcttgcagaaaaggtggatggttggggattgactcagttgagattttgcccccaaacatccctttcccccaggcccctaaaggggaagtcagggaaataactttctaacaaaagcaggaggcgagccctagaagcggggagcaggaggccgaaggaaatctcatctctccacagtctgtccctgtgacaagcaggctagggtggcccccctccctgcaggtagaggatcctgaagctagggtaatgatggcagatggctgctgtatcctggcatccagccagctcccagtatttgcccatagctcccattcctccaaagcactttctatttcttcccacaaagtggctactccactgacggattcctagggctgtgcagacagacagggctcccatgctctgcgtgtccctccctcaggaacccatgcttggcctctgacatcttttcccaggccccccagtgaagcaagaactggtctcctgcaagatgtgccgcattgagtcattcttccgcaagaacggggccttcgcactgcttgatccccgagacctggccctctgaccgtgggccaggtgtgggcttaggggagggaagaagaaataacaggcctcctggtggggcaaagctgctgtgtgtgtctgtgcccctctgctctccctgtccctgaggttgcattcaggcctttctgaaactatcagacctgcaagttgccctcttgctttttccgtaaccctcatcactttaatcatccctttgaggactcagcaatga

SEQ ID NO: 127362 - DNA, 1052 bp, Homo sapiens
gggtgcccaacacccgcccacccagccctctgcgggagccagacctgaagcctcacagccactggtgcattacagaggagccgagttcgctgcatggccctgaagtgcccgcctagcccctgcccagagccagtgctgaggcctgggcactgctgcccaacctgccaaggtgagagcccctggcccctccctggtagagccacaggtaggttgtcgtgccatttcttgaattccagagcccaccttgccggcctccagtgggtttggtccgtggcggagctggaatgcctgagctcaaattctgccattgccacctagtgcttgtgtgactctcttcctcaatttccccatgtgtaaggtgcagataatgatattccatgcctcatagtgcagcttaataaatgtttgctttctactttgtgctccccaatcatgagacatggggtcagccctcagggatgacccctagagtgtgacactgagtcatacactaatgcaaaatcttgtaacagccaagggcaggaatagaagcaggcaccagctagtgtgcgaattcagaggaaggagaccgaatccagcctgggcacaggagggaaagcgtcctggaggcagctggtccccaggtggcccttaaggataaagaaaagttagcttggtgaagggctgaggaaggcagtgagccttctaggaagaggggagaaatcaagcacaggcgtggccctgacacggagggtgagtgtgcaatgttggctgggaaggtgtgagaggtgacgaggggccagagataggtggggcacatgggtgtggctatgctctgtccacggaagaccagaaagggcgggctaaggaactgaggcctcaccctgcctggggcactgggagccactggggaatctaggcagagatctgaccccatctagtcttggctcgggagagagccctcagagggcatgtggacaaggaaggcgggcaggctgaggctggggtccaggccagctcccaccaggcctccctcttctcaacccctcaaccctaggctgcacagaaggtgg

SEQ ID NO: 127363 - DNA, 1749 bp, Homo sapiens
ctgaggaaatatagaaacctctgccttaaggttgattttactaaatgctctattttctggtgcagttattgactgtcttatctcttttgtcaggaatgtcttttttaattagaagacaggaagaaaacaaaaaccagactgtgtcccacaatcagaaacctccgttgtggcagaggggccttcaccgccaccagggtgtcccgccagacagggagagactccagccttctgaggccatcctgaggagttcctgtttgggggtgtgagggaaaatcagcgcggattttaaaaagatggctgtggcctgcccggcgtggtgggaggggagctggtttcctggtgaactttctaaaaggaaaaataattttaagtaaagaaaaaagaaaaaaaaggaagactaaacagaaaccagaactgaaacattcacctggtagcaaatgacacatgcacgcacacacacatacacgcacaagcgccagtgcgcacgtgtacacagaaaaacaaaaggacaagctttctgtgaaacaaaatatttacttagggataatgtggggattcacatgaattaaatagctgcaattggaagaagagggtcagggtcatttgttcaggttttctattgttttgtcctctctttcctctcctacccttccttctctttctctctcccctccttttaaatgcaaatgagtagaaatttcttctaccttccccagctgtttcttcccacctttagagttgtttagacaaggaggagtaagcaaggaacttgttctgctttctatcgtggtcacattggtgatgctcgggacctgccagggtcagaatttatggatatctgaaccctgaccccgttcattctctcagtccacttccaatccacatcagtttgttgtctgccttggagagaagagccaaaactggggtgggcgggtgggtggggagtgcaggatataaatgtgtaagtttttgttttttaaggtttttttcttagtgaattattcacccacagacatgagagaaaaaaagagggagggtgtgtggagaaaaaatgtttacagggctaacaagggatgatgtgtcatttagtatgttactaaaaagtgtggaaatgacttgattttaaggggagggtgaggccgaagagggaagcccaaagcagatcttaatgtttcaaaggagtgcagcccttcacagccatcagatatgagggcactgttctgtctggtgttgtagccatctcaagaacaaatcaacagcaacaaaagagaaagaataaatttttaaaatttaaccagtgtttctttgtttttactttcattcactgccttgtagctcggaaatggttcagctagactagctatggaagcagcctttggtacctgatagacatctggggatggagttgaaagggcaggcccctgccctgatgccacagacccttcagacttcagggaagtggttcattctgcactttttattctcctaattcacaccaaagctcatcacgcttacattttacccttttgtgtagcctcagtgggaaagggagttgggttactctttcagttaaacagtgtggtatggtttttctactatggccacccaagtagacagtttcctgacctgcagatttattggtctttaaaaaaaaaaactttattgaagtatcattaacataatttgcatgtgtttaaggtatacactttgataagctttgacataagatacatccatgaaaccgttatc

SEQ ID NO: 127364 - DNA, 2172 bp, Homo sapiens
actggtatctgagttagttgagccagggagagggctacaggaaggcaagcatattaagaattgcttcctggctgggcgcggtggctcatgcctgtaatcccagcactttgtgaggccgaggcgggcggatcacaaggtcaggagttcgagaccagcctggccaacatggtgaaaccacatctctactaaaaatacaaaaaaatagtcgggcgtggtggtgggcacctgtgatcccagctactggggaggctgaggcaggagaatcgcttgaacctgggaggcggaagttgcagtgagctgagatcgtgccattgcactccagcctggatgacatgagcaagactccatatcaaaaaaaaaaaaaaaaaaaaaaaggaagtgcttccttctccactgctttagcttttagcttagccttatgttcatttagcaaaaactgttatgaagacagatacagtagaatgaagctggcatcagctggtttcttggtgacagttttggacaaagggaggtcggggggcttttgaaaaaacagggtcagttgaatattgggctattcatatcacataggcatctcctgctttgtctctctttctacatgctttaaccctttcctctctccctcctcctcccacaggaggaaatcctgagcagcctgttcaactagaaaatcaatgactggtggagacttagttgctagaccggcctttgtaaacaaaatctatctttggaagagaatgaggaaacttatgagagccgtagcaaccaagtgttgttgtagcagcctacatttattgaatactattttgttcactgctctattttcataagcactctgtatgtggacgattttaatcctctaaacagtgttatgaagtagataatattaatagatgaggaaactgagacaaagattggtaacttgttcaagggcacagtggagccaagattcaaactcgggcagtttgtgtccagagtacaccctttgaagaccaccaagcttataacttttctcatatataataatttttgccctgaattacagaaagatctgaagccaggatcgctcaggagacgatggagagagctcctagcagagttgggacggttctcagtgtgccccaatgttgcagttgtttttcagcatattctgtctttctcctcagtcaaggaccaacctaccttttcttttctagtgctgaggaatgtaaacaagtttgctgggccttgcgagacttcaccaggttgtttcgatagctcacactcctgcactgtgcctgtcacccaggtgaggatacatagttcccagcttttgtccggactgtcggactgttggggatgcctgggaatggggataggttttaatgcctatcatgggaccagtcttatagctagagtcagggaaggactcagcagtttaactgtggtgaacagctggaatatacagggcccggattttcttgggcctgggcagccagtaattgtcagtgtctttggggtaccattttcacctccataagaaagtaactgttacacagtgcattgaaacattttcttcccccttccccttacagacacttctaagatggtaagtgtacatggcaacaaacaaataagtatttttaacctggccactttggcgaaaacaacctcaagttgactgttatatgtggtgccagtctcctaaaactgaccctccagatgtaatgagcaaagagcttattcttatcacttttatgacctgaatgctgaagtgccaggttttgaccagggcaggaggtatgaattgaatatcccttatccgaaatgcttgggatttcggaggaaaaaacactttcagaagtgtttttcaattttggattttttgggattttggaatatttgcagaatgcacaccagttgagcattcctaatccaaaaatccaaaatccaaaatgctccaatgctcattcgcttgagggtcatatcagcgttcaaaaagtttcagctgttagggatgcttggcccttacaggagaggaggagcatctttggctcccgatgagcacttttctccacgtgctttccgtctcctggttctgaagcaaagcaagaagcttagctgaaaggagtgggtagtagaatttgggtgccagtttcttgatggagagaagaaaggtagctctcctctaag

SEQ ID NO: 127365 - DNA, 2134 bp, Homo sapiens
tcagctacattttgtagttttcagtgtataagtttttcacctccttggttaaattttttcataagttttttttatgctattgtaaacgaaccaacttgtactttaaagagctgttttattataaattatacacatacacagaggctactttctgcacagtaagttttcagaaagatatataagtgagactaggaggggaagggaggcttttcttttcgtttcataactttctgcactatgtgcacttttttatgagcataaattacacttttatgggtaaaatcagatatagaagggaaagaaaatgaactttaagcagtggtacaagagctagttgtcttttctcagaattgatttcttaatgtcactttccaaaatagtttactttctcatcttctggaatgtctccagcaattttgttaatgttaaaatcccaaaccatggaatgctattattttatagttcactaagtggcttaagtagtaagcccagtatgccccagaaataactcacttttagccatagatcaagtgacatgcatgactgaaaaatagcatgtgacccttcatgacacattttgccagaagtggggatttcccctccactgggtaggcatatattgactggggtgaccttaaaaattctttgattgcttttactatgaatcttctcagtagaagtagtattctgtctacaagctgtttcaggggaaagaagtgtagtagttgcttctctctgcttctgttttgcattattccattcagtgctggttacagtataagggcaggatcgtattggctctaattttcctaaagcaaatgggaacctaggggaaaccctccaaagatggggtttggagtcaagtatgttggtttgaatcttgccacataccctattactttgaacttcagtttatttatcaagtgaaatagggttagtactaccagtctcataaggttattatgagataccaaatggaaatctaaagaagatcttgcacatagtatgtgatcagtgaatgttaactcctttctccttggaggagaaacttctagaatgtcattatgtacttgcaaaactagctggggcatgtctcctgttgactctaaggcagccacccacacattctggaatcccacacattgtagaataagtctttgtcaagccctctttccctcagtgggactaatatatgacagataaaataatatggtaagtctgaaatcaaggtcatagatatcctttcctaatttaggataaatcttggggcaaggaaaagagacctaagtaaagcagtgctgtgggggaaaaaaaaaacctgttatctttgtcctgtgatatgggaaaataaggtgcaccaccaacctgacctacttgatcttccattgctaaacaagttttgcagctcttcctatagcaggctgtaacatatgtaacatagtggtgggaaatgaacagaagtaagagctaatgtagaggtgctagagaaaggacttgagattgctcatcccctcttagtaattctcttcctctagaatgcctgtagtagacaagacagaaagcccttgaactttctgtcccatgcatgactcagtctcccttttgattttaaggtccgtaacacctgcctcaacatgctactttgtttgccattctggcagagagggtgaactggtttagtttcatttcagcaagtccaagcctgcttttcacatggtactggtaattaattccctagcttttttttttttttttttttgagacggagtctcgctctgtcgcccaggccggactgcggactgcagtggcgcaatctcggctcactgcaagctccacttcccgggttcacgccattctcctgcctcagcctcccgagtagctgggactacaggcacccgccaccgcgcccggctaattttttgtatttttagtagagacggggtttcaccttgttagccaggatggtctcgatctcctgacctcatgatccatccgcctcggcctcccaaagtgctgggattacaggtgtgagccaccgcgcctggccaattccctagcttttttagttggtcaacttgaagaaagctgggacgtttcagtctaaaataacattcttgctttccaaatgccagat

SEQ ID NO: 127366 - DNA, 1031 bp, Homo sapiens
atagcctcatcccgaagaaacttcacttctaaggtgtagaaagtcgttttctgaaatgatgcccgctgcccctttgaagggaagtctaggcatgcatatgcagactgcatcaacccagagggtttgaagggctaatgagagcacttttgttgattcctttacttgctcccaagtgtagggaagtaaatgctactaaggaaaatttgtggggttttgttagtatctgtagggtctcaggtgagtaagctatgcttccttttaaaactcttacccctctttcctatacagactttttgtcgatggttagaaaattccttaaaaggtttgccaaaggaaacaaccgtgggagccgtcacagtgacacacaaacaacttacagacttccacaagcaagtcactaggtgagtgatactgggggttcttaaggaggtgtgggatgtgggaagaaacatatctttatttcttatgtgcccttgggaaatggacaatttatagtttgtttaaccttgaattgcacaaattggcattggaagccaatctggtgggaaaacattcaccatgctgtgtatgtatgtacatatatttaacatatgtgataactggtataagattttttaacggtaagtggaggcactgtttctcccaaaggaaaatgcactgagcagctcactccccgtcaggagatctgtctatatttttctaagtccttctgagttttcatccacattcgggggtcaggaatgtaggtacctgagtaaggcaaagcattggttataaaacatcagaaagtgatgtagatgacagtgaattggagaatgttcaccatgcctaaagatagtcaaattctaatttcaaagaagttgtgtagtccaaacagaacatctgcctgggatacattaggcccatgaggaacttacaatctctggattacagcctaaaatgtaaagtgtgtgtgttttttttactgtgaacatataaatatttttaatacagttacatagtcttcctaattattgttttatagccataaa

SEQ ID NO: 127367 - DNA, 1049 bp, Homo sapiens
gggttcaagctgttcccctacctgcgcctttggagtggctgggactatggtgtgtgctgccatgccaggctgacttagtttttaaaaaaggaaataggaacacaagttatttttcacattaaaaaaaaattaataccatcacatagaagatgaagagaaaaaaattttaaaaattgctaactttaattcttaaccatgttttctgccttcaaatcatgaaaaatctaagcattaatctctgttgaaacccatgttcattccttggatactaataaactccttcattttctttctaaagacaaaaaacttctggactttgtgaatccagctgtcattttacacacacctgcatacacacacacacagccacgcgtgcacacacacacacactttcctattaaagagaaattactaaaggggaaagagtgcttggtctttgggaagttgagactagaatttatctgatgttcctgctttcctacatacagcatgaagaagactttgaattacggaaagaactgattggacaggtgatgaaccagcttggacagcagcttgtcagccagctgctgcacacctgctgcttttgcctccccccctataccctaccagatgtggctgaagtgctctgggagatcatgcaggttgacagaccggtaagattgttttcatgaggaatttatctcatagtccctaaatgtaataggctttggttccttaaggccaaccctaattttgaaactagccctgttttctgtccatggaaccaaatttaggcatattgccaaattagattggtagatgaagaggcccgtaaagatcagtaatttattattgagttctttaaagcatgtttctatgtcactgtcatagggggtatattaccagaagtaagtatcaagcattgaattcagttgtgtggctgtccaatgtgaaatttgttcacttgtgagagatgcccaaatgtcagttatattagttacgtattactcaagaagtatttaatcctttcagacttattctatagcactgtattatttcttggtgat

SEQ ID NO: 127368 - DNA, 1061 bp, Homo sapiens
actgttatagtatcatacagaatactttcactgccaaaaaaaatcctctatgttctgtctattcatcccttcttccctgaaaccccccaccaaccactgatcttttttactgtcttcatagttttgcccttttaccctggctgcttttatagcctaatcttgtcatttatacctagtctcactttccacaccaggtttattcagcgtagccctgtcaccttgctgcggagccaagtggtcatccctatcttacagtgggccattgcctctactaccctggaccaccgggatgccaattgtagtgtcatgaggtttctacgagacctcattcatacaggggtagccaatgatgtaagtataaaaatgataccatttctacttaacagcttttatctcctatctctttgtcattccttaggagaaaaccagcatcccagtatttccttacttgatctatattggtagacatatatcatagtggatcattcactagccaaaatatcaactaagacacttgtgctgggtgctttaggctatataaagcagtctaaaactgttcatgctcccaaatcatttggtgtctagttgaagagagaaacaagtttaaagagttaagtaacaacaagatgccagtgtttggtgtttttcatttgtttttgaaacagggtcttgctctgtcgcctaggctggagtacagtgatgtgaatctcaagggatcctcagctactgagtagccaggactacagacattcaacaccatgcctggctagtttttatattttttgtagagatggcatttcaccatgttgcccaggttggtcttgaactcctggcctcaagtgatcctcccaccttggcctccagtatttgattgtcagatgagtgataaaagtcatgattggtatgagatcagacgagggaaagctctagaccaaaaagagttggaataactttatggaaggggagggatttaaatgaagccatgaattagaggtagaattttgatggattagagaggcagatagtcatactgcctctaagccaagatcagagcaagtcag

SEQ ID NO: 127369 - DNA, 1083 bp, Homo sapiens
tgactagtttacttagcagcagggagggttttagaattaataatagcattggaaacagctcctcagatactgcttttccctcccttccagccacagaggggaatattgagttgaagaatgttgtttcttttcccaagatgtcttttcatttaaaattgatatttcataattattataaaaacttccactcccttagtggactatacctaaatagaatctttgctttcagaaatttctaaaactttgagatgacatctgttgagttttatcagctaaaatctgttttctcaaccctttcttaaatgtggacttcataggtgaaaactgtttatgtcaactgggaaggatttatgtgtttcttttcctgatcagattctcattacaatctttttcttttcccagctgtgcttttcttctttgttccttttgtacttattgtaataaatatttggcaagtctgaatgctgtggcatttctgaaaaagcatttcttttaaaatcactgttttgttttaggcactgtgcatccccacctttcagctcctagaacagcagaatggtctccagaatcaccctgacactgtagatgacctgttccggctagccaccaggtaaatccttctgaagagcccatttcttaattgctcatcctatcactgcttagtcttgccatctgacccttggttgttttattcttgtaaaatgaagtcactggagtaagtagattaatgattcataacccaaaggtaaattgcaagctgatatatccccagcagtgacgcagagtattgcgggaagcaagggataaaggagctgagttcctgccaggaaggagggctcacacacaagacaatgcagtgtgcctggcaaaacacttgactagatcatctctacagtcctctgtaggttttaactgttcgtgctgttgcgatttcatgtttcacctcaaccttctctttgagaagcttagcatcctttagatataatcagtttcggaataaagaatgtttgggattttaagatgccttagcagttatctcatactgtatttctcagctctactcacagcctactttatcagtag

SEQ ID NO: 127370 - DNA, 1964 bp, Homo sapiens
caccaccaccagcctcccaagtagctgggattacaggcatgcgccaccacgcccggcttatttttgtatttttagtagagacgggttttcaccatattggtcaggctggtcttgaactcctggactcaggtgatctacccgccttggcctcccagagtgctgggattacaggcgtgagccaccacacccagcccatatttgggtttataaagggaaaaatggaaaagatagccatagtgcctcacagcccatctacccaaagttggattgaatttgcgtgttctattggaagtgacttaaaggtggccaaaaaatgataggatgatttaaaggatgtgcttataaaggtgatgtaagtaaatgactttatcatctggttttctttatttggtgaaaatgatactaagtaagcaagcagggatcagggctctgggtcctcagtgaaattggtctttgttcactattttgggctgttgtcttttcccaggcataccaatcccattgtggaaaatggacagactcatccgtgtcagaaagtcatacaggaagtaagtgctaatggatgcttgtggaatcaaggcttgcttcttttttccttacagggctttgggtaactcacctgagaagatactgtcttccaagttcatagggagattcagtttgttgatgtggtttcaatgaaatgagggacagagccatccaaatgtcttttattttagatttgataacaaaacaggctgcaagggaatgccttgaaagaccagagaagtggtagaaagagattcactgtgtgactcctagagttactaggaggcctgatcaataccagcagaatatttttgacaaagctagtgacttcgttttcctcagtgatgacatacttcccctctacttttttcactgaaggttatgtgaggatcaaaagtcatgttttaagaattgcttttgagacttcagaggacaaattacatcaacactaaatactcttaagtgtccaatggtctcaaatgatgccatttccttaactctagtccttttgttcaaattcttccaccttccaggaactatctttaaacatctcttcctatatagctcgtaccaattcttttcatagcctttcgggaagtctgaagtttaggaaattgtgtatctctgtcatttagcaaagttagacatgctcttccagttctaaagaggcactgttttctcttgttaagtgatagggttttgtggtgggtagtctattgaacctgagcatgctggccatgtgtgttcctatacagaaagttttgtcccagttatttaaaagctaaatgaggtgttaccaacttagcagtttttcaggtcctagttgttgattattttctttcttgtgctcttttacttttgacccagatatggccagttttatccgagactctaaataagcaccgagctgataatcggattgtagagcgttgttgcaggtgcctgcgctttgctgttcgctgtgtaggcaaaggatctgcagcactgctgcagccactagtcacacaggtaaagttatctgttgcggggggacgtgttccatgtacagaatttgaaataggcagggtgcggtggctcacgtctgtaatcccagcactttgggaggcctatgcaggtggaccacctgaggtcaggagttcaagaccagcctggccaacatggtgaaaccctgtctctactaaaaatacaaaaattagccaggcatggtggcgggcacctataatcctagctactcgggaggctgaggcaggagaatcgcttgaacccaggagctgcactgcactccagccagggtgacagagcaagactccatctcaaaaaaagaatttgaaataggagcctttagaacaaaaactttgctgatgaaatgaaacacttttgtatttattaacaaactaaaaaaacacttgaaagagattagtgcctgtgataggtac

SEQ ID NO: 127371 - DNA, 1029 bp, Homo sapiens
caagtaattcatccctcggtataattgtaactccctgagctttgcattctttcttacattgccatattcttaatacctggattgccatatatgctcttaagtcagtggtttacaaactgctctgtgaatccctgggagttaacgttgactgccctgagggaagaaatggaagatgaaatagatgggtctcagggcctgttgacaatatgtaagtgagatcagctctatttttatgtgttttatttattgtggttctgaacacatttcactttttaaaagggttcttttgctttaaaaaaagaaaagcaagtatacctctgttttaataaactagaagttttcctttagtttcagatatgtaatctctgcttggcttttcttcttagaccctgtgttgggctatttgatgaaaggcctgtgtgaaaagcccctggcttctgctgcagccaaagccattcataacatttgctctgtctgccgagatcacatggctcagcactttaatggactcctggagattgcccgctccctcgattccttcctgttgtctccagaagctgctgtgggcttgctaaaaggtactcacttgatgttaaccactaatagtcacctcaaagccactacctggggtaatcttacatctgtcatatcccagtttttcagttgcaatgtacttagtgtttaagaatttataagatgaggaagatggcttttccactagaggggatagtgttgactatatgtacatgcattcttttcttggattatcttaagcctatataattaattaatactacttgcggtatatatagcaccgacctagatttgggtagagacaacatattcaaactaaacacggctgctttttaagttggaagaataaaaagggagaccaaagaagcattgccataccaaagaggtaaatgggagttgaaaggtagtatacatggatcagtgccatgagtagaagtcaggggtcctggtctcttagcagcctttaaccattactgatcagcttatactgagtga

SEQ ID NO: 127372 - DNA, 1179 bp, Homo sapiens
gccatgagtatataaatcgatgttaatatctgccacgctgaattgtgacctgatacctgcagtcaagctctgtattcagtcttgattggagagatggttaaggcagatatttataaaaagcacaatgcttctttcttagctgcctttcagggcctcgtcagtggcatattgtttctaatccagtaaatattcaaggaggtcgaataggtttatttttctctgttaagaagtcctggtccttaattatgtaccacactatttactcttaaaccaattttggtgtcattttgaaccttctgtgacaagtctgaagattattaaaatcattaatgttctaactaatatgtcttggtttgaaaaatgatggctagatagtcttcgttaattgacttagtgtccctaggaaacataagtcataaatgagagatttgatattttttttgtttatatgcatttcaagccaactgcatgattataattttttagtgcatataaaaggacttaatagactagtttattagcagagggtggtcttgctgtaatccaggatattatttacattttaaacatctttcatttctggattaagttctgccactttaggggtatcctccactctactcaaaaggccgttagccagtatattttgtgggggacagagggaggagagggaacagataaactcatggagctatggaaagtgtttggttaactttaattttccctcatgttccaaatcggggcaacttaatctattcctgcagcttattttcttgttctttcaattagtgagctgcctacccatacttaacctgttcttaaagtttccaatatccagctataagaaatcttttggagcaaaacaacagagaatggtctatgagaattattcattcatctgtttagccattcagcaatatttattgagtgcccactatgtgccaggcactgttctaggtgctgcagctataggactaaataaaatagattctttagaagaagacattcatccacagtaaatgtctgcctctccaatttaaagagcctgcatttgatagcttgatgtgtctgtaggcactttactggcattcagaagattaaggagcagtatgcttttcctgaaacaatatctttcatttctatcttttcctcttttttgaagatttgaaaatctttcat

SEQ ID NO: 127373 - DNA, 1020 bp, Homo sapiens
cctggccaacatggtaaaaccctgtctctactaaaaatacaaaaattagtcgggtgtggtggcgtgtgtctgtaatcccagttacctgggaggctgaggcaggagaatcactggaacctgggaggcggagggtgcagtaagcagagatcgcaccactgcactccagcctgggcgacagagtgagcttccgtctcaaaaaaataaaaataaaatacaaaacacacacacaaaccaaagattttctcctggtaaaggcagagaataggttgtcttgacttggcatacctcacaatttaggaaaccctctgtctaaaataaaataccctcgtgatttaggcaacttttgttcattgaaacttgactgcttaatggtttttttcttcttcttgattttatagaggtcattgaaagccgcagtgagtttaaagcagatgttatctgatttgatattttaggagggggttcctgaggagactgatgactttggggagtttcgcatgagggtatcagacctggtaaaggacttgattttcttgatagggtctatggagtgttttgctcaggtaagcctatttggagattgtttccagttttactagtcaccttaattgtattcacttctgtgtcttctgtgaatgttccatcttatttcttcaattttagtggctgaatgagataatagatatgcaagtgcctagcacactgcctggcatatagtagctatgtttatttaacattttacaagtcagttgcagtttatggatgattcggttatggtttactctgtatgcttgcactgattgctgttccacttgtacagctggaatagaagatcatagataagcattaaagcctctaggatacttatagggaatttggacctagccaggaacaataggcaagtgtttctgctttagtaattacgtaccaactcctggtaactcttgtagttatttggcattatctttgtccacacttatggttagattcctgtgcagtttcgtcccagaggtgactatg

SEQ ID NO: 127374 - DNA, 1765 bp, Homo sapiens
ttgtctcatggaaggctatgacttgactgttacacatttaaagtacatgttcagaaagaggctataattgaaagaaagaaagaggctctaattgttttcctattacatttatccatcactatcttcaaaggattggttccaggaccacccactacccctgcccctctgtgcacagtttccaagagatgcagatgcccaagtcccttatataaaatggtgcagtatttgcatataacctatccacatcttcccatatactctaaatcacctgtaaattacttataatacctaatacaatgtaaatgctatgtaaatagttgctatagggtaatttttaaatttgtgtttttcattgtattattatttacttatattttgaatattttctatcgatggttgattgaaccctagggtgtgcagggccaactgtagatcactccttagtgatcatacttcttgcttccctattcctgctacctccccagcaacaggataagacctcgtctaacctacatgaagctgcttcggactgtgtatgctcagctctctatgccattgagaatgtggagactaacttgccattagccatgcaactttttcagggagtgctgacattggagactgcctatcatatggccgtggcacgtgaagatttagacaagtgagtaattgtttaagtctggagccctgggtttacctacagtctggtcattcttttaagtcactttttattattcgtctgtcatttgtgattctcagtgattctgtaaagtacagatagtgcttcctaaagatgctctactatgctcttctgaacctagagtggcaaattgggtgcagggtttgtagaattaccatagaaaggtaaggctttaaaagttggagacaaattttaaaatatcaagtgtgatttgatgggagtttttattcaaatgttttaataattgagaatttgaactgacaagtcacttgcgtaggagtgtacgatctaggtaaaggtgtctgtcatggggattgtgatacagcatagtaaataatcactagatgtcccttagactgaggaaccttttatttatttgattaactgtgcctgtatatacttataatatccagatttctgactcattgttctcattcccctgtcttctacagagttctgaattactgccgtattttcactgaactatgtgaaacttttcttgaaaaaattgtttgtactccaggccaaggtcttggggaccttcgaactctggagctgctgcttatctgtgcaggccatcctcaatatgaggtagtgtttatgctattcaaaggccattattctccaagttgtgtgctgcatattatctatatttcattacctcgtgcccaaatttttattgttgagaaattacagtcttgtttttaattaatgtgatttcatctgttttggaattttttaaaaaaattatatttgggtttctgcattgtgtccatttctgttttcttacctggttggctgggctgttgtaggcccctcaaggaactcgttagaaagcaagcctttccaatgaaccccttgtctagcttgacttattctctagagtgttacagctaaaaaacaccaaattctaactatacctccacaagtcttaacacccccaatttttctccaaatgatggatgagaatgacaaagggattgaaaggacttaagggtctctgtcattcagaatccttgacatcctacttaccgaggtttgctagattttttaaaatctcattta

SEQ ID NO: 127375 - DNA, 1045 bp, Homo sapiens
ggggaaggtgaaggggaagcagacacatgttcacacggccggcaggagagagaaggaggggggtggtgctacacactttgaaacaaccagatctcgtgagaactctatcacaagaacagcaagggggatgttcattcccatgattcagtcacctcccaccagaaccctcctctaacactggggattacaatttgacatgaaatttgggtggggacacagaacgaaaccatttcggggattaagtagataagttgtatttagaacagtggtgcctagctggatgcagtggcacatgcctgtagtcctgcctgggcaatgtagcaagaccctctctcttaaaaggaaaaaaaaaaaacagtgacacttaaacttaaaaagcacttttaaccgttggctgttttattgccatctttctcattattatacttgtaaggtgattgaaataatggtttaaatatatagattaacattattcattttaagtttttttctctattcagatgacctgtgtagaaaaagcaggaacagatgagaaaatgcttatgaaggtttttcgctgtttgggaagttggtttaacttgggagttttggacagtaacttcatggctaacaataaattactagcactcctttttgaggttttggtaagtaatgaccttatttatcaaagtatttctgccaatcacttttcgtaactaacctgctgggacataaaaacgtttttaaatttttgcacagtaactggaaggcgtgtattaagaatgcagcaatgttccttccttgctacgaggtaccaaattagaagtatcagttttaatactcctaataggatatagttatgtttaagaggaaaacagtcttatatgttgatacatgatttacatattaaaatccaaataaccattggtatctttttccttgttttaaaaatataaaattatgtatttcaataatggtcattgaatcctagacatttccatgatataattatgtgtgcatcacaagtttaggaaaaaacagaacaggaagaattaaaaattatgtt

SEQ ID NO: 127376 - DNA, 1597 bp, Homo sapiens
atccttctgcctcagtctcccgagtagctgggattacagatgcataccaccatgcctggctgattaaaaaattttgaatgtagaaacggtctccctgtgatgcccaggctggtctcgaacttgtggactcgtgatcctcctgccttggcctcccaaagtgctgggatcataagcatgagccaccacaactggcccttaaccctgtattttataagcaaccactattaacaattggctatgtagagtttcctttatgcattttaaaataaataagtgcatatatattttaatgtacatatacctatatatttgttcacccatattcaatatgtttcatacatgtttttcacttactacattatggactttttttcatgttaggacatatagatatcatgttcattataatggctatgtttcattgaataactgtgtcctttttttaatcttaactaattatggaggacatttatgtttgtatcttttttctcccccttaacagtggtgggaatgttgcttttgttgttgtgagttactctgatggctgttatcttatgtgattgtgtattttctggctataaataacatatctccacttttttcttttgcagatacagcaatgatgtgacttctttgccttttttgctggagatccttacagtgttacctgaagaagtacatagtcgttccttacgaattggagctaatcggcgcacagaaattatagaagatttggccttctactctagtacagtagtatctctattggtgagtaagtttgaaatactaagttgctgcataaaggcagaaagccatggcggttattttgtaatcaattgcattattgtgaaatagctttctttgcaaaatttaatgatgatgctttggtatttatgtaacaccttaccatgacaacatactttcagaaactatgctttttaagtttctgtataatcctctaaaggtgacgttatctcttttatgaatgaaaaatggactttagagttacacaactgttaattcagaattggaactaaggccatctcattatttatcttgtgctcttctactgcttaatgctccaaactgttggctgttaataaaggatcatgcaaagggaagtgtgtataaatctactttactaagaaaggatcctttctttttttttctaattgatacatgatagttgtacatatttatggggttacatgtattacttttattttttgaagcagggtctctgtctcctaggctgtagtgcagtggcatgatctcagcttactgcaccctcctcctcctgggctcaagtgatcctctcacctcagcctcctgagtagctgggactacaggtgtgcgccaccatgcccagctaaattttttattttttgtagagatggtgtctctccatgttgcctaggctggcctcgaactcctgacctcaagtgatccacctgccttggcctcccgaagtgctgggattacaggcgtgagccactgtgcccagtgacatgtattatttttgtccaagtatgtaatatgtgatgatcagatcaaatcaggtgatgatcaaattgagatatccatcacctcaaacctt

SEQ ID NO: 127377 - DNA, 1754 bp, Homo sapiens
atatattaaaacagcttctggattcaattcttagagtgaacaaagctttattttaagcaagaaaagagaagaaacatgcagccatagattaggattggaaattatacagtgacattttagtttagtggagacttttgggacatttttcttcatactcttgacacccacacagtcattcaaatcaacaagattgtatctactaatttaactgatagctctcatgccttcctagaatgagtcagattttaggtaattattttgttgaacagggcctataacaatgtatattgaactgttggctgaattactgggtaatttagcttgtcagatttttctttctttatactttgggctaaatatgtttatataagtattgaggttatgtcattaaaattagaaaagtagtcttctttaagacatctttgtctaatacgctttcaggttcatgcatgggagatctcagaccagttgttacagatccggcaggatgtggagtcatgctattttgctgcacagaccatgaaaatgaagattcagacctcattttatgagctccccacagactctcatgcctctttacgggactcattgctaacccatatccagaacttgaaagacttgtcacctgttattgtaacgcaggtaaatcctgtgcttctcattagagaaatttgtatggccatttggatttatcaggattgttttaattcgtattgctaggccatgtgaggtaatgttaacttcattacagatgtactgctatgttcttgtaagtggatagaaaacgaaattgttaatcttttgtattaatcttggagttcatttggtttcaaactaacttgataccagaagtggataaggtgagtatgtgttttcacaggcatgctaggtcagaggtttaggtagttgccttttaagaaatcctttcagggctgattggctttagtaaaggtctcatgaatgaaacgttgaactagagcatctgtcctttcccccttggacagggaaatacattagataggaaaactggaaacttctgtgagtacgtactcacatgtgttctctgcctggcatagaagtgcccttaaagaggaggcttttcttaagtcttcaagatgacaaatgcaaagagaagggaaatggcaatccattacttgagaactgagtcaaaggtctgactttattagtagctttgacctttggcatagtataatttatatgtctgtgaagttctgtggtattgccaaataaaagtaaatattgatatattttgaggaatgtctatagtctgttgtttctgacttcttttcttttctttttttttagtttttaaaggttaactcttaaatttcagcaatttgtagctaacccaaaaaagtttacatcagatgtatagaattggaggttgggagaaatgggggaagggggttagtcttagttgtcatattgtttggaagaaatgtttctttgcttcccaattaatatttattgtgaccctatttctgttcatctgtcttcatttatttaatctctcttattcagctggctttagcaatagcagatcttgccctacagatgccttcctggaagggatgtgtgcaaacactggtggaaaagtaagtaatttgtattgactctatattagcatttggaattgccattaacctacacagagaaatttgttagcaatagctagatatttgactatttccctgaactcttaacatagaattatgttattaacctttgttaga

SEQ ID NO: 127378 - DNA, 1069 bp, Homo sapiens
tgaaaaccaaagatctttctcccagagagtgtaccaatgtagctgtgtcatccagtgtagtagccaccagtctagtgtgactatttaaacttaaaattaagtaaaagttaaaatcagtttcttttttttttttttttttttttgagacggagtctcactctgtcactcaggctggagtgcagtggtgcaatcttggctcactgcaacctccacctcccgggttcaagcaattctgcctcaggctcccgagtaactgggattacaggtgcatgccaccatgcctggctaattttttgtattgttagtggagatggggtttcactgtgttagccagaatggtctcaatctcctgatctcgtgatccacccacctcagcctcccagagtgctgggattacaggcatgagccactgcgcccggcctaaaatcagtttcttatttgcacttacccacattccaagtactgtacggtacaaatatagaacatttcatgtctttgaagtattggagtctatgtttgtgattttgtgacagtatttctgttgccatggtagtctgttatgtggtggcatttctccatattttgattagtttcttgtcttgccaggccttgggccaaagttgatagtttgatttaggatgtaaaattatcagggtactactatattttctaattacaatagtttttccaaagtttttcagatatttcttcagcattcttttacagtgattgattgcactgatgtttatggaggaaatggaaagtaggttttatagatttttttttttttgtggcaaaacattcaaaacataaatttagcattttaacgttttttttttttctgagacagggtcttgttctgttgcccaggttggagtgcagtggtgcgatcatagctcactgcagccttaaactcccaggctcaagctatcttgcctcctcagcctcccaagtagctgggattacaggcatgagctaccgtgcccagtcattttaaccatttttaagtgtgcagttcagtggtattacatacattgacattgttgtgcaaccatcaccatcatccatc

SEQ ID NO: 127379 - DNA, 3048 bp, Homo sapiens
tctcggcgctaatgtcccaagctgctagcgaggaacagagagaacaccggctcttcttcccggctcctggcccggcagggttacttccgggagggggcggggagacaagaggaggcgtgccgggaaggaggccgtttgtagtgtaccaggcggaagtgtgccaaaggtatcggtgctgtcgcttccggtccgggtaaacgaaccttaggtacactggtgtgtggcctcccaagataggcttctgagggcaagtcagcgactgaagacgggagcgccagaatctgtggactcaagagtctagaatcaagtggaaaaaccggaaaaaaggccaggaacctgaatacgacctaatagctgtttccgagggggcaacttccacggagagccttctgccctggtaacggccaaagaggaggagatggcgccagtcagggagcggccgtggcccagacagtgaggaagcgcgaaggcggagcaaccgaggaatcctccggagaagaatcagagccgtcgctaccgccactaccgccaccaccatggaaggagcaaagccgacattgcagctcgtgtaccaggcagtgcaggcgctttaccacgacccagatcccagcggaaaggagcgcgcctctttttggcttggggagctgcagcgttcggtgaggggcccagagaggcagttctgtgccgcacggccggggcggggtggaacctaggctccgggggagaacctgagcccggcagttgacctcgtgaggtcctccttggggaggagctgctgtcgtggggtggggctgcgaagctacatctttgccgcttttgggaaactagtcgcacctgatcggtcgcgaactggccctttccccacccggcagaatctgatttgtaggtcttatactcttcgattgtggcatcaatctaatcttgtttaagttctccctttgccgttgcttcttgggccgtgcttttccgttttgtcttcctcccaccaaatccaaccccagtgtttctccaccttccgcttaagaaggctttattcgtctcccctccgtgtccaagacttgcatctggcattttgctcccagtcgtagccttatgcctcactctttttgcctattttcactccagtttgagtctgttcttctcgaaacttctcaggtttctagattcttactcatgcgagttttccccttgctttggagtggcaacataatatgaagaaaaaacagtaattctgctttcagaaaatctttggagttctcattttgtttcatattaatcctctaaccttgttatttctctggcttttagatttttatttataagatgggtatcactgctgctttgattattccatataaaactgtgtgtgcatccggtgagatatttaattgtagcttatatctgttgtatttctgcattctttgattcatgttttatgcttcctgccctaattttcacacctttgctgtgcttcatttctgtgtaaatgtgtattcttggttatctggctgacttaggttctaatgtaggatgtactttaaaaattaagtactttgaaaactaaagaggctttttttacaggctgacaaaatactcacctttacctttatttttgcattttatactcacaaccatattttttttggcccccttccctttattttaactcataactgatacttaaaggtgctctgccttattaaatcagctcctaggctgcaagtgcataatatttaaaaatttgcaactttgactttttaaaaatctggtcttggtatggagcaactttgccttttttttttttttttttttgagacagagtctcgctttgtcgcccaggctggagtgcagtggtcccatctcagctcactgcaacctcctcctcccgggttcaagagattctcctgcctcagcctcccgagtagctgggattacaggtgcctgccctgacacccgactaatttttttttttttttcttgagacagagtctggctctgttgcccaggctggaggagtgcagtggtgctatctcggcacactgcaacctcctcctcccaggttcaagtgattctcctgtctcagcctcctgagtagctgggattacaggcacacgccaccacacccagctaatttttgtattttttagtagaaacggggtttcgccatgttggccaggctggtctctaactccgacctcaggtgatccgcccgcctcggcctcccaaagtgctgggattatagatgtgagccatcgccccccgctgcaactttgactttgaatattaaacctaaaaaactggcacccaagtcctcttcagaaaataaaggaatacgactcactgtaggctacacaagaaaatcattcacatatggtctcatttagtgtttctgtgatctctggagagtcaacaattccctgatctttgtatagttttctaaagtgtaattaggagaagtgctacactatactaaaaaagtaatctctttctaattaaacctgcttgttgtgtgtattttaaatcaatatttgagtgcttaccatgtgccagcaactatgctgggtgtttggatttggaaatgaaccagacaaaaatctctgcttaccacagaaggtagttgtgattaaatgagttaatattctacgaagaggttagaaaagttcttggaacatagagattaaaatgttagcaattgttatttaagtattagtcacttttctctccttactttccaatactctattacaaccttacatcatcttcaccatcacagttaatagtcagagtccagacaggaacagatggcacacttgacaggataatctgagtttattttataaagatactattataaagatttaggtatagtggtgtgacaagaaatagtttggtaacctatagctgaacggttaacatcccataaaagagggaatagttacttgaaaagtatggagttggctgccttgagaggaatggtgactttcagccgaagggacatagctagtttcaggtgaccttgagagaatgaagctggaggaatgaatatcc

SEQ ID NO: 127380 - DNA, 1220 bp, Homo sapiens
cgccccgccacggtgctctccgcaggggtgaggcaggagggtgggtggaggcgccagcctgtcctcagctggaagggcggggcgtggacagggacggtgggcaggtcaccagcgggacgcggggagcctggccactgttacacggcggtgcgcgtgggtgtgccgggctggttcagccccagggttttacacaactagcaggcaaaatccgcttctttcacctcggaccgcttgatgaaggcgtggtttgtgagcatctttaggtccgcccgctccgttgggtttttgatgaggcatttattgacaaactcctggaagtcgggggtgaacacaccgttgggcagcttaggaggcggctctttcacaatatagtccagcagttcgaagatggccatggcgggcaggctgtccatcccgtaaccgctgttggggcgcccgggggaccctggccaagaggagatgctgtgaggctctccttcttccctgtcgaccacgggctggccaaagatggcctccagctccttggcgtcgggcggggggatggggtacctttcgatggccagctccaccagggacaggtccatgctccagatgaccgactgcaccgagtaatgtgtgccctgcaaccgctccggagccatgtaggagcgcgtgcccacgaaggagttggccatggagtcgatgagctggccgctcaccccgaagtcacacagcttgatctcccctctagagttcacgaggatgttggagggcttcacatttcggtgcatgatctggtgcttctctcggaggtacgccaagccccggagaaccgcaatgctgactttccccaggatgtcctcgggaatcctcttggcctctttcagcccctggtccagggagccgccatccatgtgctccatgcagatgctgatctccctgtcacagtagaaggccccgtagaagcccacgatgtacggtgagttgcactcgtgcaggacctggtgctcgcggatgatctggttccggatggccggcttgatctcaaggtggatcagcttcctggccatgatgaggcccgagggtctgtgctggactttggtgaccaccccgccgttgcccgcgtccagctctgaggtcctttcgaagtcatcgtctttgagttcgccgaccttggctttctgggtgagaaaggcttccagccgcttctgctgctcgtcaagttccagctcctccagctt

SEQ ID NO: 127381 - DNA, 1025 bp, Homo sapiens
ttgagcagctgcagcctggatgctttcccttaggggtaggggagaggcagaaccgctgaccctttaacaagttatccctcacagaacaggtgtctcccccgactctcggtggagagggatggctggatacttagtgacatcagccacgagccaatgggaagtcgggctcctgcacggcgcggctcggctcatgcccccgggcgcggggcacacaggccggccggcagccgctgggaaataggcccccgggggcggtggcggcggcggggccatggcgcggagaccccgggcgccggccgcctccggggaggagttctccttcgtcagcccgctggtgaaatacctgctcttcttcttcaacatgctcttctgggtgagtctcggggtcgagggcacctgggcggcggggtccccccgcggggtggaagggtggcccggggtgccccacgcgcgggagccgcactgccgagttttctgggctgacggcactttgggggaatttatcctggggagggacaccccggggacgccgcgtctgcagggggcgttgtagggaggagggtatgccagggaatcagtaaagactgatgggtattctcggggcgtcggaggagggtctgtgttaggctagaaatgtgggtttgagggagcctgttggcccaaggcggacccactgacacattcatgatgggggtcgggggtggcggctgactttcaggcctgggggcctggaggcccggctggcaaagaaagaagaggaaggaaaaacccaaacctctctctccaccacctcagagaggatgggttactggcatcatctcttccttttgcaggcctcatctacccccacctccacccccccaaagtctaggaagaatggcctccaggtgcagatgtctttcccatcccagcactgccccaaactttgtcccctccctgccacccttctcaggaccagacttcacccctggagcctggcaatcaccagtgtctttaaacaggaccccgtgttgggccggagggcc

SEQ ID NO: 127382 - DNA, 1218 bp, Homo sapiens
ctccggggccacaggctgaaagctctttggcttcatccagatataagggtagggaggactgagaaaccagaggtggagaccactgccttgcccacttccctctgggcagggacagggttttgattgccacacagggaaccactttaccctcagctgtctccaccatcaccttcaaaacaggagggaaagagattctaaggagggggtgcgggccctgagacagtggggctccactgcttcttgcagcctggactttggactatggaagacagacaaggctagggctttccctggaggctacgcctgctggtggccccactgtggcaacgccatgccttcccttttcagagtgctgttccagagacttccctctgagccacctcctgggccctgctggcaccctgtccccgccgccagctgcaatcttccttcccctgcctgaaaaccagcccatttggagattatcagctgctcccccaagggaaccacaagcagctgcttcccatctcccatgatggctgatgtgaataggcaaaatcctgggggtactgggaggcagagataggaaggcagccaagtggccaagctcataaggctttggggacatccagacctaggttccattcccacttcagccgctcactagccatgtgaactgaggaaagttgctggaattctctgaacatcagctctataaaatggagatcctaatgccctcttgggtttgtggtcagaattaaatgagacagtgtttagcccagcgcctggtccttagcactcaacaaaaagtactgccactgctgtccctgtaaatgctcctagaggtcacctgctgggggtgggcgtggagagtgaggctgagcgctcctccagggaggaggaaagagagtggcaagcagacagggactggctagggaagggccagcctttgctcaaccctctttgctcacattctcaccataacaaaggaaaaccaaaaacaaaggaagaaaatcaaagagaaaagaaaaaaagctaagcaggagacaatcattattggtagctttatattttttagtttatggagatacttcctatatatcccatgaacagagctccactgttgtctcctgggcttccctagctctgcttctcaaggcttgtcacaccaccttggccttttaaaacttttatttacgtatttatttgtttatttgtttgtttgtttagacatggtgt

SEQ ID NO: 127383 - DNA, 1047 bp, Homo sapiens
ccatcccagccctcagcattgtgccagagtgatacccttaagtgtttgggtttatgttttcagttttgtttgggaaacagcagttgcacagagagttgggggtactgctgctgccttttcaccgaggcactgccaccaccagctctagcagggatgctcctgagcttggcggacatacttagatcctaacgtgccagtgagacctggctgtggagagtagcactggcagccctgcctggactccacttggcatgataccagctccagaagggaagggagtggagcaggcagtgaggagagagcctgggggtcggctggggacagccgtatgtgctaggtaggagtggagggagatatgtttaccaaatgcctgtcctgccatcctcccaggtagtcagagtgagctacatcctgccccgccttcatttccatggaaacatggcagctaggacacggggtacaacagcagccaaattcttccccacctcccttacttcgaaaaaaagtttggaaccctggtccctatactctgcagtcagaagtgggactgagccatacatgcccttgaattcctccctgtctggccctccctctccagcaagcagggttttctttaacttggcagtgtgcagaggagaagtggtaacacccccaccccattcccctgcatcggagctcagtattcctacagggtaagaggtaggaatcttgctgggacgaggggagccagaagtggcaataaaagcgtgttgacctgggctacgcgggactccatgaattttccattctggcaactggaaggggaggtgtagaagggccctgcagaggacggcactggagactctcctaaacgccacacacctcccccttgctgcccgccacacgcgcgtctccttcaaccgatgcattgccaccctcccacagcctcgccctctgctctaaattaggtcgaaagagtcccagttccaatctaggaacagcataattttgttccaaaacctgatctgtgtttttctaattaaaattaatttgtcacccaaaacagga

SEQ ID NO: 127384 - DNA, 1226 bp, Homo sapiens
aagtataagagttgcagtagaactggatcaaagcgtgtgaggggtggaattgtgagagataagacctaaagaattagaaaataaagggatttatacctcatattaagtttggatgttatccaggggatgataaggagccattgaaagattttaagcaagggagagatgtaattgtctttgcattttagctggatctctttgggtatggtgtgaagaagccataggagcagggaaagcctggagcctggcttcttgaccaggggatgttgaagtagcccaagtaagagacgatggcggttgggactgggtagcaggacagagggagtgggcagatcccactaactttcagaggtagtgctcatagggcactgatgagttagatgtggagcctcagtgagcaggaggcctcgggtttcaggcttggatggaaggtggtgccattccctttcactaagatagagaatgctagaggaagaagaagtttaggcaggaggtgtggctttgattttggccgtgtgaattagagatgctcattggacatctatgtggagattctcagcagatctggaaataggaattgctggagagaggtggccactgtgtgcttccttggccctgactactgaggctttggaaggatgccattgactgaggaagtttatagctcaggttggtccaatttctaggtctgtatagacctcaggtctttcctctgtctttcatctctctggcctcaggcttcttcagtcacttagcatctctcccctttacagctggaaatgcctcctcccgggcattccaagctgaccagacaaacataatgtccaggccgtggtccaccttaggccaaacctggtttagtaagtggggcaaaaaagcagagaggcctgcagctggcagtggcgataggtccctgagagccagcacgtagcctccttaaccactgctgtgctctgtgtggtacataagtgtgtggccctgtcaccttgcccacttgcaggtaagtaggagagagacaaaggctgggaggaatttcttgtttgcctctcacacattgaattgagggctgagaggaggaatgtttttggtgatggtgggttattttcagggacggatcaggaagaatttccttagagctatttccaaacttggctggtaatcagagtcagttaaaaagatatatatggccgggcgcggtggctcacgcctgcaatcccagcactttg

SEQ ID NO: 127385 - DNA, 1032 bp, Homo sapiens
atattttattaaaataaaagaagtaaaataatactgataaagctgatatcccctctctttctcgtttcagtttcatatccttcttttctctttggaaagcttccccatcctagtaatttgtgtatttctttattttgtttttaagctcaagttttgtttttgtttttgtttttgtttttttgtagagatggggtttggccatattgcccaggttggtctcgaactcctgaacttaagtgatccacccaccttgggcctcccaaaatgctaggattataggcgtgagccaccatgtccagccttaagcttaattacttttaaaaaataggttatacatgtacatggcacagaattcaaaaggaacaagttaagtcctacttctgcatctagctacccatttttcctctgcagaagtaaccaccaacactggtttttgtgtccttttggaaatatccaacatctgtccagatgtagatgtgctctcagtctctcctctaccgcccaaccagtaccatgctctatagactgctctccactcaactgagtccatgtaacatgacaacattggacatcattccatttcaatgcacatcctgtcatgcaccccagaaggagattttggttaacaatggaccacatgtgatggtgttcccttaagattataataccacatttttactgtagcctttcaatgtttagatatgtttagatacactgatactcaccgttgtgttacagttgcctgcagtattcagtatagcaacatgctgtacaggtttgcagcctagaagccataggttatactgtatcagctaggtgtgcagtaggctataccatccaggtttgtgtaagtacactctgatgttcacacaaagatgacattgcctgatgacacatttcacagaagatatcctcattgttaagcaacatgtgactatatctcaaccctgaatagtgttctattataatggtgtacattattttacttggttggtctcctattgatggatatggattcaagctgtttctact

SEQ ID NO: 127386 - DNA, 1066 bp, Homo sapiens
agtacctatgtactcagaatttctggtgactgtttttgggttttttgttttttatttttttgtttttgaggcagagtctcattcttttgcccaggctggagtgcagtggcgccatctcagcccaccgcaacctccacctcctaggttcaagcaattctgttgcctcagcctcccgagtagctgggattacaggcatgtaccaccacgaccggctaatttttgtatttttagtagagacggggtttcaccttgttggccaggctggtcttgaactcctagcctcaggtgatctgcccgcctttgcctcccaaagtgctgggattacaggtgtgagccactgcgcctggccaactggtgactgaattgagtcaagtgggaactgttgcctgaggacattgcttcttaactggcaggaacttgctctgcaccctggaatatactctgaaggctgggagcagtcagaggcctcagacaaataatcataagagttaacatttcctgagcgcttactacatgacaggtactgtgccaagggcatttaaagcattatatcacttttcacagcagttccatgaggtaaatctatcatccccattttacagatgaggcaactgaggctaaagataaagtactttgcccaagatcatacagccaggaaagagtggagccaagatttggacccaggctgggcagttgccatgcacatgccccttacctctctactatgttgccttcccccgaaaagagtggttacctgtctctaccacccccagcctggaaatgtgaccggcacccatgttggctctcacatcctcatattctctcctaatgcaacttcttgcttgggaaatagatattgctgaagcagggttgattcaggaagggcttctgtgatgggcagggcggaggactaggctggggacgggtgctgggagattgccgcctgtttctgtcttgctgacaacatttttcccctctccgcactggacagagcctcttctgttcctctccatctgacttcctgcttcctcctctggctttggagtgcctggctcctctgactacc

SEQ ID NO: 127387 - DNA, 1094 bp, Homo sapiens
cgctcttcaccctggtcagccgcgggagggcaggcccggggggccctcagcctggaacgtgggaagagagccagagggaaggggggcaaagaggtcttggtgggggtccccagggaagggtcatgatcagaagggtctggggctcagttaagggtgtctgtgtcagcagaataaccctaacctcacagaatggcccacttctctcttctaggccacattcgtggctgactggcggaactcgaatcgctaccctgctgttattctcttctacgtcaatgcgtgcttctttgtgggcagcattggctggctggcccagttcatggatggtgcccgccgagagatcgtctgccgtgcagatggcaccatgaggcttggggagcccacgtaggtgtcttggggacccagaggtgaaggtacagggaggaaggctgaagtgtgcgtttaccccaaagggagcaggtgcgtgtaaaaccgagatccagggcaggatctggctctgccctactgcatactgcatgcaagatctccagtgttaggatcttagtttcagaatcaggaccttcatggtttgtatctgctcaaaggggcggctcctagagcctcctcagatctgacctgggtcctgtctccaagccctgacttctgggaacctccagacctcagcagctgagggtctgggcacagggtggggagaccaggtagagggagtacagagtgaccgcctcaagtgacacctcacctctctgcacagctccaatgagactctgtcctgcgtcatcatctttgtcatcgtgtactacgccctgatggctggtgtggtttggtttgtggtcctcacctatgcctggcacacttccttcaaagccctgggcaccacctaccagcctctctcgggcaagacctcctacttccacctgctcacctggtcactcccctttgtcctcactgtggcaatccttgctgtggcgcaggtatagtgactggtaggaacgggagacctggatggggtgagtttgagggagggggccagtaacccaccttctgtcccaccccttcctgctgcaggtggatggggactctgtgagtgggatttg

SEQ ID NO: 127388 - DNA, 2181 bp, Homo sapiens
cggcagtgctgggagctggagccaaggccataaagacacccacctccacccaccgggcagcagggatttgccaggtccctgctgcagacagcagattcaatggatggtgtctgggtgcataaggcatcagtctccgtagtttctcaaacgtggcaaacaaccttcgcatcccttctcacctctgcccttccctctccacccccttggttgcccagctggtgcatgtgtgactgttaagcagccagttcagcttcgtcttctctgactgacactaagttgccctctaattctgtgtgctctcctgcagagcctgctttagatcctggcacaggactagttacctctctgtgataggttaatgacctgctaatgttggctagtttttgcctgtgcttttttgtgtcataatgaggatggattggagagagtaagacattgctactgctgagagaagcgcagtacccactgttacaaggacagtcgctaaaatggatgctagtccaagccctgactgcttcaggctcttccgtaaaggttccggcttccagtctgggatgctttaaaccacagtgatgcctgagtctctgccccagagattcaatttaattgtctagggtgggtcccaggcatcagtagctattaaaagctccccagttgattctaatgagcacccagggttgagatcagtgctgtggagcttagccctttctaaagtttttggattgattgtctgagtctacccagtagactcagaaaaccccacctgtagtcccagctacttgggaggctgaagcaggagattgcctgagcccaggagttggaagctgcagtgggttgtgatcacgccaccgcactctagcctgggtgacagagcaagatcctatctcaaaaaaagagagaggaaaagaaaggaaagcctcacctgtctacgttccctcactgtagatgtcaggccaatgtgaccatcgggctgcccaccaagcagcccatccctgactgtgagatcaagaatcgcccgagccttctggtggagaagatcaacctgtttgccatgtttggaactggcatcgccatgagcacctgggtctggaccaaggccacgctgctcatctggaggcgtacctggtgcaggtgggcatggcagccagcccctcctgccctgcccgcctcaccctcagccttgggaccccatctttaggttttgtcgggtcctgcctctagcacagccttggtcagtggttcaccgctgccccctggtggcaccttctgtccttgggtggcctgatgcctgggcctgggcctgggccaagggcagagccagctgccatcaccttttaagagcggagtgattggagggctgggcacacaggagctctgcattctggccccacttctttgcagagaaggcctctactcctgagtccttgaaggacttgaggcccttgggagcctccttctctggaaagaatggcatcgctggcccttcccaagatttgatgggaagtggcagcttcttcacgctccttccctatcccttctgctctcaggttgactgggcagagtgacgatgagccaaagcggatcaagaagagcaagatgattgccaaggccttctctaagcggcacgagctcctgcagaacccaggccaggagctgtccttcagcatgcacactgtgtcccacgacgggcccgtgggtgagcctcacccctcctctaccggagccgcctggccccgcgctgcccatgtgctagtctctcccagcctgctgggggcacacagattatttggaagaccgactgtgaggagcaaggcgctccctccatcgctcacacacccattcttcccccggcccctcctaccctctggggggctctcccctctctgtttctgcccctgggtctgcttgccggtgcttgggttccaagaagactcccctccctctcccttctcataaattctccagttgctctccctgggcaagagtaagtcagggttccaagaactggatttctggcctccagttaggccctttggggacgtgaggcccttctcttcagattctgaaggggtagagatcaccgtggttacagggtgagctttctctggtgagcaggagggactggctgtgggaagatgaatggcactgactatgggaggcactgccagggaccgggaagtc

SEQ ID NO: 127389 - DNA, 1130 bp, Homo sapiens
gtctagagacctgggccccagaactaacaggttaagtgctcccaggggagcgggggtggcatggacagagccagggccccaggctcgtgttgtctctcctcctgtcagtgcccccagaggaacaagccaacctgtggctggttgaggcagagatctccccagagctgcagaagcgcctgggccggaagaagaagaggaggaagaggaagaaggaggtgtgcccgctggcgccgccccctgagcttcacccccctgcccctgcccccagtaccattcctcgactgcctcagctgccccggcagaaatgcctggtggctgcaggtgcctggggagctggggactcttgccgacagggagcgtggaccctggtctccaacccattctgcccagagcccagtccccctcaggatccatttctgcccagtgcaccggcccccgtggcatgggctcatggccgccgacagggcctggggcctattcactcccgcaccaacctgatggacacagaactcatggatgcagactcggacttctgagcctgcagagcaggacctgggacaggaaagagaggaaccaataccttcaaggctcttcttcctcaccgagcatgcttccctaggatcccgtcttccagagaacctgtgggctgactgccctccgaagagagttctggatgtctggctcaaagcagcaggactgtgggaaagagcctaacatctccatggggaggcctcaccccagggacagggccctggagctcagggtccttgtttctgccctgccagctgcagcctggttggcagcatctgctccatcggggcagggggtatgcagagcttgtggtggggcaggaacggtggaggcagaggtgacagttcccagagtgggctttggtggccagggaggcagcctagcctatgtctggcagatgagggctggctgccgttttctgggctgatgggtgccctttcctggcagtctcagtccaaaagtgttgactgtgtcattagtcctttgtctaagtagggccagggcaccgtattcctctcccaggtgtttgtggggctggaaggacctgctcccacaggggccatgtcctctcttaataggtggcactaccccaaacccat

SEQ ID NO: 127390 - DNA, 1487 bp, Homo sapiens
cccggtccccggcccgggctcggggcccgccgccgctctcagccccgccgccgggaaggtgcctcaggcgtcggccatgaagcggagcgacccacatcaccagcaccagcggcaccgcgacggcggcgaggccctggtcagccccgacggcaccgtcaccgaggcgccgcgcacagtcaagaaggtactggggccgggctgcctctctaggagaggaagggaggggaggggaactgcagatcctctcggcacggcggcaccaccctccacgccctcctttctgatcgcaggaccggagataccccttgtccccttaaacccactctctcagagatgccccccagccggcccctcgtgctgggagcggagactccaggaggcacggccgtacttcgctctgaataacatggaggtagcgctctcccctactacttggaataggcagcgggaggagagacacctaatagtacgtcccgcggccccaacacgctcccgggtgtgattttccagcctatcggggaagagacctcgatagtatagaaaaaccttaccgctcacgggagttcacacagcaataaggatgaaaagatctttaatacttggagaacgagtaaggtgtagtcaccttgcatagaaatcgtcagagttgtctggtttccatacagttgatgactttctgcctttctgtggccaaccgtggccatacagcaacacgatgctgtgcccttcatttccagcgactgcgatattctctcttccctgaatatgtaaaagggtaatggagagattctcctcactctttcgtgttaagagctttgtcctccctgctgggtatagttggtcaccaggattattaggctgtgtatgaagagaatgaatgtcttattgattgctttattataatctgaaagtgataggaagaaatgctgctacttttgggaaagacgatctttgtggggttttcggtcttaggcgtcagcttctttcagacagttttgaggaggtctcagaataccaagaagtaactgcctaggtggatgatagccctgtattacccgtacattgtctatccatagttgtctgtctctctcaaagcttgtctttctttctctcttaaagctgaatcagcacagaaaaacagggcaagtattggaaaagacagaagtgtggatcatataaaaagggcttacagcttcaatttcgtagacacagtatgggcacagggattaatgttttttttaaattgttgtgaatggtttttaattgctttatcagaacagcaacaaagagacgggaagtgtgcattggttttactgtgtgggaccagctgaattggaaccttggatccaccataactttttgttgtcatagcgtcatgattaaggtatagcggataatcctttcatcctaacgatacaaatttaggtgataagtcagaggcaagactgaaggaatttctgtaatgctttagacaatgtctttgtcgt

SEQ ID NO: 127391 - DNA, 1028 bp, Homo sapiens
tagatgtgcttcttgaccactttccttgtcgttgaaccatcttcctgttttttcagcaccaaatgtatgttccatgattgtagatatactcagcagcctcaaggctattgtaaagcagggctgagcttgccttacaatgttaattgcaccaaaaaaacaacttctctgctgaaagttaagcaggtgaagctctgggcaaggatacagctggatgacgaaattcagggcattgctgagctgcttttcaggtgcccaatctttaaccttcttgatattgaattggctaaatcaaaataagtgcccaagactgccctttccctaagttgaaagtcatctcaccaaggaactgcagtgtgacattttgatttgttgagcctttgttgattcttagattgtctatgtaaataaccactttgaccttgactccttactgtttttcttatagcatatgaaggaactgagaatactagtattgaaatagctgcctttggctgtggaactggtgactgttgcatttgttttttaactttcatgtataaacatttattttaagtcacatttccatagatggttttccttacttcattcacatatcatcagttttcttagttttgttactctgctcagccacacaaggggaataaactttttacaagagccagaattcccaagtgcagtagttaataagaaggaacatatggtgtgcaggttactcaatcacatcttatctttggcacctgcctccgtcctgtaacttgcgatgctctgggggccagatcatgttatgtggctatgatatatttaattatagtgtcctttttcataagttgacatcaagtgaacccagcaagccaaaaatctctataagaagtaatttgggaaatgggaaggtaagttccacagggaatgaggtagtactagctgaaagggatttcttccttgtgttcttgaaaatgagtgataggagtgttggcgcacagcagggaaaacaaggcaggagaggatttatttcagaaatattaaaactt

SEQ ID NO: 127392 - DNA, 1029 bp, Homo sapiens
attttcagtagagatgaagtttctccatgttggtcaggctgctttcaaactcccgacctcaggtgacctgcctgcctcggcctcccaaagtgctgggattacagatgtgagccattagccttttatgtgccaggagttgtcataggggttctgtaatcctcacaaccatactatgagatgtaggtggcattatttccattttatagatgcagaaatgagatcctgggaggttaagtgccttgcccaaggttatacatctagaaagtgtcagaggtagaacttaaatccagggctgtccgtctccaaagcccatgtccttttcattatgccacagtgattctaacttcttagatgctgagttcttgctttctcccagaggtcttttagaatactaagtgaactctaaggcgtgtctgtctggctaaggcttaggtcatcccaagaccaaagtaaggcaggtctgagttagagctttaggaagaggatgggagaaaattgtacaaatgtagaacttgaaagaattgtaaatttagaagaggagaataaaagcatcttatacagaaaagcatttcaagatcaatgatgcagcttcacactggtaatttactgataatctgagaaatttatccatattttaaaagttataaataaatttggagtacctgaggaatataccctttcttcctgttcagctaacactttttccctattctttaagcctcaccatctctatgagtcaatctttgataagagcttttgaaaattgcaaagggaagaatattcctactgtataccaggcattgtacttagagctttacatatactgttttatttaattctttttttttttttttttttttttgagaccaagtctcgctctgtcacccaagctggagtgcagtggcgatctcggctcactgaaacctccgcctcctgggttcaagcgattctcctgtcttgccctcctgagtagctgggactacaggtgtgtgccaccacacccggctgatttttttaatttttagtaga

SEQ ID NO: 127393 - DNA, 1040 bp, Homo sapiens
gctactcaggaggctgaggcaggagaatcacttgaatgcttgaatgcgggaagtggaggttgcagtgagccgagatcatgccaccgcgcttcagcctggcgacagaatgagactctgtctcaaaaaaaagaaaaaaaaaagctgctttaggagctgaagttgcagttgtgtgtttgatgtcttgaggaagacaattactactactactactactagtactacctacattctcagtatccagttaattgaagaaatcgatagttcattaaaaagggagagtgagtttattatatcatttccttggaagtgattccctcccccacgagagaaaaaaagtttgttgtaatctttattcagaccctttgtcaagtttataaagaatatgcagtttgtttcatggtggtttttgtttaaataatttagagaggtacaactgaggcagatgggaagagaacaatcttggcagttgccctgatccactgccctgctgtcatgtttaggtggtagacacaattagaggagctgaaattccattcacccaacaagaggtttagtaaacttgatcagatttctatggaatttgtaggagctttttatagtctgaatgacctatggcctgcgatttggtgagagcagagcagaaagcggcagtggattgacgtttcttctgtaacagttcccaactctaaaattactttgattaaattagatgattatttgtatgggtttcagtctcccttttccccagctgtatcgtgcaacagttcagttagctatttccctcttggacgcttgcactaaaagctggtgattttattttctttttttttttcaagggtctatcagtagaaatctattggtttggggcacctagttcttagcttagaacctatataaaggaagggtatttgaactgctgattgagtttctctgagtataggactttagcctttctgaatgttgcaaacctgaggctaaaactagcttcatcttctctgcacacacttacattctacagtgctccaaggtgaaacttcatc

SEQ ID NO: 127394 - DNA, 1178 bp, Homo sapiens
tcaggtgatccgcctgcctcggcctcccaaagtgctgggattataggtgtgagccaatgtacctggcccagctaatttctgtgttttttgtagagatggggttttaccatgttgcccatgtgggtctcaaactcctgggctcaagcgatctgcccgcctcagcctcccaaagaggcataaaacacagtgcttggccgtgttttaaactaaatgcaaaatgccatgttgtctttaaaaatgtagtaccattttacatatcagctaacgatacacgaaacaactctttcaccatacatttaccaatactgagtatttttccatctttgggggaaagtcttttactggtctttttataatatctgcattcttctgacagaatgaggctgagagtattttcatgcatatattggcaatttatattctttttcttgtaattccctgttcatattcattaacaaattatttattgattgactactgtatgccaagtgctggggatacagcagtaaacaaaacggataaaatctctgccttcgtattggattttttttttcatgttggttttaggaattctttatatattctggatattaattatttgtgtatatgttgcaaatattttttcctactccatttcttgtttcttgtaacattgtttattattttcaaagtttttataaacttggatttaccagtttttttcctttttggcttcaacattttgtgtcttagaattgcctttccaaccccaaatttataaacaacatctgtgttttcttcacctgtttatatggttgtatttattatattttggtcttcaatccatctggaattaatttttgtttgtaatgtaaaatagggactatttgtaatatgagatagctctatttgttcccaaataaaatatattttacctttttctggtttgttctctgattgtttctttaacttgtctttcttaactatttttctttcttaactcttagtttacatgtagaagaaacttgtgattgaagactgtgcctatttattaacgcaaatatgacactaaaaattagcatcctgatactactgatttagtgtttacggtgaattattcatagaaatacttgctattttagcgattttttttttttgtttatgtagattagtttatgttttgacggaaattggagccc

SEQ ID NO: 127395 - DNA, 1657 bp, Homo sapiens
cagcactgaaattgaggtgaaacccaagaggtttcaccatgtgtcagaacctctgtggccgggcgcggtggctcacgcttgcaatcccagcactttgggaggccgaagcagcagatcacttgagctcaggagtttgaaactagcttgaccaacacagtgaaaccctgtctctactaaaaatacagaagttagtcaggcgtggtggggcgggtgcctgtaatcccagctgcttaggaggctgaggcaggaaaatcgcttgaatccaggggtggaggtggcagtgagctgagatggcaccactgcactccagcctgagcaacagagcaaaactccgtctcaaaaaaaaagaacctttgtgaggtttccttgttccagctttacaagtctagaaattcacatttttgtgcaatcagggatcatttacctgttaggactggctcagactaaccaaaatcatgggagactcatatttaaaacaaaatggtaactcttaatttacagtcatgtataacactcaagctaatctgataaacgtgtaaatcagaggatattctggaaaatctatatgggaggtctaattatagttagagacagtttattaagtttggaatcatttagatccttgctattcaaactgatccttgcttttcaaaccagaagcattggttatcacctgggagcttgtgagatatgaacaatatcaggtaactctggctctgtactagcatatatctgtcagaacctcaattttgtattcgttgttgagtagatgttggcttagcaattagtctcatttcatgtttctcatttttattaattttttttttttttttagagatgggggtcttgctttgatacccaggctggagtgcagtggtgctggagtgcaatggtgtgatcatagttcactgcagcctcaaactgctgggctcaagcagtcctcctgccttagcctcctgagtagcttgggattacaggcccaagccactgtgcccagcttcatgcttctcttttatgaaacctcagagtagaaaagcaagaaaataattttagggttttatggaaaggtggaaacttacagtaaaacctgttataagacttataacaaaatactcaatagacacaaagacatagaaaaataaacaggcacagatatatagagacagacacaccgagacccagagggagagttacacacagactccctacacacagagacacttcccccatatatacataacagaacccctgccccaccatgcccaagcctctacccagtcccttcccacacacagagaccccatacccacagagagaaccccacggctggccggacgcggtggctcacgcctgtaatcctagcactttaggaggctgaggcgggtggatcacctgaggttgagagttcgagaccagcttgaccaacatggagaaaccctgtctctactaaaaatacaaaattggtcgggcacatgcctgtaatcccagctactcgggaggctgaggcaggagaatcgcttgaacccgggaggtggaggttgcggtgagccgagatcgcgccattgcactccagcctgggcaacatgagcaaaaaaaatccgcctcaaaaaaaaaaaagaatcccatggccatctccacagagagtcttctccatggt

SEQ ID NO: 127396 - DNA, 1050 bp, Homo sapiens
cacaccctgagacccacccacacacaaaaacacgggctcccacagagagaaatacatacacagacacacacactgacatccaacaggtaatgcttaaaactaaggttttcatggagcgtgaatagtgttctccacagttattttgaggagaaggagcaagtgttctctcaaaggtacttttaactgagccagaaaatgaagcaaaaacagacgggctgccattgggtctgcagaacagtgaatgctacaaagccagtttgatttggattcctgtttctggaactgcttgttcctgggcattgttttcagtttgatgcactcagcatgcttaggtggaaagtcattctcttattttctctcaggagcttgcatcctagattgctggttaagcagagttttatgctcagtctcctttggcactaattaacacactcccttggtgctccctgagtcatataagtctgcccaggattggaagatccagaaacactgtgcccatgtggaggaactcatactgagtcctctgtgggtgcgtgggaccgaggaatgtagggggaagattatgtattagatatagaaagagatgtaattttcatttttttttaacctgtgggtcattcatggtataggtttgcgtagagagcttgatggaacttaagaatgacttaggaattatttagttgtaaattaaatgatttttaagctacattaatgtgggcaggggatggcgctttggattattttggttgagagagaacactgaaactacatagccagatttcttgtgactcgggcagcatcttctgagaattatcttgttaggaaaaagagttgacacatgcagcatgtttgtgtgtgtaaatacttgaaagtttctatcacaccaagggagccagacaccagagacatcagaatagttttataaacgttaagttccaaaaagaactattttctcttgttgcctggcacacgtatatgtattcctttgactaaacctgtttaatttcaaacaggctaggcatggtggctcatgcctgtcatcccagcact

SEQ ID NO: 127397 - DNA, 1778 bp, Homo sapiens
ttaactgaaagtaaatcagattcacagttctcaatttttttttttttttgcctttaaaaggaaaaaaaaaaagaatcccccatccttcactttttctgttactgtgtattctgttggattgttgcttaaatacaaaatactaaccttatgcctaatttaggtactacgtgtataccaggactacatgatatccttcttagaagataatacttagtgacattaataattcattgggagacttctccatgttcttttagataattgccttttctgattaaagcttggaatgccaatagttggaataaagcagtcacttctttgatctgttacccattataaaatttatgttatttatcttgctttttttttttttttttttacaagaatctctgcttatagcagataaaaatactgactgacttccagagagttccctgagataccaggtaagatcttggatagaatggagtgtaggaaacaaacagttcctatcgtaagcaatttttgttgctagaacaaaatccttttgtaggtcatgaacttttgagtagcctgagttttgagttagcctcaattaaggtttttggttgttttaccacccaggctccagattagcaactggagacaggagctgtgatggaattaaagtaaccgtggcaaccattataatgtaaatgagccttcttgggcaggaagttgagagcgtgagcacttgttagggcattcctttattacatctacaactagagctgagtagcattttgctattttaaaatcctgctccttggacaccatcaagtcctgtgttattccaaccttcttttagttttctgagaaactaacaccaaactaatatgtatataaaataggaaatgaatctctggtgtgcctccttcattcacattaagacctcttcttcctttaataacattacctttttcccactgcttctggcaataacactcagcaccaagtctctgataaacaaagaaggccacttaggttttgagagatgtggtgtgtacctagtatactctgatggccaagatttggcttatggtggaacaagtggtgccagggccccttcttaagcagcacaggagcgacaaatctttggtctcaaatcttaattttttatattagtctttaaaattttaaattattttaaaatttttttcaataagtcttttgtactcctaacctttgaatttcaagtcataagattgtaagttttagagtattaatgtaggcttactctttgtggatttagagattagatgactggaggagaataataaaagtgaaactgaagtaattaccaaatgaggttgagttctaagttaagtactgtacttgtttactaccccacaatgagtccagtgattttaacaacaaggcttgtaagcgagaagcttaaggttcctattcaaggttaactattgttatgatgttggtgctaggaaaataacttccctcaacctcagtttttctctttgtaaaggaagagtgaaaacgacgactcactctgttgtggggaaatacttacaaaaggaaataaaatttaactagtagtatggtcaagaatgtcagctgaggttggccaggcgaggtagctcacatctgtaattccagtgctttgggaggttgaagcaggcagatcatctgaggtcaggagttcgagaccagcctggccaacatggtgaaaccctgtctttgctaaaaatacaaaactagctgggcatggtggcatgtgcctgtaatcccagctacttgggaga

SEQ ID NO: 127398 - DNA, 1048 bp, Homo sapiens
agataggtttagatcaccagaaaatttataagctaccatttaaatcttcacaatattgataaacatctactaagataaggccaaatagagagttctgtggcaactgttagttacttctttccagatttacattaaacaattgattaataatcttagaatcgttgttcaaccaattgtaaatctatcacttaactagcataagaaagttaatcttgatttcagcaatatgtattggacctactttatgttatttctctgatctcttagtctaatacttttgtcaaaagtaaaatgaggttagcatgattgtttttcttggtgaaccccattctgactcactgtgttctctgtaccccttccctaccccaccgtaggctaacataggaaatctttgttaaacccttaatctatgatttcaataatctagtctctttttttcctttgaaattgagaaaattaaaattgcactttattgtttctagtcttctagcttctcttccatttttcatgagagatcatggagatcttaggctgtaatttatctggttctagatatttgcatttactaaaagctactgggtgctcttttattatcttttctcctatttcaggcttcagtttcctcttaaccatttgcattctcttttcagtatggaaagttactctggataaagaaaatgcaagcaaaataagagttgaataggtttgattttctgtattattttttaacatggtagaagggcctgtctcatatttttgcatataacatcactgaaaaaagactatatgtttgcacttttcataagcttatattgatattctattatgtgccaggcactgcattagattcttgggctccaaatataaataagatatggtctctgttctcaaggaggtcacaatataattggagagatacgtatttatataaatatttactgtatagcaagagccgctggccaggatcagaaaacatactttgagggttagaaaaataagacagggatttatgctgaataaggtggcgaaatgtacattttcaataagc

SEQ ID NO: 127399 - DNA, 1058 bp, Homo sapiens
gagttctttttgtattccgtaatttttagagttcaccttaaattttacagtgtctatagattgataaatttgcttgatacttaattcatgcttatatccttatcactaaatgcataatatatgtcaaataaattatttgtaatggattttttatggacattaaaatatattctttattgatattgttccagtgtctgactttcatttataatttcatattaccatttttgctcctatctactactcactttctagctaaagtgtttatacttacagtgatggaaagtttttgacttgggccttccttattcctgcgtattatttaattttacagtgtttggtagaagcaaggtcaaaagtttactgaaaagaaaatgaagcccattaggagactattaggtatatcttaatatttcctttctcagttcctttagatccttcctcattgtattatctgggtcacactggttgagggattctaccttcctaatgtaacgtcagttgtgtttagaactgccttgacatacgtacctgcttgattggcgtcctcttctattagtcaccagagtacagagatactcagttccaatgataaaaatagtatacattccctttagttagaatcttcttagtgcaaataaccttggacctatgggtcctgtccatgataaaaggcagaacatttttcacttttttctttgagtttctcttcctgtgacttccccctccttgttatatgttttacatttgacaaagggggaaagaacactcaagattcctagtcatatgccagataaatatataatagacattattttaaatctatagctgagcttgtgaaaaagtaaggaaaatccttaggggcaaaaaaatgatgagggcattgaaaatcagtgttaagtacataagctaaagttacggctgctctggatgactaagagacttagttttaacaaccacatgggaataagagacttttttactcccttgcagaaagctaagttcctcaaagggtttccacattattgaaaagatgatctagaaaaaacatttgcccc

SEQ ID NO: 127400 - DNA, 1094 bp, Homo sapiens
ggtgtaggacttggctgtaatagaggaactggtgatatgtgtctgattagatttcagaattgttatgggccagtaactgttatgtgtctcctgttccttctccctttttcctcacattttgaatgagagtgtctattgtgcttatcttaagtcagtctcactattgtatgtttgtatgttgggtgtgtgggagcagataatttgtttctttaattcagatcaggaggaactatactgcagtagctgtacctgaggaactgcatctgaggagcctcaaccacatctggacctgatttagatatcgagattctggacatcaagctgatgccataatgaaatgagacttttgaaggtcttagaagagggtgagtgtattttgcatgtgggagggccttgttggggccagagggtggtctgtggtagcttgtatccaaagtggccgccaccaatttcttcccttcttgctattcagtggtggagtctatttcccttgtccccttgaatctgggctggctttagtgacttgcttaaccaatagactgtaactttctgggacttcagaggctaggtcatgaaaagccttgtgtcttctgcctgtgcccgttggaatcctctctcttggactgcttgcacatagaacccggtcaccatgctgtgagaatccccagccagatggagaggacacatgtaggcactggttgatagccccattgagctaccagcaaagagccagtatcaactgtcagccttaggagtgagtgaaggaaccatgttgaataatccagccctagcagacaccatctggagaagagccaaggtttcagacttatggcacatgttaagacatctcagccatcttcatcctttcagggcatcccacctgagtttcccagacatcgtcaatcagagacaagcggtctctgctgtgccctgccagaatttgtggcccacagaatcatgagaataataaaatgattattgtttaacactactaagatttagaatagtttttaaatttagccgtagataactggaacatggccaggcgcagtggctcacacctctaattccagaactttgggaggctgaggcgg

SEQ ID NO: 127401 - DNA, 1182 bp, Homo sapiens
gcctgtaatcccagccactcaggaggctgaggcaggagaatctcatgaacccgggaggcagaggttgcagtgagctgagattgtgccactgcactccagcctgggtgacacagcaagaccttgtctccaaaaaataaaaaaataaaaaaataactggaacattgccaaactgaatagaaaataatccaagtctatgcagtttgtaagaaatacacctaagacataaggaatgagagagactggaaataaagatatggaaaaatctattccaaaagaaagctggcatagcaggttaatagtagccaaaactgatttgaaggcaaaaatcattatttgcgttaaaaattatcagaaaaaaattgtaaaggaagaattaagcaagaagctataattccaaatcagtatgcatcttatagcatggccttaaaatagatagatagaatacaaaatatgtagatagaatataggaagaaaatatatagatacaaatatgaataaatttataaatctataaaatggaaaaatttaacatgtctttttgagtaattgatggtcaaacagacaaaaacaacttgagaagataacagaagatttgaacaaccaaccaacaggcttcattttttggatatgtaccaagccccacgcttaatagatgagaatatacattctttttagggagttttaaaaaaattgaacacacactgaattcataaatcaagtctcaacaaaaccaatgaatggatattatgcaaactattctcgtactcaattcagttaagactgaaattgagcaaaaagataaccaaaataattttatatatttggaaatttaaaagcatacttctaagtaactcatagatcaaagaaaaaataataatggaaattataagtaaagccgaatgataatataaatactgtgtatcagaattatgggttacaactaaagcagcatttagagggaaatttatatcatcacaaagaagatgagggtaagaaaaactaattaagaacattaaaaaagccaaagggaaatttacagccttacatgcttatattagaaaaaaaacagagttcattatttattagtcttagtatttgactgagaagttatttttaaaaagaaatgaataaaaaccaaggaaagtagaagggaagaataaaaaaaaaaaccagaactgaatg

SEQ ID NO: 127402 - DNA, 1020 bp, Homo sapiens
aaatttttttttcaaactagaaaaatgtcttaagaaattgaaaatgaaatcattagtttctagagctttatttttggcaaactagaataatccaagttttattttactaattttatagaattatagccctaggaaggtaagcaaatttctgttttctgctacaatatttttgtaatggtgaaatctagttaaaatattttggagtataaaaaattagaaaacatggtacagaagaggccagtgctgctcaggggttaataaggctgggacagccagctctagctgtaagcatatgtaggttttaatatactaaaggccgtgagctacagcttttgctttctctcccatctatggcctccctcgtgtatttatatatgtagcctccctgatgtgtggatgtatggatgtatttacagctagcatcagctatggttagggctgcattcttttctttctctcccatctgaggcctcctggagtcattcttgcaagagttcacacaagtttgttgaactgaattaaacttcaagtttttgttagaagaattgggcagggatcagagcatagagattcctgatggagaatccatcaggcaaggaaatgaacagctctttgtgtcctgagatgaccagcttctcctacccagaccaggaaggattgttttgccagtcttcccatggtgtcagggaaccaggattgaggagtctaaatttcagttttggcaagttggaaaagaaaaaaaggtacaaaaaaaggaacttaggttgaacttactgccaatctttccccagagggaaatgttcttcctgaccttgtagaatccatgtgattaaagttcttcatgtcctttttagagttctgagcagtaatcctctattttctttctctctctctctttttttttttttttttttttgagatagggtctggctctgtcacccaggttgcagtgcagtggcacgatctcaacctccaccttgctaactgcaaccttcacctcccaggctcaagcaatcctcc

SEQ ID NO: 127403 - DNA, 1076 bp, Homo sapiens
cctgttagtattaggaatttgatgtattaactcatttaattcttagaattctgtgaggtagatggtatatcaatttttctgatacagcaattgaagccagttatcaatttaccataagtcacacaccttaagtggcaagagtgtaatctgaatccatatcggtctctaaatatctctctttctactacaccatgttaatctatatccaccacaacactgtagctgttcatctgaacaggatatcttttattagcaaatattttaataagatggggcaggtattgagattagtagacgtgttaaggagattgcaatatgtgatgtatagaaaaatcctgggactataacttcataaattagaattttagatccactattaacgtgtaccctggataagtcatatgttgcctttgttgtagttttccagtctgtaaaaatgaagatgttaataatatctattctgccttcccagtggggtgtgttgaatgtgtgtttgctggctttgaaaatgataaaactttaccaatgtaaagtattaagtaatgtggttctcaggagttgtgtggcttgatggattggtaccattcttttaaccaagaaacaattagttgatcttggcagtaggccattggaactcaaagaaatagcatctgtcaatcacagtcatttcttggaaggaagaattgaaaaatggcacaggagttattctccttgacctctttctctgaaagggaatttgattaggcaagctggtttcataatagagtagagcttctctcttctctccggggaattgaagctgagcagccaggctggttctgtgaagccagagcaatctggttttaaaggatttaactaaattctctatgattaaggttttctgagggatgtgcattgctgagcagcagctttaaaaatgttacgtatgagtcagtctgtgtccctagactgagaacagagtagtggaactggtttaagttcagggaatagtcttcaacaagttcatagcatcttgaagagaagcctagactctgaaagctgaaaaaataggcagtaggagaccattgtatagactg

SEQ ID NO: 127404 - DNA, 1128 bp, Homo sapiens
catgcagttgatagagagtaaatgcctggtttattaaaatggaaaggttaggatgcttatacctatttttcacataatctggaaggtaaattaagtaaaaatttcaggacattctgatactaggtagtttaaaacaatactcaaatggtttctgaaaatagccttataaaggagaattaaactaaattggctcagttggagtccttacccttgcttggtgagttagagttttcggaagcttaaagtttatattctttttgagatttaatatatgtcaacctttctgaagtgggtagccaacttgtgaagactgtgtgtacacatgcacactgatctattgtagccttggcacattgtgtgactttaagtagggtgattggggatgtgaaaggtaaaaggattgtagagaggtggctgctccaaagaggaggaatttctgaaaacatcactgtttattccaattacaaattttttgtagtgctatgtcccctggttaatgatggtgtcagtggttgcctgtgagtcctttgcactctagtatgctttgctttgaagtaaacttcatcttaggaccgggctgagttgtgcatactgctgaaattaaaggtactgaaaaagcatagggtagacaggccccaagggagaagcgactgttgggagctttggaaaactagcgaacagctccagagcactggtgcttggggagcagaagtgtcacatgttgagataggaaatttagaatgcctttgcttgagacctaattggtctccttcctcctatagactgctagaaatttctacgtagctctggactacgggtcccgaagttggaaccaccattctattcctgtcatttgtagtatggaaaagtaacttttttcttgtttataaaatgagaaaaatttttgagaagaatttttttttaatgagtgaaagtatatggtgtttgatagggtaattgagagctgtaatcaaaatcattacctggctggatgcagtggctcatgcttgtaatcccagcactttgggaggccaaggcatgggaagatcctttgaacctgggagtttgagaccagcctggacaacatagggagagccagtctctaaaaaaaattaaaaattagcccga

SEQ ID NO: 127405 - DNA, 1051 bp, Homo sapiens
gaaagccagtgctattctgggcagctaacaaagaagaattgtgccacggcatagggagttggcaagagcccaccgggagtattacatttagcacagtgtcagcatgatagaaacagaaggtggtgagctctgagagcaactgtagtgctgagggggataaatacatgaatttatgaagatcagttaacaaattcaagcatgcagggttgactgaattccaactacaagatccaggagagacactcccaaatatttgaagggtgttaacattggaagaagagaagaattatttagcctggactacagaactttgtaagaaggtgaaaccaagggcagggcaaatttatacctctctaaaagaaatgccctgatgtagtttttgggtgattcgggtgccttcatccctcaggactttttgtagtatgaagctgtaaggccaaaatgaaggatttgagagttctttctctggagaaatggttgagaaatattttggtcttgtgaataaagagtttttgtcccagagacaggttatgaaggattgatttaatatttattagccatgcacagtatattaagcactgtatacaacacagtacatagttcttgaggttctgaaataaaatgactggccattatatgctttatgcattctcagtgtgtttcagtagtttagaaactttggcaaatttcctaagactttccctttggaatagaatgatggaggaattcggccaaatgtaaatgtaaaacaacaacaacaacaacagatgaaatcctattgaaacgaatgtttcctttcacaagatggcaaaacatatatccttgagtcgggagtttcctcagtgatggggatgaagaagccttgagctgataacacgataacatgtttgttcttcaggatattttaaatgccagatagaggtgctatattgtcttcattgcgggccaggtctctgttatttctcagttcaagataggtcaagggaaaattcgttgattcacttagagacagttctgtttcctgaggcaaaggtacttgaattttcaagtg

SEQ ID NO: 127406 - DNA, 1051 bp, Homo sapiens
agaggttaaataacttgtctaaaatcacatagggagtgggaaagctgggactcacttttatctgcctgacttcaaaattcatacctcaattactatatttaatgattttataaatataaaaatatggcataatacttacataaaaaaagttataagatgatatcattgttttgaagaaggatttattctaaaatgtcagcagtggaaatagttgagtattgggataatggttaatttttgtctcttcttttattattgttttccacagtgaacatgaatgactttcataactacagtttttaagagatactcatttcatagcagaagggtggagtgtattaaaaaaataaatattccttcttcccctctgtttctgggtgtatttctgagatatatttctgagtttgggtgtattcactcctgaagttgcatgtaattgcctcttggcactagtttataaaaactagaaagttgaaacagtgatgttattctgagatctgaagatgtaggcagatgaaatatgtttaaataatgacattttaaccattattcagtttcctagatctgggaccggggccactggtaacaggattcagaagccagaagcacagtaccacacagtgagcaattccccagactcgtctctttgagcttttcactagaaaatccttcttcacctctcctttctcccaattcctttttattaagagtcttttaacctggatgaacataatttgagccgatcataaacaaatagctctcttttttgcctgactttatgcatttctgttgccatgtaaaccaaataaagctagctgtgagcaaaccagctgctgcctgcagcctccttccctagaggaagggaaagggtggtgaaggtaattgggaaggactataagaagggtagaaattgagggaagagagtattctatttacatttctggtcctgattctcactctgtttatttggctatttagaatatgatgactatagttgacttagtcattcttcccagcagctgagagatatgggtgactaataattttttct

SEQ ID NO: 127407 - DNA, 1080 bp, Homo sapiens
agtggctggcagggtggtgatggaggtgggaggcagatgaagatggaatggaggactgagtatgtgtaagtcattgatagcagtaaaagtgactattgtccccaaagctttcttgtcgaatgcctgtgaatttcgagggtgggaataacacactcatggttatcatatgaaacctatttgtggcaagatagtagaaataaaacaaactgtgtaatctgtccacgatcttgagaatttaccaacacttgggaaaaaatagcaagtgcttaaagagaagaatatcagtgtaaaggagcatggactacaagtctgttaagtggtacaggcagtaattacaaccattaaaccactcagaagaatggtttatctccagggttataaaggtaaagctttatgtgggaaccagcatgtactttggcattaagagaagggaaggagaacagaaagtaaatagaaagagtttaataagaaggagacagagcaggcattttaaactgaggaaattatatgcaaaagtacaggggtggagttgggaagggacaccagtgttgaagtattcctgttacttgttggtatcatcattcaccctatcagctggtaggagagcaccagaaacccaagtcttcttagactcctcctccccattaactcaaaggtaatatccagaagaaacaaagaacatttgtggaaggagagtaagagtcatgactcagttttgatcctaagtgaccagaataatagattttaaaaatatatgggtagggaggtagtttgaaggagacaataatgaagagagagaccctttcctttaaaataggaataaagaagcaaaaggtaggtgaatataccaagaacttccaattaaaagatgagggaacttgtagtaatctcccttctgtgtgttagagaatgcggctatgtagctttgtaccttgagggacttaacaagggttaattataatcaactgttgaaacacactgttctaaacgcagtattattcacttgccacctattttgggagttcatgtataagcatataaaattaccattagactgtttcaaagtggtagaccttattt

SEQ ID NO: 127408 - DNA, 1462 bp, Homo sapiens
tcacatgcacctaaccgtgtatttttcctaggagcagtggttcactgttggcaaatttagtgttcatggcaactttatagaatgtaactacctcaaataataagaatcaatgtattttatatatttattttggaggaccttaaagtatctcacagacattagctcattcatcaacacaacttccagaaattagctgctagagaatgagttgttatttggaggataagggaaaattcactctgtaggtctcccttaaggtttgtattctaggacaatttttgcttcttaagtagacagtattttacccttggatgtaaaaagatctgcttgctaattatggttatgtttgattgatttgctttggaactaattggaatattccctatttgacttcaatggggaaaggttaaaaggtaaagaaagcattttggaaagcagtcagaactttttggcagaaaagtaccaggtagagagaaataatcatagtggttattatcacaaatgtaaaaaaggtaaggatataaattgctggatacatatttgaatgtgttatgttgaaaatggctactcacatatatattataggaacttttctctccttcaactcggcattcaaacctttgtctagatcctgctaattcttcctttatatgatttctcaaatttgttccttctttttcattaatatagtgataatctggaaatccagactttaaccattttcaaagttgacctcaaagttgctctcatttctttcagccacattttcccttgaatgtaagagttacacagtaataaaccatcttccttaagcatatttttatcacattctgcagacatattactgccctacttagaaactttcagtggctgctagttgtctatttttaaattactataaaccactgtctcttcatgttcctcaattctcctacagcctttccaccctatcccctgtaattgatgtcatctcataattcattgtgtgtgtaggggaacctctagatgttaattccttcatcttataaccaaatctataaagctgcctgtgtctattccttttttcccttccattacaaaggaaagaagtattagaacataggcatctttgatgaggggcattattttgtctaccacacatttctttttttcttctcaatataagagcaatgtatcctcattccagaaaaattagaaaacagaccagcaatttaggaactgtgtaggccctgttgatctcctaatggaaacagagatccttagttcatgttgattaagaagggagggtctctgatttacttaaggccttgaagatactccaaaagtttgtcaaaagtcacagagaagaaaagtgtcaccttccacataaaatccatggggaaaaggagtactgtaagactcttggcaaggtatttagtttctctaggtcttggcttctttatccttaaaataaggaattgaa

SEQ ID NO: 127409 - DNA, 1031 bp, Homo sapiens
ctgctctatctagttttggacaaaatagcttcctggtgcttagtgttttatatgtattagttatttaatctttataaaaccaatgtgtagaagatactgttatcctgatttacagacaaagaaacaaaggttcaaaaaggttgtgtagcctgaggatacacagctagtaagtgatgaaactggccttcaaacccaagtctattcaactttaaaagcctatagtctttacctgtaatgatgatgcttccatgttgagtccaaaaaatacctgtgaggtatgaattttagattactgaggaactgataagtaagatacctaacatcatttaggttgtgagatagggagaagggctcaacaatgccggtgtctgtgatagcactggcattttgagtttgaaggagtaaaggagatttaaggtccagcaattccagccagtctcatacttgaccacattgagctttgaactcaggtggttaggaactttagcctccataataagctgaaacttaggtgactaaggaatagttattggttttcttgtttttttttttttttttttttttttttatggtctcagagaatctagatggattggaaatagtgttagaactggaaggaaccagttctaaccttccacagttcactcttccttacctccctctcattttatgataaggagattgaagaagggtaattaggtgatttgccaaagtccaataaaacaaagccaggaaaagaagacagggtcacattcttgtattccttgccctgtgccttatctctaggttccagattcatcaccttttgattaaaactgttctgccattatagtaacatcttcactgcctgggggtttttttagctttgagccctgaaaagagtaactttttgtcccttcccctttggccctaagcacatactcactgacttcagatcatccggcaggccatatgccctcatggatgacgatagtatcgagtcaatacttgtgggaatacaactggcacagaggattttgagctgtttttgg

SEQ ID NO: 127410 - DNA, 1046 bp, Homo sapiens
tcttcctaggctccatccgaacctcccatgcaataagactctaacttgagatatgcgagagtttggtgccagacccctggtgtgagcagatggggagcttctgcatagctgtttaaacttgaaagccctaggagctcttgatttcaaggaaacgcctgtttactgatccaaatcaagcaactcttgagaaatgggagtgccttcctgacctcagtctttattgatcttggtatccgcacctccagtgacgtgtcctgaagggtgggagagaattcacaagtgcctcacacacagggaaagaaggaagtccaactattgctgcagaaagtccccactggggaggtgcgggtagagtgtttgggtagcattaaaacagtgagtgccctgtgagaagcacagtgcctgggtgcagcactttgcatcagctctgattttgaaatcagacacagaaggctttgaagccggccagtaaggggttgtcaggcagttgactaatgctcttgatttgaatcggaggctgctgtgaaaagggatgcagcttctgctagccactgtgaacttctgaatctcactagggttgggtctgctttggggcactcagataaccccagtatttccaaaccagctttcccttttgcttcaggacatatcttacccaagcctgcactatggagaagtgggacggtaatgagggcacctcagcttttcacatgcctgagtggatggtgagttcactggtcgttttgtttctccttctgtttcttgataatgagaggcaaccatttctgacgggtgacaaggatcacctctgagaagctcctaccaagatccgtggttggaaaaacagttattactctacgttctgattagttcctaggtactaggtcaccactgtttcttaattatccacgaagctgggaaaggtgtgagagttgcctggccagggcttgttgcctggtcatctctggtgggcaggggctttcctccggctgctggtgtgatgtatgggttgtgtttcctgtgactgttttgcacttctgttttca

SEQ ID NO: 127411 - DNA, 1077 bp, Homo sapiens
ttctttttagtgtttatagaattatggatttgaagaaataactattgataatgagatagaatatatagtaggcctaacaaaggccccctgaggaacttacatttcaactcattgttacaactattttttattgttttgggggaggttattgctgttcttcttaatgtcgtttcagaacattgtgttcaggttttttttttttttttttttgaaatggagtctggctctgttgtccaggctggagtgcagtggcgtgatctcagctcactgcaacctccgcttcctgggttcaagtgattctcctgtctcagcctcccaagtagctgggattacaggtgtgcaccaccataccgggtaatttttgtatttttggtggagatggggtttcaccatgttggccaggctggtcttgaactcctgaccgtaggtgatccacccaactcggcctcccacagtgctgggattacaggtgtgagccaccacgctcagtcttgtgttcaattttaaaacattttgtggaaagaaaacctatccatctacaagcttattccaagtaacatagtgttttagaattaatggaaggatttatgtaatacttctgattgggttgagtttttttgaatttcttgctactcactaataacaagaagagggaaaaagaaatttggttttcttaagggaagggccacgttaaggtatcaaactttggtatttctataaaggaatattacagaagaattctactgaacattagtgtgccaactcagaatcaatcaaagttttataataattcttatttctgtcatagtcctcaccgtcttacaagcttagcacatcccctcaaagttcagtagtggctcctgctgaactttcacccatttaccttctttctagttaatgtgaatgggaagactgccctaaaggagttggtgtgaccactgcataagggatatgatctagggcttcccagcttttagaaaacactctttatttaataaaacacagctctttagtgttgtgtcttggttggtaaaaaataaataaaaaaatttgcagccgggtgcggtggctcacgcc

SEQ ID NO: 127412 - DNA, 1017 bp, Homo sapiens
taatccacgaaactattttataagaagcaaacttctaaaaaactcttcccctaaggaaaaaaacctcataaaaacaaatgaacagaagagacttcttttttaatcagaccgttctcagtgatatatttctgaataagctgtctttgcaatgagttacttggttaaggatgaggaaagaagacagaagtcccttcttcacgattggttctttttgttcccaaactctacaattcttataaagtttgagatattttcagatttttccaaacaacaaaattttgtgtttgtatttgggatgctagcatagctttttacacatttccagagtgttactcatcagtgaagtctgctataacccgacacacaggtccctactgttatttccattaccaaatgaataggttaggcccaagaggaattgcctgacataaaatagtctaataggactaattcagtcagggttctgactgctgcttctcctagcagtaactcacagtatcacagctgctgagaggtaaagcttaatcaggcttgaatcataaaatgtgtatacatgttctgtgagatagattgtggattcttgattcatcatgctgtcttttgattttggaaaataatgaaacaagataacatcccatagtaaagttatattgtacttcatactacttttctacgtagaaactgaacccttttggttatcatctcatttattcgtaagatttttccggtggtagttgggggaaagagagagcatgaggaaagagggaatctgttacagtttacagttggataaattgaaaattggtcacttaaccacttagggttgaagctagatctaggatctcaggactactttagtaggttattggttgttcttgtttatttaaattatgactctgggctttagagtatgctgacaattacaaatattttagaaactctgttcaagtgtgtttgtacatacgtgttgggtttctctaaattttcctaggaacagtccttaatactatctcaact

SEQ ID NO: 127413 - DNA, 1004 bp, Homo sapiens
aatcctatgaagactaaaaagaccccagctaagcatgtgaatagtagtagcagcagctgcctgttaaccacgataaaaagttttaggcctttcacactctagtatatgttgctaaatggattagttatcagagcattttattgtaccaaaggaggatttattcacttctttgggagtctaaaatgcctaacgccagacctactgaggccagcaagaagggagagcacattgaatacttcattgtcaatgtctaattgggtctgcaggcacaattcagcctcatcagagtccgtcttaaaaaagaaagctctgttaggtcagacaaatactttttgtgtggttcttaattactttcccatggattccttgttttctaggtcttatctgttcagtaattgtactaaaacacaaattatatcaaacatttaagcagcacacagagcagagtagttagaatcccaaaaacccatatgttaatgaccacgatcttgcattaggaactttaacctaatgctaccatggtgtaaccttttctttttgcgtattcaaggacctctgcgtgttctgaagataaagttagccctacatttcaagttaaggctatccaggaagaatgtctttggcaatctctttcagcttccctcttctggcatgtgtatagcctgcaggtacttaacagaggtaaaaaaatttatatggtgctaggtggctagagaagcttcagtttgctccatggtttggaattttagaggaagcatttttttttttccgagtgttttttattctgtcattccagcggcttcatatacagatagctctgatgatgagacatcgcccagggacaagcagcaaaagaactctaagggaagcagtgacttctgtgttaagaacatcaaacaggcagagtttggacgaagagaaattgaaattgctgaacaaggtaaagaaaacaagcaccttttccttcttaacctacctgtgtctttttgtccatattaatccct

SEQ ID NO: 127414 - DNA, 1025 bp, Homo sapiens
aggtgaagtttaaccttttgtttattaggtgttttaaatggattttgttgaaatattctggaattttttatttgtatggacatatgagtacaccctttaccactttagatgagaaaaagaatttcagaggccttctggttgaagtagactttctttttccctttgcgttgccgccattttcccttaagttgattttctgacttgctccagtaccaccgtttgtgatgttctttttagcttgtgttttaattatgaatcgtgagtgtgggtgttcttgtgcacatgaatgcgataagcaggagccaggggtttgtttatgagctgcattcaattatttgttcttctcgttttccccaagtatgaatctattcagtgaaattcctctcgggggtggaaagagggggtgcactttaccagaagctttgagaaatggttttctcagtgactttccttaatatgtgtgctctctcccctcttcaggtggggaaagggtgctgtgctgccctgaaagccatgggctccattgtgtatgtaactgaaattgaccccatctgtgccctgcaagcctggtaagcctctacgctaccatctcacttgcaatctcggagctgtctccaaagaatggcctggttgatgccacactttattttagaggagcccagatcctcagagatgctgccactaactctaagcatctgtcttttaaaaaggtcaaggagctctgcttggagagagcagagactatcagaaaagcgaaaatttagaaatcctgtggagatagtaacagggattctgtcagccagagaacaggtagccccttaccttctccatgtatgatacttgcctttcaaataatgatcagaaaagaaattggcaggcatcagatgccttctgatgtgttacactgaaaatagcccttctgtggtattcctcccaaaaatgtataacctgaatctaattgtgaggaaacattagaccaatcccagttaagggtaaaatctactaactctgagtgaagcatatat

SEQ ID NO: 127415 - DNA, 1044 bp, Homo sapiens
aaatattttaatgtagttggcagatgaaatacatttgggggagtggtactatctaaggtaggagtcatgggagtcatatgtcaatataatcacatatcactgtaagtatttgggtcttactcttatcctgtcttatccttaagaacaggcagtctcactgaagtattttaaggaaaggaagcgacatgatccaaattgcatttaggaaaatcactctgccaaatgatttagaaagatgtaaacctagaggcaatgagattgggccaggggttactatagtaatctaggcaagaagtaataagacctaaacttaagcaaggccagtatgtattagagaagagtagagagatgaaagagacgtttatggaattaaagaaaaagagtcacccagatttggtgacaacttcaattcaggagaggcagcaaggacattcttgtttatatggctcattcagttggatgaacagtgatgctattgatcaagatagaaaatatagaagaagaaatagatgagattatgggtgcagagaaaataataagtttattttcaaacacagtaagtttgagatccttctgggacattgatgaggtgctatccagtggctaatttgatccttggctatgaagcttcagagagatctaagctaaagttacaaatgtaaaaatcagccatctatcagcagtcatttgcagccaaaggaagagtatggttctctatactgaaagaatagagaaaagaataaaggcataaccctgcagagcaccaatatccaaaggttggctgaagttgaggagaggcaattaagagaagtaagaggaaaaccaggagagatgtatcatggagtccaaggggtatagagttttaagaaggcaaataatgtttaatgtagtagaagaaatcaaataatataagagtctaagaagttgggcatggtggtgtatgccaatagtcctggctactcaggaggctgaggcaggaggattgcttgaggccaagagttagaggctgtagtgcactatgattatgcctgtgactagctactg

SEQ ID NO: 127416 - DNA, 1876 bp, Homo sapiens
tgaaaccccatctctactaaaaaatataaaaattagctgggcatgatggcaggtgcctataatcccagctattcgggaggctgaggcaggagaatcgcttgaacccaggaggcagaggttgcagtgagctaagatcatgccattgcactgcagcctgggtgacagagtgagactccatctcaaaaaaaaaaaaaagaatagtgaatggttttcacgttaacacatatatgtctgtcttttttttggagctccttgctgtagtacctttttaaaaaagagttgtataatattccattatatggaactgccctgatttacttaaccattcccttatttatttacatttttcactattacaaataagcctggattgaacattcttgggcacttatatttctgaacttgagcaagtgtttttattggatagagccctaaaaaagtgaaactgattggtcaaagattaggtacatataaaattttgctagctgctgccaaattgtcctccagaaaggttgaaccaatttatgaaacttgacatttcaagaaattgtatgtgtttcccatctacctaataaagaaacggtccacaccattaatatagttctgaatgcactgaaatataattgtatatgtctttcccactagattggtacttccttggggataggaatcatgaatttctaaactttagcatcccattgtttgcttaaataaaccttgaaatacaaaaatgaaaagaaagtactgtctttgtccataagtggctcacagcccagtaaaggaatccacagtcttatctatattcatgctctttactacaatgactagaatatggtatgtaccctgtaaatcattattgtataactaaaagcgtttctttttatttgtctaaaaactatttggcagaacttcttaattttatcaaatgagccaatgggtagttttggaatatgaactcactttctattttaggcattgcctgttggaagaaagaaggtgttgtcttaagtctacaccccgtggctgttatttgattgctgctgttaaaaaaacataaccttttttctcattttctctgaatatacaatatacagaaatggaaggagggtgagccattgggagctttactctaccattaagcatttctttaaaggctacctcacatttgcacttaggtcacaaagcttctgtaactagggtgaaccaccatcattgaaaaggtggaacctgggaccttcggatatgagggcagaaccttgggccccagcatgctatgtttaggacatttggcctcttactaaacccactcagctatgttcctcctttttttctttgtttcttcagcacttatatattcagtttgcactgtattaatttgcacttgtttgcatgttgctttgtaagtattttaagggcatttttttcctctcacatatatattgttttgtgtccctggctaaagtacaagctttttgaaggcagaaaccatgtctttggtttcttttgtatttcccatagcaccttttactgtgagagtgggcacacagtatatgttgtggaatgacatcctgagtgatccctccctggctgggcctcagattaaattccctgaaatggaacagtcctaaccaacacaggacaggtattctccatctggcatgttggttgctcctttcaacctgctatttgaaatggctcccttcaacatctttctgttcccacagtggggcttgctatggctaatgctgtacttgctgtatgtgttccaggcgagtctgcggacaccagaactgacctgggagcgagtgagatctcaagttgaccatgtgatatggcctgatggcaagaggatagtactgctggcagaggtaaggct

SEQ ID NO: 127417 - DNA, 1049 bp, Homo sapiens
ggttatttatttattaaaatcaagaatcctgtgcctgtagtgttggcccagagtgtggttactgccctgagggccatgaaagccacagaggatgggctgaggaaggaaagaaatggggttactgctcccagtgcatcatttgcatcattccccattgactgaatcctcagcagtggccgtttttcctcttgtccaggctcacgagttagtccagggattccatactccctattccctggagttttctggaataaattttcagcacctgcttttctcagcttggcccttccccgggtgaggccgtttggaattaacatggccagtgtttcacacaagattgggttcccaatcttgaccatcactatcactgccttctttatataaaggctaataaggaaggagtgttatttatggctttgccaagctacatcaagaactcagctgtgctgtgcctaccaggggtctcctttcttacccaggactcctttcttctccttgaatatttatgtccattttaacacttcctggttgcaagagggatgtgcctccattatttcctccacagttttggtatttgtcagacatttgttctgctgtctttctaatccagccaacgtctgctcaggaagtggggccagctccactgggacccatagttttacttccttgtcatttgattggatagtttccaaggaagcccctccagattggcactatctcagaaaaggagagcttgttgtgaaacactgcttcctgaaacttcctgctattgcctaaagctacgtctgaaactgagtagggaaaggcatacttttccagggacttagggggataggctttggaaatgggacaggtctttcagactcacagcttgataccctaacaaagcagagtatatttatttgtttcccaggaaggccattgcagtttgactggctgagggatacagagatgaaattgtaaactgtatccagattatcaaagctaatttgactagtttgaacctcgtcagacattcattcctttggccattgccatggatgaaaccg

SEQ ID NO: 127418 - DNA, 1394 bp, Homo sapiens
gaagataatacacaggtgtcttaaatgtactattctgttcttacctgtatataaaaattcataatctaaaatttaaaaataaaaagaccaagactaaagttcagtacctaagagccttgcccacttttctgatttggtttttggtgctttaatcttaaaaatatatatattcacctctccactaatgactgaagaatttaagattcagtgatgggatttgcttctggtcactcctagattctggaacttaagactcaaaagccctgactcccagacaaggtgtttctcaaccattagacagctggctggaacataagtgaatttctcttgctttgtgaattacctgtgacctggttaaatttccaggaagggtctcaggtagggagcagagatttaaaggaaatctgttctatcatctgttgacttctgtatttcagttcttcatcttctgtaagatgagggtacatatacaatgttctggagagagatagagagagtaggaaagggcatttttatttcttttcttctttctttcttttttttttttttaagagacagagtcttattctgttaccccaggctggagtgcagtgacatgatcatagctcactaaagcctcaaactcctaagctcaaacgatcctccacctcagcctcctaagtagctaggactacagtcatgtgccactacacctggctaatgtttaaattttttgtagagatagggtcatgctatgttgcccaggctagactcaaactcctggcctcaagcaattctcctgcctcagcctctcaaagtgctgggattacaatcctataggtctgagccatcacacgtggctggcatttttatttctcataagctttttgcattttgtattgagaggctgctgttagcaaagttagattttcctgggcacagcagccctttgacaaccatagctgttctctagagttttttttgcagcctctgctttgtggctgtgggcaggaatctaaacttctataccctttgaggaaacttagcagggagagaatgaactggttccaaccctgaagaaccatctagcacttacttttcagcccttgccatggtttcctgatccagcacaaggatctttcctctaagtttcaggagttgtgttgccctcctcttctcttagagatgggatagttcctggttgggttgacaaagcaggagttgcagccctgagaaacaggagtgatgagattaagctctctgtgctgcagtcctcctcttggccctcaccaaatgttgaaggctgccttctctgctgcagcagccagctggcaggaagaggacaggtttgatggtttaatctcccagggacacaagtggctatttttaacgttgctctgaaaaggaggaagcta

SEQ ID NO: 127419 - DNA, 2678 bp, Homo sapiens
gagataggaaagcagaggtcatttcaaagagagagagtgaggataccaccgggaaggcagcgccgaaaaaaccagaggggaaccacttgccgatcccccaggcacagtctggaggtcccaattcccgcggtaggggggcgagagatgccactcgtctgatcagcaaccattttgggcccgcttgcgccgcttctccggggcgtccgcgttgtgctcatccagttgcttttgaggttccggccccctccaaacctctgaagcgctccgtgcacgcgacgcggcggcggggtaagctggagccctcgccgcgagccctctccgctgcctgcccgcagcacagccgcgccgacctcctcatcatggcggcggccgggcggggaagccgggccgtgcgtcgcgtgcgtgccctctccctcccctccccctcctcggcggcggcggcggcggcagaagcggcagcgctcgccattgccgctggtggcaggaggctgcgaggagccggcgcggtcgcagtctccacggcgcaggcccacggtagcgcagccgctctgaggtgagtgccctaccgcgcaatctccagctatttcagccccggcgcagccgcaacacgccgcccgcccgccggccggccggcccgccccgcagccggcaccctgccgcccccggctctgggcctgggcccccgccggattcggcccgcctcgggcggggggccccggcccggcccagccaaaccgccaccccgaggatgcgcaggccgcactaggccccaggcgtcctggcgggctcgggagggaggcgctgccctcccgagagccccagggttccggcctcctccgccgcctggggctctcggggccgcggccttctccccgccgtggaacccggggcccggccttcccgcagctcgggagcgggaggcgcgggagagtgcgccgggcccgggagcgggaggtgggcgggctgcgcgggaccggagccgcggctctcggctcgccccctcggcccttcccggctctcgtacgcgggcgggcgggcgggcggcgcggtggggccgggctggggcgcgggagccgctgtctcctgcgggagaggaggctggctctttgggcgacctccgaagcttccctcctgccggggtggcgtgggcttgttacccaggtagactgggggacgctggaatatggcgcgttgcccaccttcttgcaagttaggaggtggccggggcggcagttcgaggaggagggcgcaaagtccttttgtacgcagaaataaggagcgacattgtgttttcttccccagctgagatgtgcccgcggaggggccgcggttcttcctgtgcctggggtggtggtcccctgggtgagggagagggggagtggcacgcccctccgaaggaacagaaccttttgccactggaaagacaggggctctgagatggccgtgtgcatggtattttcccatatccccagaccttttcgggtttgtcattgaatgttgtgcactccatcgtgcaatgatgtctgctgcctctctcacctgttgtgtcgtggctgctggtcccaaagtttctgcagtgtatttggctgtgcccaccagaacttgaagttgtttaaaaatcttaatacttggggggcttccagtgatatctgctccaaccagttggaggagctgttgcctgctctccattcttcttaagcattagattagaatatattaattgcttattttagagctggtgtcaatcgtgctgatttctttatgtggtcagagcaaaattcacatttttttaagtgttcagagactgcgtattgagagacgcataaggagaaaggtagtgtgagtgagcctgtcagcttgggcagtgttgggcagagcttttgtcccgggacatcatctgtgctcacagtgatcctttttcccattccatctcagcctagccttttaaaaaattatttttcctttgggcttgaccagtaagtaattgggaaaggggggtgctggagtcttggagatgctgtttgtgtgtgtgtgtgtgtttgattcattagtatcccgactccctaaaattgtatttgacagttcttgacaggttaccccgtaagacagtgaaaatatgactagttctctccgtgcatctgagtgtaatttccttattttatgagtccgaaagcagacataattatcacatgcaatgtagaatatttattcttaacttggatcctaaattgtgggcagaatttttttgtgtcaaggggtttttttttcttttgataggacttagtggctttcaacagggcccatgaccaaaaaaaacaataatcagattaagaaaactctttacggccgggtgcggtggctcacacctgtaatcccagcactttgggaggccgaggcggggtggatcacctgaggtcaggagttcgagaccagcctggccaacatggtgaaagcccatctctgttaaaaatacaaaaattagctgggcgtggtggcaggcgccagtaatcccagctgctgggaggggcgggggcgggggctgccgaggcaagagaatcgcttgaacctgggaggcagaagttgcagtgagccgagatggagatcgcgccattgcactccagcccgggggacaagagcgagacttcatctaaaaaaacaaaaacaaaaactctacttaa

SEQ ID NO: 127420 - DNA, 1913 bp, Homo sapiens
atgttgcctaagctggccttgaactcctgggctcaaggaatgcacccacctcagcctccccagtagctgagactataggcaagtgccaccgtgctggcagtggcttcataacatgtttcaaggaaatttagctcctgtgttaagagaaggagctatagaagtagaagataatgagggcccttgtccagatatagaaggtttaaaggagaaaggatttcaggtttccttctgaattcctgtgtatgtcgttaggaccccaaattgtaggttttttgttttattaaacgataattatgcacttgtctaattttgttagggaaccgaaggccaacttcccatgatttaaatacctgaatttgcattgcctgcacactgtaggttcaaccaaatctctgggttgtctttagaagcattttatgtaaataatcacgaatgagtgacttgttttaagggaaatttaagctcctgtggtctgggattaaatttttatgccttttcttgtatggaataaggcattcagtaaagttgaagaataataacaatgaacagtaattactgaaattaaaatttttccctgagtatttgaaaaggcatgctgattttttggtttctggaggaactatgaactgtcagtctttagaaacagtctacagtcctacctcaacaggaagttaatgtatacattcagcttctgtcagatgtctttagacaagcctgttgcttcatgctgaagcaggcttattcattcacacagtgccactgtgaaaaattgaagggtgaggggaaactccctgggctgttgaatttcacaaatgtctactttaacctcaagagtttagatgcgccctttctgggccagtaatcatctaggaaatgggatatctgaatttagatgtttgtgtgtgactgtgtgatgcttattaatatgtatatatagagtatttggaaaatcaatcttaaaatgcaaatctttgattttgtaaaaaacatttcaggaaatgttctatactaaaatacattttctttatgttctttcatgttttccttgatagctaaagctagtgttttcagcctgagcttacccaaatataattttccatgaatgcttagtaaaacagcaatgaaaaaggaatccacttgttattttagaaacattttatttagaccaagtccaatgttttttgagtctcaagatacatgttaatttttgtgccttgtgtatcatatttccttccttattaactagagggtggattacccactttcttgggttttcagttagtacttttatccatcagttttctactaaggtaaacagactggaagataaatagtaaaaggaggtgaaacaaatgaatttcaggtgtttccaggagattaaaaccatattgagctattggaaacttttaatcctcaagcaacaacaatgctttgtttgaagttattttagtgcaatatggacaaaacttgggaaaggaatttttgactgctcaagaaaaataagtggattgcttataccttagaatatatatatatacacacacacatatatatattttttattttttcaaaagtgcacttcagaattgggctaatgtattttcagcccaacttaatgcagtgtagttagcaaaacatccaaaaggcttcatcatgttgtggtctttaggcctaaaatgttttaaaatgtgaacatttatgtgataccaagtaaactttctatgacccaaagaagggctagaaataaaactttacagagatgttctagtatattagaaaacaatggctggttatggtggttcatgcctataatcccagcactttgggaggccaaggcaggaagattgcttgaggctaggaattctagaccagcctgggcaatgtagtgacatcctgtctttacagaatattta

SEQ ID NO: 127421 - DNA, 2257 bp, Homo sapiens
gtaggcctaccacatttgtaatctcttgaggcaaatctgtgttgtttctctaagagcagtcacttagaagataatctgacagtaaggaatggtctactgaatcccagatctggtagtctgccttgcccaatcacaacatagtttgtgtaaaactccaactgctactgaaccatcagataatttcttgaggaagccgtttctcttaaggagaagtgtgtgtgtgttggagggagtgttggtggggagaagaggggtaaagagaagatgatactagtaaaataatctagttttgtaggttgggatgatcactggaattttttaggggaaatattctcaaaaaaagttgtaagagctacttttgtatgggttatcagtttggtgatttagactatagtaattgcattgtttaatatgcattgtatttcgattaattcatgcatgctgatttctgtggtaacaaatgtgaaaagtttggctgatggcttaagtggacattttcttaagaactctttaagtggtgcctgttgggataaactatgccaagccattttctgaatcttcatgaagaatgagctttgtatgcatatatattaagacagttttttttaaaaagagcatgtattttactgttggtaattgtaaagtttttgctttttagaactttaagagtccgttttgttgctgctactgaatgctaatgtggttaggctggcagctaaacctacaaagaacaaggggaaatgaggaaatgtcccaatgaaacattgcttaaaactgtttgcgcagtggactagaaatggggagttggggactaggggacctgattcttgttttatgttcaaaggagagtgaagcattctctccattaagaaataacctccttaagtgtattctcactttggagttttgccactcattcattcacctgacgatgattaaagatataccacattctgggcatgtactaggtgctagagtaacaaatcttgggccttgtcgtgtagagcagaaaggtatgggctcaactagctatgttacaacttctagagaaccaaaatagagcaaacaaagagtggtgtgggattataggaggagggagaaattccttctagggagaggagaatgatacacagagaaaagtgaggttagggaagacttttcacataggggaagtttgagtaggacttggaagggggagtagctgcattactgatggagaagaggggctgagaggaagggcatcagtagtctgatttgagaactagcaagtggattttgctcgacttggagaatagtggaaagtgaaactgataaggttgtggccatattgggaagagtttgtaattccatgctcatgagtgtgaactttattctataggcatttagggaccataagaggtttgagtaggacatccactatggtttttaaaaagatgacatgtaaagatttgactagagacttgtgagagtattgaattgtgatgtaaaaggacatcgattctggggataatttttacttcacagttgtcagatttgagtgacaattgagtaaagagttaaagattatagtgtggttattgggtgatgatgatgcctttaagatagggaatgtataggaagaacagaatttgaggaggaaggtaatagagtatgactccagatgtgttaagatatctgggaatcaagaaaggtcaagtaagtacctgggtatttgggctggagctcaaggggacattgggataaattaggggatttgcattcatcagtataatgccatatagaaactgcagaaagccaggcatggtgcctcacacctgtaatcctaacactttaggaggccaaggcagaggatcacttaaggccaggagttcaaaaccagtctgggcaacgttgtgagaccctgtttctacaaaaatttaaaaaatttgtcaggtatagtggtagccacctgtggtctcagctactcgggaggctgaggctggagtatgacttgagcccaggagtttgaggctgtagcaagctatgatagggccactgcactccagcttgggtgtcagtgtaagaccctgtctataaaaaagaaagagaaaatagtacagattgagtatcctttatccaaaatgcttaggaccagaaatgttttggagttttttttgactttgtaatgttggtatgcatataatgagataccctggagatagggcccaagtctaaacttgaaattcatttgtgtttcatatacatcttacaacctgga

SEQ ID NO: 127422 - DNA, 1064 bp, Homo sapiens
catgtctctctgcaatgggagttgcagcttaaatgctttgggagatgacccccaatgacaaggctgcctaaaaatctccatattgtttgggttgtttttttttttttttgcctcttttacattgtcttaaattctgagaattggagatttcatttgagttgacagtgtcttaaaatacaaataacctcttgcagagttttgaggttttatgatattaatatgttaagtatgggggtttttaacctggggttttctggttctggggtttatatattttggctgtgtgaccctgaatcccttaaaattgtttgaaaagttatgtgtgagtgcatgtgtgatttttctggggagagggtccacaacatttatgagatttttcaagggggctgttgacacacagaaaagtcaagggcctttactaaatgttaatgattaaatcaagtgttggttgtgttcgttggctgaaatcagttatctcaacaagtgagacagatcaagggaaagaaatcttgagtaggtgtctcaggtgaagaactttggaaagatacgaggaacttcttagaaatgggagtaggagcaccagaaggaaggtaggaggaatgccaaagcaaagcttaaccgatttcagaattttgtcaagtctctggattgcttggtttttttatactctaggactgacacttagtatatgtttattcatgcactgtagatacagtaggctttatggggtaggggaatcaaatcacttttttttttttttttttgagatagagtctcgctttgtcacccagactggagtgcagtggtatgatcttggctgactgcaacctccgcctcccgggttcaagcgattcttctgcctcagcctcccaagcagctgggattacaggcgcctgccaccatgcccagctaattttttatttttagtagagatgggatttcaccatattggacaggctggtcttgaattcctgaccttgtgatccgcccgccttggcctcccaaagtgctgggattacaggcatgagccaccgcactgggcccaaattactattgttttaaag

SEQ ID NO: 127423 - DNA, 1054 bp, Homo sapiens
ttaatgctaagaaattgctggcattcacatttctaaagtcgtgaataaaattaagaaattcaagcacattatgtgttcactagatcttacttgatttccaaaatatttctttttgaaattttagataattggtaatttttacttccttctgctaatctttgcatctttgaaattagattaggaggcagttttgtcagctaggccctagtttctggggcagtgatatccatacttttgcttgccaccctcaaaataaattaatgccacttgggattaatttgtgatttttctggggagagggtctacaacttttatttattttaccagtagtcttggtaaatacaagaatgatatgaataaatatgttgggtaatcttaaacttgtgttatgtgatttgtaattagcttgtgtttgtggatgatctttacattcagtaaatctccaaagagggcccagatagaatggagtattttgtcttttcctttgggaactttttttggttctttctttcattaaacaattatgaaataaaatttttggtaacagatcttccatgtaaaaatagcccacaaatcaaagaactagccaagatttgctaagtaagaacacatcatggaataccatcatagaactagtctcttaccccaaaactagctgtaggtgctaagtctaaagaagaagtaattctgatatgttaccagaattatgtggtaatgcgactgagtgttaaaattgttgtcttctttaatttttggctctattattttaaaagtttttctccatagaatttttttttttttttttttgagatactatctcgctctgtcgcccgggctggagtgcagtggcatgatcttggctcactgtaacttccgcctctcgggttcaagcgattatcctgcctcagcctcctgagtagctgggattacaggcacccgccaccatgccgggctaatttttgtgtttttagtagagacagggtttcaccatgttggtcaggctggtctagaactcacgaccttgtaatctgcccgcctcggcctcccaaagtgc

SEQ ID NO: 127424 - DNA, 1036 bp, Homo sapiens
aaggcaaatagcatcttatttattatgaaaataattttgacctcattgatgacttgaagaatctcaaggacccccagggtcccatggtttactttgagaactgctgttaagctatttgagggtcgaactaatcatcctaatatcccctttcagttcctggtccagaactttacacagaaaaggtgctcaaaggatatttgtttaatgaatgtggtatgctgacatttaaacaggacaaaacttggtgagtaaaattaatgtaggcagtctcccatccattcaggcagcttttccatagacgtttgtgagaatagagtgaacaaatggaatgtggatgatatacacttggtaaatgcaaatgatgaaataaaagaacaaaatataaggtgatagtacttacagagctaacagtctgagccttgcctgggtcctattaatgagtcttctactttctgtgtctttaaatttgtaatggtctcttagagagagggtcctcaactaggatggatctgatctgaaaagcaaacattcaatttaaatttcaatagttctctgcttgtgcttgatctagtaatgtcttttcaaaagggattatagaaggtgaatgttaaaacaaatcattttgattttccatagtgagttaagaaatacattttgttgttcctcttctgctttctaagtaatatgttgggcttctttcttgttttgtcgttgtgaggcatagtccgaggaaacctttgttttctataaatcctgatattctttggattggaagaggcagtttcctgaataagaaagagtctgactacactgggtaaattgtcagattattttgtcctcacagaagttaaagtgtaaaattgggtgagggcattgctttgaaagagtatttttatttattcttttaaagaaagtagattaataaaaagattgatcagttcaaatacctggaatatttaaaccagttttatgttaacctaaaaaaattattttgtaggcatttcgaagtttgacctcctttttgtcctaaattgat

SEQ ID NO: 127425 - DNA, 1619 bp, Homo sapiens
aggtcaaggctgcagtgagccatgattgcaccactgcactccagcctaggtgattgagtgagaccctgtctcttaaaagacaaaacccaaatttaccgtacccccagtaaaacccaaattttggcttgaagattaattaattaatagcttaattattaagctattaatacataatagcttgcattagcagttaaggagcccaagcaaataatgagtggagactgtgctcgggtacaaagggtgggactctgatggagcagctggaacacttgattgagaagcaggagataggggttcaagttttggatttgccaccaattagagatgtgactttgggtaactcactgggtctttcttggtcacaatttggaaaatgagaacatcaaactagtctccaaagtcttaagcattttaggtttgcctctggttaaaggaatgctctgtggacagttggatttgaccagttatcaaggtaagattatatctttgggaaccaaagtaaacagttccagatttttcagccagtcttcatcagggtgttatttgtacatcctaacaaatcacagagccgtggagaccttatgatgaataaccataagcctcctggctcttcccttttcttgccatcccagtcctactatccagagacagcctttaaaaactttttcactatttctgtttttagcttcacttgtggttacttccataagccttaataatgtgtttagacttctgttccttgatttatcaactttagatgatacctgtgaagtttttgatgtgaaaaatgagaatttaactcacttttttacccctgtcattatttgatatttatattactttgaaagtcatttattaattatctttataattttaaatgataaactttaattttttgatccatcaacttcctgtagggcctcttaacttgccattttggaaaatgggattgtaaatacccccttcacgtccctctttttatattctaccttctgatacctgtactcaacttgcatattgtctaggttataaaaggttaatatttttattctgtcttccattcaccaccaagtattgtgtgctttcctttatatttagattgctgtttttattgcattcgctttctctgcctgctgtgaacatatgcagaatcataagtgtacgattactcaaaatgtttatgtcttttaaaagctaaggaaataatttggtatgtgcttaaagactcagcttattttatttttatttatttatttttttgaaatggaatctcgctttgtcacccaggctggagtgcagtggtgtgatctcggctctctgcaacttccacatcccgggttcaagcgattctactgcctcagcctcccgagtagttgggactacaggtgcgtgccaccacgcccagctaattttttgtatttttagtagagatggagtttcaccatgttagccaggatggtctcgatctcctgaccttgtgatccacccgcctcagcctcccaaagtgctgagattacaggtgtgagccaccgcacccagcctagcttattttattttttgagacagagcctcattctgttgcctaggctggagtgcagtggcacaacctcggctcactg

SEQ ID NO: 127426 - DNA, 1080 bp, Homo sapiens
aagaagcagttttataagcagaaagaccaatttgaatttttgggaaaaaagttatttgactctcactcgtctttgacatacaaagaaaatgttaagtatttcacttatttactaagtgttcttatgttcacaaggccaaatgctagtcactgagctatcttaagtatgtttttattgttatatttgaatgtctttttattattaagggtatctgttgttttgtgatctgaggtataaaattagtacagcgaatttccatcaaaatggtttcacgtaagaacaccactctgtcatttttatgtcacatttgcatggtgcttcccatttcctgtgacttggtgtggcacggtaagtagtgaaattggaattttgtcaaggttcctctgctcttgaataaaatatctcttagtttaaacattgtgttatattacacactgaatcctgttctttttcttttttgtctgacagtagaacttcatggaggaacacggagtgacccaaaccgaacatatggctaccatagaagcacatgcagtggcccagcaagtgcagcaggtccatgtggctacttacaccgagcatagtatgctgagtgctgatgaagactcgccttcttctcccgaggacacctcttacgatgactcagatatactcaactccacagcagctgatgaggtgacagctcatctggcagctgcaggtagtgttgtttggattagaagctcttctttaatttttttttttttttttttggagacagcgtctcactctgttgctcaggctggggtgcagcagcacaatcatgattcactgcagccttgatcttccgggttcaagtgattctcccatctcagcctctggagtagctgggactgctgatgtgtaccaccacatctggctaatttttgtatattttgtagagacagaaatgtcactgtgttacccaggttggcctcaaagtcctgggctcaagcgatccttctgcctcggcctcctaaattattggcattacgggtgtgagttactatgcctggcctttatcacaacttttttaagccttgcagttataacttgagcctg

SEQ ID NO: 127427 - DNA, 1038 bp, Homo sapiens
cccagacctaatgagacttattcactatcacaagaacagcaccggaaagacctgcccgcatgattcagttacctcccactaggttcctcccacaacatgtgggagttatgagagtacaattcaagatgagatttgggtggggacacagccaaaccatatcagctgtgtttaaggtgccttttttatgttctcttttctttgttttttctttatttattaaggtgcttctaaatctgttcattgacttattaattttggtaattgttaatagtttaaccaaaactactaaccaagtgttttttttcctccagttttagaatttctagtgtgtgtgtgtgtgtgtgtgtgtgtgtgtgtgtgtgtgtttcctccgagatttgcactgaacggtttccaatagtggaaaaaaatttcttttaaacaaataattttataatttacctggtaattctctctcaagtttctgttacatgttgttaatgtcatttcttgttcacgttggctcttttcttggtgtactattatatttcaatgaatactggatgctgtgtttggaaaattatttctagaaataatttggggtctagtataatgttatcttcctctagagaggatttttgtttgcttctgcgagatgcccgagggcactagcaatcctggatcatcttaatccaatttaaggtttatttatttatttatttatttattttagtatttattgatcattcttgggtgtttctcagagagggggatgtggcagggtcataggataatagtggagagaaggtcagcagataaacacgagaacaaaggtctctggttttcctaggcagaggtccctgcggccttcggccctgtttgtgtccctgggtacttgagattagggagtggtgatgactcttaacgagcatgctgtcttcaagcatctgtttaacaaagcacatcttgcaccgcccttaatccatttaaccctgagtggacacagcacatgtttcagagagcatggggttgggggtaagttaaagattaacagcatcc

SEQ ID NO: 127428 - DNA, 1094 bp, Homo sapiens
aacggcctcatgtatttgagtctaatccatctatccggaagaggcaacaaacacgtttgcttcggtgagggctcccttatccatattgttactattcctcaaatacttcctgtggatgacagacttagaacatatgtgattaggtttgtcaaggatgcttggttcgattccttgatgacagatgtagacttaaaagtattcttacaaaattaaatgcatgaaaacaaagaaatacgatttaacagatacgtaatatcacattaattcattcagaaaagttgtatgcctgctatgtgcaagccattgttgtagacattgggcatggaagagtgaacaaaacaaattgccttaaagagcttgtatcctgctagagggggaaagaaaaaaacaatatgcaatatgtcagctgatgataagtgcaatgggaaaaaaatacagtggagtaaggaaaatagaaaagtcaggaggtagggggatatagtcagttttctctattacggggatggtctgggaaatcctttttgttaaggcagcctttgaacagagacttgaaggtgctgaaagagcacacatgttgatgctggggggaagaacatctcaggcagggtgagtatcaagagcaaaggccccgaggtgtgaatgtggtagttgtgtttgaggaacagccagggagatatgagaggatgttcagagcagtagagaagagccacgccaggagatcttttttttttttttttttttgatagatgtggtcttgctatgttgtccaggctggtctgggactcctggcctcaagcgatcctcgtgcctcagcccccaaaatgctgggattacaggtgtgggtcacttcacccagcctaggagatcttatagtccaatatcaggggcttgactcttactctgagtgagatgagatgtcattgtaggcttttgaccagagcagtagtatcatctgacttatatttttaaagaatcactcaggctactgtgttgagaatagactgtggggatacaagaatggaatcagggagaccaattaggtggtgattatagtaatctaggccagaaatgatagtgtcttaaaaccaacatgg

SEQ ID NO: 127429 - DNA, 1058 bp, Homo sapiens
tgattgcatgatggactttatcttattcaaagtctagctcaaatatcacctctgagacaagcctttcttgattatcccacctaaatgaagctttcttctccctaccaagccactaatacatcctctgtgttcttgtctgtataacacttgttactacctggaattgtctcatttattaacttgtatacttatttgtggtctccccagctagaatttcaggaatttagtttctgtcctttacttctgttcagtatagctgctcagcttctgaaataacatgttatctaaataatagtatctgttcagtaaatgacttcagagttagagcaaaaatgagttaagcgcagtggtggggaacaggatcgcaagtcccctgggcagttgtttactcagtgtggacgctgacgctgctgctcaggggtggcacttttattttttattccatctgaaccagcaacttggtctgaagtaatactatattttataaatataaacctaaatagtgatcttttgattgttggattcatagccctttctgtggacactggaaggatctctaaatagtggttcagaaaggaaagcatatctaaaccaagcttgtccaacccacgtcccgcaagacgcatgtgacccagaatggctttgaatgtggcccaacacaaattcgtaaactttcttaaaacattatgagattttttggcgttttttttttcttcagctcattggctgttattaatgttagtgtattttatgtgtggcccaagataattcttcctctaatgtggcctagggaagccaaaagattggacaccccgatctaaacttttctttactgtctttttacagtttctattattctgtttctagaggcattctgactggttcaagtaaagaaaacataaagtgaattatttttatctagttgatgtgaagaatctactctgtctcagatgtaaagtacatctactgcctaagcctttggtttctaatactgtgttaggtaaactcctctcctgtgatgggtattttttgttctttgtcacatttggtgtgttagg

SEQ ID NO: 127430 - DNA, 1092 bp, Homo sapiens
acaaccaaattagccgggcttagtggtacatgcctgtaatcccagctactcaggaggctgaggcaggagaatcgcttgaacccaggaggcggaggttgcagtgagccgagatcatgccatcgcactccagcctggggcaacaagagcgaaactccgtctcaaagaaaataaaaataaataaataaagtgcaaagtttgataatgtttctgctttgttttacgcaaagattactttatgttaacatgaagatgtcaacaactctctttttccccccttattttcctcttaaatagatactgtgtgttggaaggcacattactaagttctttacaggggcatctcatttaatccacctttctgtgtgtgtgtatgtgtgttgtaaaaaattcttattttatagtcaaggaagcagagctcagatatagcttatagccataaagaacaagtacattttactggacattaattctagatttcagaacatgtgggtaatttatggcttccttgaagtgataaaattctagaactatcaaattggactgtaatagagatagacttgggttaaccagacaactctattaatcatcttatctgcacttaatggtatagagataacttgatattgatgaccctaacttagaaatctatataggatcctaagatacattctgaatcatctaaagagagtaaattatattcaatattgttctaatattatgtgttgcactattttgtatctttataaatgagaaggttagcatgatttattggaaagaatactaactcagagtgagaagatctattctctagtctcaattctactacatataaccatggttctcactttcatcttctgatgaaatatatgccctcctaccttaaggagttagaggaagaaaaataaaatttggtgtaggaaaatgttttgaaaactaaagcatcacaccaaggtattattactaattattaatgttaattatatgtattgcctatattcatttttgaataacctgaacataccatctctcagccatgctttattagagaaagttcatgaaccaagaattttaatttttctcaacaattaagtg

SEQ ID NO: 127431 - DNA, 1026 bp, Homo sapiens
ggccaaggcgggcagatcacgaggtcaggagtttgagaccagcctgaccaacatagtgaaaccccgtctccactaaaaaaaaaaaaaaatttagccgggcatggtggcaggtgtctgtaatcccagctactcgggaggctggggcaggagaatcgcttgaacctaggaggtggaggttgcagtgagctgagatggcaccattgcactccagcctgagagacagtgtgagactccatctcaaaaaaaaaaaagtcctagaaataattatgatggttatacaacattgtgaacatatttagtgccactaaatggtacatgttaaaatgataatgttatgttatgtgtattttgccattattttacaaaatttttttgaaaagggctggataaaaagtattttagtttggtggttctcaaaattggctgcatagtagagtcacctagggaacttaaaatcctagtgccccggccacactccagaccaattaagtcatagtcttcagggatggatctaggcatctgcaatgtttaaactctccaagtgattccagcatgcaggcaactttgagaaccactatgatggatcacaattccaaactgcttctccatactgtagtgtcagaatttactggcaaagcaggctcttcttactgtctgaaattatcaaaaaatgtttacatatatgatgtctttccatgtttagtaggcataatgaaattaagagaatatatatgggccagatgtggtggcccatgcctgtaatcccagcactttgggaggtcgaggtaggcggatggtttgaggccaggagttttgagacaacctgggcaacacagcaagacctcatctctactaaaaatttaaaaattagccaggcatggtggtgcatccatagtcccacctactcaggaggctgaggtggtaggatcacttgagcccaggagttcaaggctgcagtgagccatgatcatgccactgtacttcagcctgagcaaaagagcgagaccctgtctcaaaaaagaaagg

SEQ ID NO: 127432 - DNA, 1939 bp, Homo sapiens
actccagcctgggtgatgagtgaggctgtctcaaaaaaaaaaaagaaaaagaaaaaaaaaagagagaaaacttggtaataaaatgtggaagaggatgaatgggtattgtctggtactcttagtgacagtgggattggcaaagtctttctggaggacaatttggcagtgtgttaaaatgttaaatccatataccctttaatcagcaattccacttttctgaatttctgctaaactgatttcataaactgtaagcaatctaaatgtttatcagtaggggaatggctaaataaaatggaaattctataccatggatactaggcaactgtttttaaaaattagattattctagttgcactaccatgagaagatctctatgacaaaatgttgagtggaaaaaacaagttataaaatagtgtacaatatggtaccatttgtgtttttctttaatcacataaaactgcctttctagcatgtatttatgtaaatgtatagaatttggcctagaaggaaggctgttcatcaagcccatgcctctggataggagactggattgagggaggatacatggcaaagaggactttgactttatctatattatttacatttttgtacagaagagtacaacaagcataaggtaacagaaactaaccaaactgtctccttcaaagagaaggtaggactttaagagcattttgattaaaaagagagagaaagtttgataggttgggggtgccgagatacagaagcagaagtcttgccttgagagaggagtctaaatgagtgtctccattgactggccttcaaattcactaattctgaagttacgttgatcttttctccaaacttgctcttgtggtttctatgggaatgtgtttttagggaaaatgagattaagagaagccagtgttttgcttggcactactagggagtggtgtttctgataataaccaccatagtcatctctctgaacagagatcagtactacaaataattcccaatatagggcaaatgaatcactttgctttagctctttaatgccctttaaatatccattcaaataaaattgggtctgtcagcctggacggtaataattttaagttaaagtaatgttgccacagtctgaaaaatctccatttttccttccctgctacattcctgttttctgtaggctatacaaacataacctttcaacatggtttgctttcaactgccttctctttaaatttattatgtattctctgacctcttcagtagaggtggagttggcagatatgttggtctgaaagaccttttcttggtaattgagcctaaatggacatcaggagcctcaaaatccctagactcagataaatgcagagcaaagatagagggaacaagaggagagggtatttggaggatgtgtaaggataatgcattgttggatagcaaagaactaactgaatttacaaaggaaatttctagcatagcaagaatttttttttaattggataagacgttttagagttttagagaaccttttattttaaacctatctgtggtttccacataatctttacttttcactgacacaggcatgaatttgatatccttatctttgctgattgtcccgggaagtggtagtattttctattctttgctgatttggtgtggctgtactgaccaagctagagtaccttaggcccacctagagccctaaatcagaatgagagtccaggaaagcttgttccagctcaattaaaggacggtctgagaggttaggctttagctttgctgatcctgttgattgtctccctgtgtattaaagacaaaccttccttaacaagcacttcaagaagctctggtttccagaactctccaggaccagtaattaattcaactggtaatgagagcacagttccgaattctggaaaggaatcatttgactcttcctgtactggac

SEQ ID NO: 127433 - DNA, 1112 bp, Homo sapiens
aagtaatgaccgcatgagccagctgatgggtttttaaatggatacgtttctatcagcctgctgcttgatgccagagccaaatatatatggagtgtattatatcatatcctgtaggcaggagactgttggggcattgggggacttagagaggtgaagtggcaggcttggcacaggaattaacagcatggctaccgtcaaccagaactttattaggtcaacattactgattgggttcatggttccctattatgtaacaatttgtatcatcttctcgtaaaataatatctaatatttattataagaatgataagaatacctgatatttatagaaatctttaatattaaagtgttgctgtactcattctctcattaatacttaattattctcatttctgttttttcttgttttactttgtaactacaaatccacacccccgagtctgattcattgctaaaagtggcctctttttggttttcagctgcaggggcagtatgggtgcatccttagttgcaggatgctacttatatctggagtgctatagaccaccaggttaaaaggaagacagtaggtctgggaaggaggaatagatcataaattgataaactgcttttcttgccagaaatcattatcagcgattaagaatattcacaaagtagaccctcccccaacacacacagagtgtggttactatgccaggaaataagaatggcagttgtctttgtggtttaaaacctgtttggtctggatttgatttgtaaaataaatctgaatgaagtccataatgcatttaaattcacacatgctttactatgtctatatgtcagactcatggacagtggcctagcttactggaaaatttctagaagagttttagggttattttccctttttattaagttaaaggcctgtttgttttcctatattttataatcagccaccttattgaattctcattattgtttgtagtagtttttcatttgatctctttggaattctctagatataaggtgacttcatctataaataataatgattttatcagctcgcctcttatttctctcttatctaattgcatggattcctacttccagaacagtgttgaaaacacccc

SEQ ID NO: 127434 - DNA, 1013 bp, Homo sapiens
actagaacaagatgacactccttaaagtctgaaagaggtggaaaagacaacgaggggtacagttaggagatgtgttagtttttggcttagacaaagttatcaaccatatgtctctactgaatgtttcttggtactatttaaagaaagtaacttcgtttccttctgtataaaataatttgtttttgacacataatatttataacattaatggagttgcgtttccttttttttttttttttttcctgagacggaatctcactctgtggcccaggctggagtgtagtggcacgatctcagctcactgcaacctccgcctcccaggttcaagcgattcttctgcctcagcctcccgagtagcaccaggcacgcaccaccatgcccagctaatttttgtattttcagtagaaacggggttttaccatgttggccaggatggtctcgatctcttgacctcatgatccgcctgccttggcctcccaaagtgctaggatgatatatagtatatataattctgttagaagagaaagccaaagtgcaaaaacattagagacgtgaattttaaactgaaccatcaatatatgtaacagttttgaattgcataactcattttaggtgcatttttatgaatgtcagtttaccttaaatatgggcaggctgaataacaaataggaaaatatcaatagtatttttccatccatcccttcagtaaacactttttgagccctgtgccaggcactgtagagactatagataaaagataataaagactcccctttcccttaaggagcacataggtaggcggtagagaaaagcaaagaacaattgcagtgagataagggtctactggcagcaagcccagggtgctgtggaacagcagaggagaggctctcatctggacttcaggggagtggaattgtctcaggaaacacttcccagaggtgtagcccctgagcttagactagagtgggaactagccaaacaaaggagagggatgggagttctatcctgtcaaa

SEQ ID NO: 127435 - DNA, 1081 bp, Homo sapiens
caagataaataagttttggattattggggaaaataatgaacttttttcttcaggtatgttaggaagggtgctgccaaatgggatgctccaagaggtggtttctgaaactcgattgtattattccctgcctggttctttctactggttgttgacaggaaagatcagcttcatatcattctccctcttcttcattcctgatgcaattttatttttaatgggctcagggatttaaattaatggtcaagagtgtgagccttgacgccagactacttgggtttgaagcccagctctgtcacttacaagctgtttggcatcgagcagttgatttgaactctcagtagccaggctctcctattctgtaaaatgggagtgataacagtacattcttctaggagtgttatgagaactgaattactccatgtgaaatccttaggtcagtgtcttgtatacagtaagggctgaactcttgcggcatgccagctctactgggtaaggctgtaaatagagaatagagtgctctagcatatactctgccctcaaagaaatcatactcttattgcggagactgatttaagtaaaacacttagcaaacagtattacttagagtgtaactcactattgaattgtatggtaaagactgtgaacgttgtagaaattcagaggagggtgatcacctcccctaaatataaaatcagtgaaagtttagattgattatgatagatactagagagctgtgatggatttgtatacagttcactgtatgaggctgtatagtatggtggctgagagcagggttccaacgtcacatagattcaggtttgaatcctggctccaccatttgatcctgagaaacataacctctgagccttgttttccccattgttataatgaggataagactcatcacacagaatcatgtatatgagataatatagataaaattctcatcgcggtgtccaacctatagttagcatttcaagaattatagttattatcatttaagttgtattttaagagttgtctattctgaattgattatagtgagaggagattagaagatcagttaggaagaggcactcca

SEQ ID NO: 127436 - DNA, 1097 bp, Homo sapiens
taaggtcttggaaactgaagtagtaagaatggaggtaaagtgattcttttttttttatttgaaacggattttcactcttgttgcctaggctgaagtacaatggcatgttctcggctcaccacaacctccgcctgccgggttcaagtgattctcctgcctcagcctcccaagtagccaggattacaggcatgctccaccacacacggctaagtttgtatttttagtacagacagggtttctccatgttggtcaggctggtctcaaactcctaacctcaggtgatccacccgcctcagcctcccaaagtgctgggattacaggcgtaagccaccacgcccagcctaagtgatttcattttaaaagaagtatggccagagattggtggttgattaggaataggaaactgaaacacacacacacacacacacacacacacacacacacacacacacacaacacatcttctcagagttacctagttagtccctagtgatcagaacatttttttcagcccattgagccatgttgctcttgttgctcttcatttctttttttcccccactcacgtatatactcatcatgttgcttttcagtaacatgaaagtcttacttggttccttacacttggctcaattctacccctctctttgagagaaacacccagataaacttcctgaaaggcatggccaagtgagaccctccgtccctttagtccagtaacaccccccattctccgcccgactgtagcttggggtctaacaggccctcattaaagaccagcaaaacttgatttcattgagacttgcagccaacaccttggatattccagtgaagtgtgtgtgtcctgggaactctgtacatagtggaaaatatgaggcacatttgggctctctttgttataaggaccagggcttgtttctaaaggcaagcgggtaatggtatcccctgagggcttgttaacaaacttagatgcagctgaggtggctcagtgtttactccaaaggaaggagaatgtgttcactgtggcatagaggaggaataaagagatgttgaaatctctttgcaatcaggtagttcgatgccccaatgagtgttag

SEQ ID NO: 127437 - DNA, 1068 bp, Homo sapiens
ctcaaggaattttagaatttgtctttttttttgttgtgaagattttgcttttaaaagtcatattttgaaagaaaaatttgctcttagtcttttttttttttttttattgagacagagtcttgctctgtcacccaggctggagtgcagtggcgcgatctcggctcactgcaagctccgcctcctgggttcacaccattctcctgcctcggtctcccaagtagctgggactacaggcgcccaccaccacgcccagctaattttttatatttttagtagagagggggtttcactgtgttagccaggatggtctcgatctcctgacctcgtgatccacccgcctcagcctcccaaagtgctgggattacaggcatgagccaccaggcctggctgctcttagtctttaagatgaaatattattgacttaaaattagacatattattaaaataaaatggggcttttatatacggagtgatatttgtccaataaaatgggatggaaaacttagatcagaaatcttctctggaagagaagtcagggatggtacaactgcttttctttcctacaggtaaagattagacgcttacagataaaaggttgatggaaacctcttatttatagctttggttttgaaatgacttttgtctaaaaattgtgaagtggtctagctcagggcctttttaatccctattcacctttttaagtgaacataatctttttctaggctgggcgtggtggctcacgcctgtaatcccagcactttgggaagccgaggtgggtgaatcacctgtggtcaggagtttgagaccagcctcaacatggagaaaccccgtctctactaaaaatacaaaagtagccgggcgtggtggtgcatgcctgtaatcccagctagtcgggaggctgaggcaggagaattgcttgaacctgggaggcggaggttgcagtgagccgagatcacaccagtgcactccagcctgggccacaagagcgaaactccgtctcagaaaaaaaaaaaaaaaatctttctagcagtttagtttggtcgtttcccataaagttgagtgtaaaag

SEQ ID NO: 127438 - DNA, 1642 bp, Homo sapiens
atagaatcaagaaaaatgggtatttatgcacatagtaaaagcatatagcaaggaaaagaaagaaaaatgggacacactgctaaaatagtacttgctataaacaaatggttaatgtcttcctattctacagagcatttgtgctatgtagggaggtttattattttgttgtaattatagaggcaaactgtatttatacagtttggacttgcagtgataattttaaactttaagtctttgttttagccctgcctggatatacagtgagtcaaagggaagagctggacttttcaggatattaatcagccattactctgtatttgaaaagcataactataaatcaaattaatatttagtgttaattgaagagtgagtccaggttgctgctgactcctcatattatcattcatccttggctataaaaggacagtctcagatggtctgccttatgttactgtgaggagaaaagagaaaaggaaaaccttgtgattgacaaccaaaatggcttttgcattgtgaatatggatcagagctttcactatggcttgcaagcactcagctgatattgataaggaagaaactgataatgagtgccttctgtcctcaaacactcaattaccgaggttctgagaaactctcaccattagctttatagctatgtaagacttgagatttctctagccattaatattatttcaaaattactcttggctttatctattagcactgttatcacatatttgctggtaggatcacaaccatggagtcagtagaaagacccaaggaaggcattgaaaggatggtttgtcttggctgcagtgctgttcctctattcatcatcctctctcctgttcctgtgcccgcagcgaagctgccgcccatgctgtcgccaccctggctgaggccaccttacaaggtgggggacagatcgtcttgtctggggaaaccgcagcagccgtcggagcacttactggagtccaagatgctaatggtaagagagcataaatattttattaaatttcttccctgtttccacttaaaccttcctgacatgactggcaacaaagccttcagaaagagtttgagcttcgatttttttttcttcattggtagacatttcatgcctaggaatattctgggagcctgtgattcctttcactagtaggaaacatgggggttcctgaaggaaaatactgtgataatggctacctaattgaattgttacttaaaaagtgattatcgtcttgtgacaagacttgctgagaagcaccttaaaattcactgtgagccacattttgtcttttactgtctcatcggatagggtagatcaatgtcctttactgtagcagagactctctcatgggcaggaccatcatggaaagttctgactacatcaagaaaggcgccaatgtctcacctgtgcttggggtcaggcagcaggctgtgatgccggtgcctctctggttggtactgtggttctgcttcctgttatatgtagcctcacgaaggacctttggatttagccaattacatgcccctaccctgagcttcttccccagctctttgacttcctggacattggtgaatatcctgaataagcaaaagggataaaattcatagaaatatggtggcaaaaatatacaac

SEQ ID NO: 127439 - DNA, 1513 bp, Homo sapiens
aaatcgcttgaacccgagaggcagaggttgcagtgacctgagattgcgccactgcactccaacctgggtgacagaatgagactccgtctcaaaaaaaaaaaaaaaaaaaaaaaaaaccaatcctggaatgaggatagataaataacatactttcatcatgtaggcagaaggttccttaatggcattagtggcagaaagaaaagtacctggcactttgtttatggtaggtgcctaagaaccgaatgctctgttagttggaaaagtctttgaagaaagacatagtgctgtgtcctcctttggaataggaggaaacaaagtacctctgtcccgccagagaagaataacataggaaatgcaaagagccatcgtggcttctgagaatcattttccaaagatgccaaacaaattcaattctaaaactatagcctactttttctgtagggaaagaggcttttgtgcttatctaaatctagacagagttgatctcaaccagaatgctgtaggacaaaggacatcttatagccacacatgttcaggatgaaatggaccatggttggaattaaggagaacctctctctctagctagactcctacttctatttttttacctttttctattcctcatcagagtcctaaggcaccctgagcaaagggtaggatatctggcttatgtggcattcatgtgaagtgtgattgctcttattcactatggaactgctaaaaataacttcccatgtgggttcagtaggaaactttattatccattctaatcgacttgacctgtctgggagagaacagactgctttataattctggctcctccccagcatcaccttttcagatggatgaatttataataagtccaaggaccctctggctctcggccaagtagaaccgttcagccatacaataaagttgaaccacacccgctactattgattactggaagctgcctcttttcagtagcattgggttgtgtgaatcatttggtgtgatttcatgttgttggctacatttgtgatctgggaaaattctggttcgcatcctaaaagccagtatttcccccaaagcaggccatcctcagtctgtgactgccagtacttgctgaactcaggccttgagagttggaagttatctctttctgaatgcagcatttctgtatcaaatcagacccttgagttgtgccgtatcccagcagttttaggcaaaggccaatcatttcatctgcccttgggaatccaaagaatgaatctcatatgggatatgatccaagtaactttgataatcctcttatcttctaacatttttgcccacagtgctatagtatttactttgggattggaaccagatttttccctcttaatcagcaattttgatatctggctagacttttagaggttctctttttcatcattctttcggattctgtcctgttgccagagtttgttgcttctttttgtttttgtttttgttttttgagacagagtcttgctctgtcacccaggctggagtg

SEQ ID NO: 127440 - DNA, 1030 bp, Homo sapiens
ggctatatcaataacactgtggtctcctggcaagttgtaccctctctgtacaggggaggacaacacaaatacttcatgagctttgtcttccagtgaccttctcagctcataaacagcatggctttgcttttaaaaaaaaaaaaaaaatctacccatgtgactgcagtaatccgcagccagtaaacagcagggtgggagggttgcgaggagaactgatctatttttatgcactgcagagtccaagcaggaaaacctgagaccggagacagtggtgacatcaagactcacttcctagtgagtttattcatgactcaggccatgtgcatatttccacttggattcctcacaagtgcaagtttctcttctaggctacaggtatctgcagccaggtgctgtaatggatttatagtagcccgccaaaagatcaaatatctgaagcctgacgggtcacaaagctgacaggagccatgactattgcatgaattccagatttcacagtgaaacagagctgctgctgaaaaatgggagcacagagctgttcactggggctcttgattctagacactcaaagaggggtacagttctctgccccatgtgtgtttctcacccaaccttttcatggtgttgaggaggggaagggacagctcagtggtgattcttcacttctcaaacgtgtcctcctcctctgtcttcataatgacctcctgaagtccaaagtgccttccaaaatagctcttggaaagaggtggcagtttcctgactccccaatctcccccatcctgggagatgtgttgatggcactaatttgcggggtagcagagactatagtcctactctctttactggctggggcattggaggcatgcagtaactgttgactaccactgctacaactgctgttatgattattaccattataatgattaatcactcacaccgaatgggaagggaagtaaccttcagaggttcactcttagtacttctggcacatatgcttagggccagggccagtgagtcttcattcgcagag

SEQ ID NO: 127441 - DNA, 1025 bp, Homo sapiens
ctctagtcgacatgtcagggccccaaaggaatcaagtccctttggcataccttcatgtcctcttttttttgtttttctgtacttcaatagatgcaaattcatttactctttggtctgcctgtgttgggtattctcagcttggggaaactcaatgagccagcacaccatcctatgaacagaacaccaatctgagccagggacattccgagcagacaactcaggtcagggcttccggacagattcccaaggtccctgccatctggcagatggacaccactgactgtggtctcctctccatccacggtgtcctcaaggccaagttacatgcttctttgtctcattctccttccctttaggtccgcagatctttcggagtctttgtatgtaaaggcagattttggtcttagattattccagctccttataaaccaagactgaatcttgtgcctgtcattgtgagcgctattctgtaaagggatttttttttctggcataccaaatccagagccataattggacaagtttaattggagtcatttctattcaatacatggatggcaaagtgggttttaattgagcatgtaaaaagggcattaatcactgttcacacaggaatcacaatattagaacaggaaaaattcttataaagtttttcaggttcttgggtaaaggggactttcctctttttatttatgcttccattaggattttgaaggaatgccagtgcactgttattaactctaatagcttgtccctcgcagccaggatggtttggggccctctggctctcaggttacctgtgtaaatacagggattcacttgccagcacccagctctgacatttgcttaataaagagcaaatgtgcagaacccaacagcagcagcagcctggcagaagcagtaatctgaacaggataaacatgcttcctctttgtgcgatgctctttctccatccttctgccaagagcaggatatcaaatgaaggggaggttgtggttggagtcagtgaagtgaatgtctaagtg

SEQ ID NO: 127442 - DNA, 1011 bp, Homo sapiens
ggacagcactcaaacagaacgtgcccatcatcacaggaagctccagtggaccacactgtttgaggttggtctgaacctcttgaaatgcctcggctgcttaaggaagcctgggagtttctattgcaggcttgttggaaggaaaaaatgaaatttgcctcaatgtttctggaacaactccttccagccatgttacctagactgtgttctttttcacctttttgtatttttttctccaaggatttcatgtcctttgcctactcctaccccttgtttaaaaaaaaaaaaaaacctgaattataacaatgaaaaggaaatttaattttaggaatgtccactttcagctgaccttctccttggccttctcctaattaaactttcacagccctgctgttggaccagacagtccttttctcattaaatggagcaccttagtaaaacaagagggcatgtgaacactcgggccaagagtgtgtaaacaagttgtgcattgtgtggacaatgctgctgggtgtggaacgctgggctgccaacactttccattttcagcaactcttgggaccaaggacagggcctttaatcttgcttcttccatttgtctgtgtctagtagctactacacagttgctttgactcctggagaaagcccacgtaaaataacaatactacttcaaatttagacagtgtctttttttctcaagaacttaaatcatgtaagcatgatgttatttatcctcatagtggtcctaagatacagaagtggcctgttggttttacaaatgtgaatatagtcaactcttacttgttacctacagattatctgtcacgcagattactcgtgacacattttaaatccttgggcaatttctctgagcgagccagtgtaagcctggaccatctcctctgccccccgacccagctgctgggtacttagggaatacaaattagttttcatattagcttaaagaagacataattaggaaggtaagtctgctacaagaaaatcacatcacaa

SEQ ID NO: 127443 - DNA, 1081 bp, Homo sapiens
agggtgatgacatcacatcatactgccctgattgtatttttcacattcttaatattgaggagtggttctgcctggttgcttattgaccagtgcactcgattagcaaccacttcatctacgtcatgtgcagtgccagttctgaccatcactgtgtttcagaagggaagctgcctgccagtccatctgccctgatttcatggctgttatctttaatctttacatctttgaaggcctttggtgaatgatgtgcttcctggcaggagaaaatcactgctgaaaggagatctgtgttgtctctgcttttctttctgtttcccgagagctttagtctaacatctgtgaccccagccagactccatcaaacttcatactcaaagtcatctttgaaaagcagtggcatttattatatacctactatgtgccaagcactgtaatagattttaatgtgtcatcccatctatctagtttagcagccctgtgagatgagtgatcaccattttacatatgaggaaacaggctcacaagccattaaacagcagaaccaagattcacatgtaggtctttctgactgggaagcctttaatggaaataaacagcctactttttctcacataaaatgcacctgatctgcagcaccatgagaatggttgtggagaaaattcgacttcattctgaatcagagtaaaaggtgttaaggctgtttggtctgtggagggcaagactaaagggactaccatcaagtttctgaaattcatgaagagtatgatcaatgatacattttcatatcatattcaattattgagcacctactgtgttcaagttgctcaacattaaaagacagtcctcggccgggcgcggtggctcatgcctataatcccagcactttgggaggccgaggcaggtgaatcacgaggtcaggagttcaagaccagcctgactaacatggtgaaacccccacctctactaaaaatacaaaaattagccgggcgtggtggtgcgcgcctgtaatcccagctactcaggaggctgaggcaggagaatcacttgaacctgggaggcagaggctgcagtgagccgagat

SEQ ID NO: 127444 - DNA, 1267 bp, Homo sapiens
gaaatggctgcttgagcaaggaatggcgtgtgactttttccatttcctgggatggatgatcagagccacaactgtggacacagagttctccccatattggaaccccacattctcaagagaaccgccaaccacgggagcacaaggatacaacgggctcagctgcccctggccaccaccccagtggtcccgccatgggccatctaagatctgcaaagatgggtggagctattagagtcgcaggtctgggggaaagtgcttaaggatttctgccttccctttcccatcctccctccttgcccacccctctatcccccacccaaacccccaccccctgcttctggaggatctggaccatgagcagagaagggaagtgtctaccaggaagaccacgttcccaacaccgaggtcctgcctcccctcaggaaaagggcagcacatgtacttgaactcaagtttgagactgaagcttgaaagtgataggttgaatgatggtacatgcttacacagatacagaattcacccaaaatgtcattaaggagctagaatgggccgggcacagtggctcacgcctgtaatcccagcactttgggaggccaaggcaggtggatcactactcaggaggctgaggcaggagaatcatttgaacctgggaggcagaggttgcagtgagctgagatcccgccactgcactccagcctgagtgacagagcgagactccatctcaaaaaaaaaaaaaggagctagaagggaaagtcaacagaacaaggtcaaacaaggtcaaggcagtgaccatagaaaataaaaccatgttgtgtccagatccaccaaatcaagaagcctgatgcctttggttccatgaacagaagacacctcagacttgtgggttagtcagtggcaaggaaaggttccatttccacccaaccctaagagacacaaatccgttttcataaaagtgtgagccccaccctgccccaaggatatgggggatgggcacctctgcctgtggctcacctcccctgacaagctccagtgggtgctgtgcttcctcttcactgggaggcttgttcaggaaatccagttcactccattattgaaaacaactccatctccaggaaaagttgaaactggcagttttagcatctgatgatggagccttctctgccacttcaaggcctgctgcctccttttccagccggcctctcaccccaggaaacaccagcgaagccagtgcaaggagaggcctcaatccctggaagattgaggtcat

SEQ ID NO: 127445 - DNA, 1172 bp, Homo sapiens
gctccaggctgtggccctggagtctgaatcgaggagtgagggaactgggggatgtttggtttcagggctttggcctggctcctctgggtggtgaaccttctcaccctctcccctgaaaggccctgttcagggtgggctctagggccccgagggagggtctcctaaccttccacaggtcactaagagtggttccttcctgggctgctggctgggaggatgagggcagggagggcacgccgtgcatcacggacatccagtgatcctgctgaggccatggagggccagatgggataagcctccagagatgtgcaggaggagagtgtacaagtcacttgtgtaaatgcgggactggccccctggggtgcaggtggcccatgggctggacctctatgcctccagcattccacttcatggatttgttcctcctgacgcctcagaacctgagacaaagcctccactcaccttcccagagcttgtgtttgcagtgggagctcccctgagccggagccgggccacagggtcagagtgagtggcacttcccagagagttgggcttggtgggcagacctgctggggaagcccggccctggagtctcctggcctgcagatggctcaggagccagagtgggagctgcgcgtgtggttgagagggtgtgggtgcaggtgtaagtgtgtgtgtgagtgtggcctagcccgcagtgaacggtgcaaatgcaaatgtgaaggcctatcccctgctccccagccctcggcctgccagccttccttctctggtgctccccatcccccaaaccccttctatcagcccccatcagccctcctttctcctcacctgccctcggagggtcatgtgtggttccatgacccaccaacccctgtggctgggcagggcggggcagacatctatctggtggctccaggctcaaccggctccgtgcagctcactgcgctcttttggggagacacaggccgagtagggaaggtctgagccggcagctcttgagacagaaagagaagggaactgttctcccgcaggctgcactatgcatgttacatgccgtgagcacaagcagacgctgcgtaaacaggctggctctgcagggcatgaagaaggctgctctgagctagggccacacggcacctgctgggacacagggaggggtggggagtcct

SEQ ID NO: 127446 - DNA, 1336 bp, Homo sapiens
cagaggccaaaccttccccaccaagcctctcctttcgggcagaggtgtcctccccagcgcccaagcccaggctgccggtccggtctgggtgccaccgaggtcctggacttggccctggggatggcctggatctgtttgcatcttaagccatcatcccatctcactccaccctaaagggcaggcaggatgggaggggtggtggcggtggcggcggcagcggtgtcattttgggggccctgccaagtcagctgctcccccagccggggcatgttcggaaaatgagcctgctcatggtgggcccatactgcccaggaggcttgagggcaaagagtcccttccaggctgcaggggaggcatggggatgcagggttgggggcaggcagcctgcacccttgctaaaggcttgagatgccttcaggacacttcaacaccccttgggaaaggacctggcctcatcaggggaagtgggaacacggaagtgtgctgcccttgggtaagtgactggcggtctggggaaatgccactccgagaatcagatcgcagccagccctcaaagggtctgggtgtgtgcagggctgctgggtgtgtgcagtgggttctgtggtcaggagagtgccgtctggatgggagatatttggttggttttagcttggcccattcctgccactgactgatggccccagaggctgcctgttcccgttcctgggtagaaggtcccagcgccattgtttgtccactgcttttagggaagaggccttggcaagtggaatgctcttcctcccttggacttgatagggaggaggaatgttttgtgtagcaacttccctctctccctttggggtgggcagcctgtgagctttaggctctagggaatggcttgggagcatctctctggattaaatggagcagtgacgtgggcttagtaaatagcaaaacccagcccacattagccatctcttccccagcgcccaggggcagggctctctggcctggcttgtgctggttcccagagtccctgctgtcaggtgctgggagtggaggtgccctcgggttcccttgggagtggtgaccacagctcagggcctgggttggatcctggtggctgccctagggatggtgtctgctccatgcctgcccacaggaactgcaggttacagatatgaggggaagggaggagaggagggggctgaggagggaccgggaccagcaggaagggggactgtggggttgggcctccacaccagggcgaccctgcaggaaggaccttgtcgcagttgcggggatgggcgcctctgtcctggccctgcctggaccatcctaactgtctctgtctctt

SEQ ID NO: 127447 - DNA, 1087 bp, Homo sapiens
cagcactggtcaccatgttcctgctgtgcagtcaactggacccgtcatcctccagctgccagcttcaaccacacacatcccccacccgggcactccctggctcagacacctaaaatgactcccactgatctgggctaagtccaccaacccttgcctgaggctccctggggagaagcagccccatcaggggctggcccagtgacctggggcatgatagctcccagctggtcccaagtcggccactggtctcctgcttgattgctgaccaccagatttcacatgggtccagcctggctggccaggctctccccagctttgacagactaggtccaggcctcccagcctcagtctctgccatctggggcatccttgggagcccaggcctgtagattcagagctgagacacctccaggccctgggtgcctccatggaaggtgtggctggtggcggaagagccacagtgacccagctctaccactcaccaacctcttcagccaagcctttcctctcaaagcctcaggttccccatctatgagataactattttaaaaaattacaagccccacagggctgaggtgggaactgttgggattatatatgtaatgtcacctgacacccagatggagagcataggccagttagtcatagcccagatccagggacccaggaagctacattaccagtgtgtggtgtgtgaaggggaacattggcctctgctccagaaccttctaggggcaggcctgaaaatgccctccaactccgagccccactaagtatcctcctcttggagctgttcggagatgacccactccacagcaggctacagctccagagacggtagcccccctggaaacacccaggctgacctcaagggcagcccacctgcctggagctgcccccttcacaacctgcagcagaaaagaccaggccctgtgctgccagccaaggtctcaccccaagcgtgtgctgggagcctggctgggcctttccaacccacggcaccattcaggatggccctacagatggtttcagactcccccacctctgccctgggcggccccatctgctggcccagctcagattgctg

SEQ ID NO: 127448 - DNA, 1896 bp, Homo sapiens
aggagtgacttcctgagatcaccacctcatcaagctggattgtcctctggggagatagaccagctagaagggcagagccctgtagtgggggtgtgtgggagcaggacaaagagtcctcgggagcaggaagggtggagcattaagcagtgtctaggggagagcggatggctttggccaaggtacccagatggagctctgaggtccacgggaggtagttcctgggggtaacatcgccaagaggtctgcatagtttctgggccagggcacctgctctgacccttccaggatattttctagccaccctgccttctgggccaccgctgacctggagtaggctgagactctagtggccactctgcggaggccccagcttgcctgccctgggtgccagctccccagagaccctccctcccaccctctcccttcttcccgtccttccccagggcctgtgacaccagaggcagggcctccacagcaacttctctctaggcagctgctctggcaaccactgatgcaaccttcccagcccctccctcgctcctgagcctccgctttcctccgcagtcactccagagccagccaggagccactcccttgctagagtgcatccgtgcctccggctccctccaagccacctgggtggctgcaggacttctcttctgccctcctttcctggccttttcctgccttgatcctaggccggcagcagagatgcccagcctgggcggttcacagtctggcccaatctggtctggtttgggatgggagtgggggtgagcagcagattcggtttgttcctggggctctgtttctgccacagggcaggctggggggtggaggataatggagaccaaagtgcctaggagcctgggctgctggtgtctgggctcagaggctacgagaggcatcttggatgtcccactggtcactgcccctgtggcaggttgggtagagaggaggctctggccagctgcttgcctctccgagccagagttactctggcaaggagatggatggtcctgacccactccctccccagcctggaggcgcagtctgggtgatgtggagggatgtgggccttcaggtggagataggagacaccttggtgtggtcttctcctctgcaaggccagaaggtcagctcctctcccgcactgtccctgtctccttgaaggtcatcttgggctgatggggcatgtggatcttgtgaagaggtgggatggggtggggggtagagaccgtagcagccgctgctgagggcctgctggggggcccccaagggagtgggcaggctaggagcagggaacgggcatcgtgggccgctggtctctccgcagggtcggcaggccgcagagtgtgactcctgttctgtgtatggcactggtagaattcactgtgaacagtctcagtcagtgaattaccgaagggccataaacagagcagagacagatccacgagggcctccggagcaccttacccacttctgccttgagtgctcctagacgtcggaaacaggctgcttccaagggtgcagggatgcaaggcccctcgtccagtgtgtccccagagagcccgcaccagtgccatctgcttggccgattttggcactagcacatttttgcttgtgtctctccgctctgagcaatcatgtgcagtgccaatatgggaaaagcaggacccgcagctgcgtccgcctcccctgcatccttgtgtcagggccccagcctgctcctcctcaaggcctcctcaccgcctccccagcccatctggctcagctgctgtgtgagggcccagcgctggtgggcagccagatcgccttacactgcctggggccacggtagagctgggagcccagcaatctgagctgggccagcagatggggccgcccagggcagag

SEQ ID NO: 127449 - DNA, 1117 bp, Homo sapiens
tgtccccattccagccctgcgcccctgggtccgggtgcgccccctgagacaggtcagccttgagcacctttctgcggggagactgcagagatcgtccagtggccctacggtgcgccccagctcccaacgcacttcccctcccccctcccagggtcggatttccaagcacgccacgccacacacacctcggctagctccgggctcagagggcgctggggtggcagggcgtccgggcgcacctcggctagcggcaccctagcccgagggcaggaggcggggatagaaggcgggcgacgggaccccttggggccagacccggccgggttgggcaagcaggcggggctcccggcgtctccgcagtcccggacgggcgtgccctgcgccgcgcaccaaccggagccacattcaaggtgaatcatccccggcccgccccctgcccctccccgcctcgcggcacctgagccaatggcgctgcgcgaggggcgggcggggcccggggcggggggcggtaaaaccctcctggagtcattctctgtgcactccgtcgagcccccgcgcagccgtgccggagccgcagggcctccgtccagccgcgcggtccgggcagcccgcgccccctgttcttccggtcctcgggcccaggtacccctctggacctcccccgcctgcagcgcggaggcggctcctcttcaggtggccgggccggggccttccccggcagacctgtcacccgacacccaggaagcgcgcggccgggtcccggctcccctttgttcccccgctgggctcggcgctccggcgccgccccctctcgcggggcagcggaggtttgggcccgggccgggcgcgcttcaagctccgtccatgcggctctttccaaaccggggccgtttttgcctggcttctctggtgtggactccgcgcggagctgagaggcggctgtgcgcccagcctggagccggcgcaggtgagtgtctggggccgggagcgggggggcgggccgggcggagccagagcggggctcagtagaggaggcggaggcgggcgcccgggaccggccgcactagaacccgggtgcagggcagaagtcccggcgcagctggctttcggggatgac

SEQ ID NO: 127450 - DNA, 1052 bp, Homo sapiens
aaaagtaaaagccatttaaaaaagttagcaagattttttatcgacttcccaactgggcttccagccttgttgaatgaaatcatctatctctgattgggcgcaacgaactgcatttctttggacttctgaatccatgtttgtgctttctctggcccgtgaacacctcggcgattctgttagggatgggatgagtgggaggaagccctttgagaagggggagccggccctgtcatgcgcaggttttccactcatctgaggaagagccagggctctgaatttagcctaacactcatcttggctgtgggcttgggaagaaatggccattatttacagattgtatttggtacatattgtgtgatacttgaaaagataaaagggactgccagcccctaactgaaatctgaagctttttatcgcttatttttcctcgccctgtctcctcccttccacctttctccttgcattgtgatgatctagtaggcacgtctgtcaacaggacacatgcctcctctgactataacctcttaatagttgtgtataatgaaaactgtaaacttttttaaataaacgtgtatataccttggcaaatggctggaccttgatcaataagataatagccctcatgattactctcagctggttttctaaaataccctctctgttctggctcctttgagcagcagacgctggcttcttttggctgagcagctcttagaatgcagatgactaaattagtttgggaagggagtggcacccttaggcagtaataaccaagaggctctgcccagaggcctgtccttgaacctggaactcagatgcacaactgctggctatgaacggggctgtgaggctcctccactagagccgtggaaagcccgaaggtccctatctacccccatgcctaaaccttctaagccctgtcaactcacgctgagtgaggatactccgtggcctggagttcaaggacagtgcagcttcctgctgggactgatctgcctaaacaggtggtcctctgccaagtgctaagcctcctgggagatgaggaacggtgg

SEQ ID NO: 127451 - DNA, 1051 bp, Homo sapiens
cctctgttagtgctggaagctcctgtaattgccgcatggatcccactgtgccctcttgttctgtgcaagtctgtcctgtctgggcactaaccttggtcccatgcatgtttatgttctgggtggggctttgcctctccactgggaaactgacttttgctgggttgaacagagtcccttatgctttttgtcctctccctgcgcctgggagaggtgggagtaggagcccaaacacacaggtacagaaagatctggaagaaggcctggcagtgaatccaaggactctgggcccccaacaatagatggtagcgtaagtctggagcagcggtgtttcaccaccaaatgcctttccaggctgcccttccaacactcaggagagcatccagatccctgggcagaggctctacattcttggctttagaggtggtggcagcggcagcaggtcagagccacttctggcggtttccctcccctttttagtgcccatagtttttggatcctcccttgagttttaccagcacaagccattctttgcccctgttcacataactgagctcaagctcttgccaaacaccaacaagcaagatggttgcaacctggcaacattgaatccaccacccttgggctccctctggaagccccagcaccggggggcttttgggcacagggtcagtggtagccatcttagacactgacatttggctttgtcgtcaatttcatcaccctccttgaggttactgtgcagtttcaaccagcattttatcctagtgaggtcattatcaggagttgccatatcatctctccagtacctaacatttctcatccacttcaaaagctgttctgactgccagctggctgatctaagctcctgaggaatgtctcctctcaaaggaatttttccctccaaaggccccctgaagtcctagttggcattggcctggcacatgctttatgttaggcctcccgttgggatggctgagaatcatgaaagacagatcctccgctagcctctgtgggtcaagtttctggacaccaagtctctgggaactagtgt

SEQ ID NO: 127452 - DNA, 1059 bp, Homo sapiens
aatacattaaagagggctgatagtatcaaattctagtgtcaaaaaaaggtcaatatttatcttctacaaaggaagacgcaaaatagtcaacccattagaggttaaaaataaaattgttaaagtttgaataaatatttctcaattaaggtaaattcctacctaatcatgggctactttaatctcatcaaaatcattagcataaaattttgttataatgaatttgaagggctctaagtctcaagtctgcaaaccttttctgtaaaggaccacattggccagatgtggcctttatcacacattctgtttattattttttaagacagtttttaaaatataaaaacattcttagctaggccctgtgctagttattcaaatctggtaggcccatttggccattcagcttatcttcctattgcagtgagtccccgcaactctataggaggaaaaacaaagccacaagggtgtgtttttgtgtggcttgcattttgaataggtttctgtcatgtcttttcctattgtgtggaggctgttcacttgaaaacagtatgcacttagagtttttaggaacaagtttgtttattcagcagttcttaaaagccgtttcagcagtcttattcagcctagggttccaccaaggctgtagcagcggaaatctaccttcaggtaaattatacatggaaaaaccactcagagccgagtggtgtctccgtatagcagcttagtcctgagcagattgagcgatggtttttgccagctgcttcaaaaacctgacaggcaggatctgtttagactaaaatcgattcctaaaataatagacctggactgaccgtaattatgtaactgcagatctaaaaatgatgaaggatttccttataaattactatggaatcatgactggtcctatactatctgggagatgaaagtaaaaagaaagcgtggggctcccatttccctggtccctgaagagttcttggggtgctgcagcacacacattcccctgcaagctgagcctgctgtgttgctcttcccaatacccctttcctcagggggcaaaatgca

SEQ ID NO: 127453 - DNA, 1063 bp, Homo sapiens
attaaaattaaaatgtttaaattggtattgaaatgaatgtgtaatacaagtcacatgtaatagagcacactcgtatggagaatcatccccgtgtgaatatctaagaaggtaagcagcttgactactgaatgcaagtgaattttaggtgaacttgcatttcccatgtgtgacatgtttgtttggtttttcagatcttaccaatatatttgagtccttcctgcctcagttattggcctatcctaaccccatagatcctctcaatggtgacgctgcagccatgtacctccaccgaccagaagaatacaagcagaaaattaaaggtaagaggatgggtagtttaacctggagacaaaagaacttaaatctgttgggcttcagtcattaaaagtccttcttaaattacttagttcctaatactttttcttaggcctaaaaagagacagctgtgggctgaagtagtgctcaccaacctcgggtggcagtagcaccagtttgctcatcctttgcgatttagaatcctattttcccatccttaaaacagtttacgtgctgatgggatatgagtttcatttaaatgaagataagtttgcgactggccgtggtggctcacgcctgtaatcccagcactttggtagcccgaggcaggcggatcacaaggtcaggagatcgagaccagcctggccaacatggtgaaaccccatctctactaaaaatacaaaaattagcctggtgtggtggcacgcgcctgtagtcccagctactcgggaggctgaggcaagagaatcgcctgaaccaggaagcagaggttgcagtgagcctagactgtgccattgtactccagcctgggtgacagagcaagattctgtctttaaaaaagaaaaaaaatctaaagctccacctgggttcattggattttccattttacctctgtgtatgtttcagaactttcatagtgaaaagtctagatacatgaagctccaccaagaagcaaaggaattcaaagtttgtgaaatatacctgctgcttttaaccaatggcaggcattagtatctagccagttttt

SEQ ID NO: 127454 - DNA, 1045 bp, Homo sapiens
ttgttgtaaggcagagctgctctgtgtcaatacctggtgtgtgagaacaggacgtggtagctgtcatgggaccctctagcccatcattctctagacctgcactgtccaatacaggatctactagccatgtgtggttatttaaatttaattagaattaaataaactgaaaattaatttccttattcacactggccatattttgagtgctcagtagccacttatggctagtggctattggtttaggtgagcacatataaaacatttttatcactgcagaaagttcggttgagtaacacagctctagattagtctctaactgctcagcttcttaaccttacagtgataagagccacctcttataggtaagattttctagagcaaagttgggcagaccttgggtacttgtttttgtatatgtagttttataggaatacagccacatcgatttgttgacctatactttggctgcttttgtgttacagtggcagagctgagttttgagtagttatgacagagaccatatgtggcctgcaaagcctaaaagtatttgaccctttacaaaaaggtttgcctaccgcttttatctagatcagggtttcttaacctcagcactgctgacattttggtctagataatcctttgttgtggggctgtcctgtgcattgtggtgtttagcagcttccctggccttcacccaccggatgccagtagcaccgcttagatatgacaaccaaaaatgtctctagacattgccaaattccatggggagcaaaatcacccttggctgagaaccacaaatctcaagcaatgtggcttggcaaagcattcatctgtaatactgcaaaggagcgcccattgttaaaagcaaaattggttgaaagagctgactaaattaatgagtagttttttatgctacttagtatacttcagcattgtctccagaaacaggaatgttttatataaaacatgacaaagcagctggagtggggcagagacatggaagcattctcatgtccttccatttctcaggggtgctgcagttcac

SEQ ID NO: 127455 - DNA, 1140 bp, Homo sapiens
ggttctaattgagtctaaggcaaaagtaagagctgtttgctcatcataaaccatatactcaggaatcttgggacttcctttaaaagttaagacaggcggaaatggggtcggctgactgtactctacaggtttaggtcaactgtatctggctctcttcctttaaaaaaattgaaggttaatgtttttagataaagatctttgaactgacacatttttatcgttattattatcgacacatttttatcgttttatcattaacaaaaatctagggaaaaagtgttctttatttttctacagatgagtatctttattttattcttgatttatagttttagtcttctctgccagtgtatttatcttgaaagaagactttctgcacatctgcacatttgagagatgctcctttcagaagcacccttaggagtaatcactgtgttagccacttgcaggaaggccttattgctttaagatggcagagccatcacatcctggcctcccgaagttgtcatcttcacccaaaactgggcctcatgtgtttccttttctgctcttctgttttacaggtgtgactcagcacttctgtaaaatggatcaaaaatgtgttaatgcaggaagacggtagatacaggaaggaagaaccaataattaagggttcttttatttgtttggaacaaattcataggcaaagccttttattggtagcttgaggaaacttaaaagtagtaggaaagggtataaaatctctttctgggacacgctaaactcctagttttataacacgttgtctgtgatatttctctagccctgaagcacttctgaacattacttcagaacataaaacctatgctttgtttttaaaggttttcgttgttatgtaatagcatccagctgctaatccttttgagcagcacctgtaataataatatggcaggaggagccttccgttcgctgtgtgcaggtgtctgcgggttacctcctgcggtggagctgcatgaaaacaagcacaccgtctctgtgaatagccacagaaacatctgaacgtcctttgcttagcatgcttctttgcacttgtgagggattctttggggaggagggtgatcatctctgatccatggatttagcttccctgccagcgatggt

SEQ ID NO: 127456 - DNA, 2093 bp, Homo sapiens
ttctgcctgcctatccgattggttttactgaagttttccttgaggggctgtctgtcatcttttagggccctctgtttgcaagtttttttcaaaaataacaactgcttagttgtgtgcagtgtaggactctttataggtttttgactactcttcttttcttgtagaatttcactgtcttttaatgtttacagactgcaagcaggataaaattaaaaattcaaccattattaatattgctgctttgtaggagctggtaaaggagtagaaggtaaagatctattaattatagtgtctaatacacccttgaggaaaatctgttaactccaaattattaagtacctaaagaaatctggagatcttaatttatttgccctatttcaggccttaccaaaaaaaaaaaaaaaagctacctggtttttgtgcatatagtagatacccaccaccaccaccaaaaataattgtggaatgaatgagatttcatggttggctttattttgggcacatattgtaaaattcatgacttgcgtggcagttcatgacgaattcaatacagttcctaaagtcaaccaatggaattttgaaaggtcaacagctgcttttctctagtagtcaaggatgtgaataacttgggtgaaattcccaggagtttcaactataatgaccaaaagttcaggggaaagagatctatgtaagtcacagagggaatcatcagttctagacaacaattgacttgtgatttttgtccatgttttcctctaggtgtgaacaggatttttctttcctttcctgtcagccctgttccttattgaattacagaacagataaataccttagacagtagtgactatccctgtgattttcggcttggaaagccaggagtcctcctccagagggagagggatgatgaaagaagtttggatagcatgcttctggaggatgcagaattttgattggcaaataatcattgtacatattcatggggtacatagtgatgtgttttttgttttttgtttttgtttgagacagagtcttgctctgtcgtccaggctggagtgcagcagcgtgatcttggcttaccgcagcctccacctcccgagttcaagcagttctccaggttgcagaattttgattgagggcaagaggaacttattgtttgtgggaaatgacctaagtgattgttttaaggaaactttctctgattacaaaggcgagagtatagagcctttaaggccatttagtagatggctgccctgatccagggctggaatgatatattggttttgacatagttacatgccaggggaaataaaagaaaaactagagacatttctgggaaactgagtgagtacatggaagaaaggaagaacacctagccagattccttccagaggcttggagcctgagagccagggcgttagagtcaacctactcccttcattaggtgaagggaatgggttttcaggaaaataatcttagacatgtaaagtttgataagactacaagactagacatatgaaggaccagttatatggatttggtagttaccaacatagacttcttatttttctttctttcttttttatttaaagagactgggcctcagctgggcatggtagctcacgcctgtaatcccagcactgggaggccaaggcgaagaggatcacttgagccttggagtttgggactagcttgggcaacatagaacttgtctctggaaaaaaaaaaagagagactgggtctcactgtgtcatccaggctggagtgtagtagttgtgatcatagctcactgtaacttcaaactcctgggctctagtgatcctccctccttagcctcctgagtaactgggattacaggtacaagccaccacacccagtagacttattcctttaaaattgtaggatggccaggcgcggtggctcatgcctgtaatcccagcactttgggagtctgaggtggatggatcaccctgagatcaggagttcgagaccagcctggccaacatggcaaaacgctgtctctactaaaaatacaaaaaattagctgggcgtgcacctgtaatccagctactctagagcttgaagcaggagaattg

SEQ ID NO: 127457 - DNA, 1770 bp, Homo sapiens
agagaaaaatcaacatttgggaaaagtcttcccctagagttatctggggagttagtaacaggcaaataaaattgactacaacagaaggaatacttcaaggactttgagattaggcaagagatacaaatttttttttttttttgagacggagtctcgctctgtcgcccaggctggagtgcagtggcacgatctcagttcactgcgagctccgcctcccgggttcacgccattctcctgcctcagcctcccgagtagctgggactacaggcacctaaaatttattttaccaggcatttagaaatttaaaatacaaatttaacacttatcccatccccttttcagttagatagtctgtgaatcttcccaaataattcagattttggcagaaggtatatcttaaaataatgctttatgctggattagtgcatgctgtttcctaaacattttagtgtaactacacagataagaaatacatgtatgtgtcttcatggatgattaattggccaactactatttgaacagcttgagaacttcagtattgatctgtccatgttgaatcacaaacgtcatcctgcctttggaacagctggatgtcattatttgtagatagaggccaagtagagcaattctgtccagtactattgggataatgtcacctgttgtacataataaagaaatgtgctcagttgtggatttgcgcttcaacagtgcttagctagctccgtaaccaaccttctttatctgtctgcttggaaatcttcagatgaggtgtatgtggctcaggagtctaactagttatatacataaaaatggagtcttgctggctttgaacaacttagtggacattcattaaaaataccacactcactggtggtcagctttaaaaccatggggtggtccaggctttttggatcgtgggacatgagccagccagggtatggctctgaaagacagccacagctatgctctactttcgtaggggctctgattttagggcttgtttcattcttgattatatgtaaatgtaaccttgatttgttttatcttcattcacttacgattactgagttataaagtcttcccagcgtatggacacttggcttgtaattgcaggaagttacctcttgttattcttttctgatattaacaactaaattattgtctagtaattacaagcttgaatagcgagttttagtatgacagcaagactatccagctagctaattacacattaactgccctcatttctggaaggttaataacaaatcctattaccatgttttagcttacaagctcttaaggtaagcagggttataaggtttgaacgaggatgaattacctctaaaaaacacccaaatagacgagaattgttttgagattgacaatgcaacaagagcagtgtttttgatgaacaagagcttgttttcttcattgtgatctatgcagtagcacttattttcttctgcaactctctgaagtttaaatatgttggggggaaaggggctacaattaggcaatgaatgggaaattaccttttaagcgggtttggaatgctttaaaaacagtctatgtcctgtaactacacacctcagtttggtggcctggtagcctggccctgagcagaatgtggctggttttcccagtttcagcaccctgcatccatctgtccatctatcttttctcttctcttttctcttctttctttctttctctctctctcctttctctctctctgtccctccccccatcccccttccctctctctctctt

SEQ ID NO: 127458 - DNA, 1029 bp, Homo sapiens
acaaaacttctgggagagtgaagtttcttaacttttatcatgacactggctatgaaccatttagtagtataatttatctttgagcagtaccttcatagctcagaaaacagttgctttaatgattgttttgtataagaagctgcatttctcccagtttgctcatttgttaatagaatgctgatgtattccaaataattggagctatcaggagaatataatgtttatcagtaatgaaagatctaaggttgaaagtagtgatttataagtattatcaccttttcccaatactgaaattgtttccagtactgaaatacttttattgttctctggatactttttgctgctaattaacatctctttttacaggattcatgaataaaattttccatcccaacattgatgaagcgtaagtaactattttaaaatgtttcaattttagcagcaactgctcatgattagtgtttctctgtgttataaaaagcctcggttatctttttggaccttatcaggaggtaggactgtatgaatggtcatgtaaatgatagaatccaaaggatatgaggttctcaatcacttagttcacattctgctgttgtaccacttatttttttccattgtcgtgactgggtccttcatttttcttgttacccagcaaacagtagtaatattccacatctcacttctctttttgtagacacagttcagagatctgttttcagcctacagatagactattttcagatcttataatattttctcaattcttgatagatagtaaggcaaaatgactatagtttcatttcagttaatgaatcttatttatccccttctttccttctaatattttattaatgatactttaaaatattccagcatatcctgttttatacttctagtgctgtttagaatatattattgtttgggatgcaattttaatttgtcatggcactaagttttactgtctctcacaaacatacctaacaggtttttctgcactctgtgtgagtaggttgtatatatacatacatc

SEQ ID NO: 127459 - DNA, 1451 bp, Homo sapiens
tcactgcaagctccgcctcctgggttcaagtgattctctacctcggtctcccgagtagctgggactacaggcacacgccaccacactcagctaattttttatttctttttactagagacagggtttcaccatgttggccaggctggtcttgaactcctgacctcaggtgatccacccaccttggcctcccaaagtgctgggattacatgcatgagccaccgtgcctggccagataaagtcatttttaaccactgtttcctcttctgttcccttttcctatcatgaccctggccctgtgccctaactgaaacaattacttttgcaaatttggtatatgttggttcagtacagttttcctatacttgttaccatggagaattggtagttgtttgttttagtttatttaaataacctcagcctgtaaatataacatcctgcaacttaaaaaaaaaaaacaaaactcagctttagatgtatacaagttgatacacatggatctacttcattacccttggctgtataggactcaggtagatggatgtactcccctttatccaaccctatcccattgacagggttgaatttggctgttggcttttataaataatattgcaacaaatactctcatggggcatctgggacatgtgtattagtatttttctaaagttaatgtagaatgttttttaccctaatttttctcctcttaataccaagacatgaacatttcccattattaaaatgtcttcataaaccacatgcttcttaaatctagactttgaaacatctttaatttccttaatgaaaaattaatattggacacaaagattttttttcatcagagtaacttaaacatcacataggccctcttgattgtagtagatagaacattatgctgtttcaacacagagcatttaaaaacaaaagttaaaagtgtgagtgactagagtggtctaagactggactacttggacttggtattcttatcccctgttttctacttcaggggaagtttctcaggtttttggagacaatctctgtagcgcctcacttgaggctcctcctccagtgccatttctctgcatctttcctgactcttcccattttactccgcctactgtatcaatactttattcagattgcaggtatttattggtgtctcttgtcccactgccacagtgacctcctcaagaatagtgaactgtcttatttttataccctatccaagcacaatgcctgcggtgtaggtgctgaccaaatatgttctgaatgaatatgagagagagagactgtggggatgggggtgatggaggatgggggtcggagatagtggtggtgatactcaccttaataaggaacttcagatattgaaagtgtggaacagaatgagtcctaaaaggaaatgaagtgataaggatgacaaaatgacacctttgacaatggatctctgcttt

SEQ ID NO: 127460 - DNA, 3879 bp, Homo sapiens
ggtttcaccatgttggccaggctggtcttaaatgcctgacctcaggtgatccacccaccttggcctcccacagtgctgagattacaggcgtgagccaccgcgcccagccaatatatatatatatttttttactcatgcaagtgataaagggaactgcattaatctttttcattgtcagaataatagactgttcaggcattatacattttttatttcactctggccagaaatgacctcacactatttttggagtggaggtttataatatggcatgactaaactacctatagaacttagaatacttaccattttatcttatgtcttcctagatggaatcattctagagttactccctcaagaactagcatgagtaacttcattgagcagtatttaagcagggatgggccagtatttgcagtagagaggagtttgtcattcacaagaggtttcaggttagtcatttaacaaaggcctacttgtaccactgtattttcacaaataaaatgaattctgtgactgggcacgatgactcatgcccgtaataccagcacgttgggaggccgaggcaggaggttcacttgaggccaggagttcgagaccagcctcaccaatatggtgaaaccccgtgtctactaaaaatatatatatataaaaagtagccgggcatggtggcgcgtgcctgtaatcccagctactcgagagacggaggaaggagaattacttgaacccaggaggcagaggttgcagtgagctgagatggcgctgctacactccagcctgggcgacaagagtgagactccgtctcaaataaaatgaattttggggctggggaggcaaaattccattcagatcacctgtgtacttctctaataaccgtggttatgactttagtcctgtcccaaacagttacataatggctactctgtagtgatctatatcttttttttttttttttgatacagagtcttgttctgttgtgcaggctggagtgcaatggcacaatctcagcttactgcaacctctgccccccgggttcaagtgattctcctgcctcagtctcccgaatagctgggattacaggcatgtgccaacacgccaagctaatttttgtattgtaggagagatggggtttcaccatgttgcccaggctggtgtcgaactcctgacctcaggtgatctgcctgccttggcctcccaaagtgctgggattacaggcgtgagccaacgtgcctggccaatgataagtatcttttgaattccagtagagagaaacaaggttctagtaagtaaggaaggttttgtaaaaaaataaatagagataatgctatgagaatataagccattgttaaaagctcttttactggtgttctgaaaataacatttttcaaaaattatgtctggcagctgaggctttggctgtggcatacatcatccttccaatcagtttcacaaagttattggatacctactgcgagctgggcgttattctgggtgctgtagatacagaagtgaacaaattgctctcttaatactttatgttcttttggagtgcgaagataaagcaaaatttaaaacttctgatagctttatgcagagaattaatggatagaataggtaccttggatcagatattcaggaagggtctgacaaagtaaatttaagctgagacttaaaaagattaaaaacaaaacaaaacaaaaaccagccctgatcctccaaaatcaggggtaagagctttccaggcagaagaaattttgagtacaaaggccccagcctggaaaactgggtaaaatgtgaggtgtgtgacacacgggccaagtggcaggcagggttgagttcacagaccgctttgtaggccaggttaaaggctcgactttcattttaaatgtaatagaaagattacatagttttcagcaggggagtgaaaggtctgattttgtttttttaatgatcattctactgctgtggggcaagacacagtgacgggatagaagcacagttataaaagcttttgtagccggagatgctggtggcttggacaaggctgccaaggtcaagaaactttgttctagacatacaccgctgtgaagacatgtggctccattaaggaaatcatccaagctggactgcagtggcataatcgtggctcactgcagcttggacctcctggactccaggcatgggccaccacgcttggctaatttttttgcattttttgtagccatgggtttcaccatgttgctctggctggtcttgaactcctatactcaagcgatctgcccacattggcctcccaatgtgctgggacagcaggtgtgagccaccatgcctggcctgtttttaatttttaaatggaagattctgaaggattttaaagtgcttattgtagagagatgtttagaaaagggagagcttggtgatgctggagttgggaagagaattgcaggagcaccaccatcgagaaggaaggagggagcaggatcagaacccagaggcctggtgtttgagaagaggggaacatgtgtgcaagctgttgaggcagggagaaagagtatgtgtgcagggaggagtttagaaatttttatggaaaatgaagaatcctgccaattggctttcatcttctcaaagaaaagggacaaggctatttagtgaaagaactagaggagagagttaggggaacaaagggagagaaagaaagtagatttgcaggattgtggtaaaatgtaacagtcatgggagactgggggagcgacccactagagaaaggggaagggaagattgtaggtgatgctgagtccaagaaaggctgttgagcatgtttagataaactggtatatatttgtttacttatgtctctcctccctgccagctcagtagatgtgaactccatgaaggcagcccctgggtctgttttgctaccaccacccctgtcctcccaaatactcactactcagggcctgatacagtgccctttctgcagaagaatattcgtgtgagtgaatgaatgcctacctactggtaccctcaagtccaagttgagcaaatgtgaatgatgcttcctgtggtagctttgctagatgggcattttggaggggagaggacaggggatttgcagaggattgcttgagagtgaggatggtgatggctcttaaatcttaagctgagtaagaagccagtgaagataagagggctggtagttgggaagaaaatgggagaatctgtggattacagttaacaggtgaaagaattaatgattcctggggtgggaagcttttggcaaggacaggggattggtaggataggagatgtctaaatttgtgattgtggaggtaaatatgtaattgtggagggaatgacaaaggtcagggtatgtcctggggagcatgaagtggaatggaatagaaggtcactgaggagaagcttaagaaacaagccgggcacggtggctcacgtctgtaatcccagcactttgggaggccgaggcaggcggatcacctgaggttaggagttcaagaccagcctgaccaacatagagaaaccccgtctctatactaaaaatacaaaattagctgggcatggtggcacatgcctgtaatcccagctactcaggagactgaggcaggagaatcacttgaaccccggaggcagaagttgcagtgagccgagatcgcgccattgcactccagcctgggcaacaagaatgaaactctgtctccaaaaaaaaaaaaaaaaagagagagagagagacccgggtgtcaggagtatggtctatattgtcaccaaaaatgacaggagttggggcagagagcaacttgggggccaagccaggtgctgaagttctcagtgagagaagccagtggtcaaatgggcccttttaat

SEQ ID NO: 127461 - DNA, 2580 bp, Homo sapiens
ttttgagactgagtctcaccctatcacccaggctggagtgcagtgatgtgatctcggctcactgcaacctccacctcccaacttcaagcaattcttttgcctcggcctcctgagtagctgggactacaggcatgcatcaccatgcctgggtaatttttgtattttttagtagagatggggtttcaccatataggccacgctggtctcgaactcctgacctcaggtgatccacccgcctaggcctctcaaactgttgggattacaggcgtgagccgctgcgtctggccagttttttatgtatataggcaaaatgcagtcttacacattttacatgtttaacctgtctaatcctcacagaaatcctatgaaatgctgttttcccaatttgcaaagagaaaacaaagactcagggagtaaactgacattattttggctaggctcaaaaactcagtaaatggcattcctgggatttgaacggccgtctctgaatccaaagctcatgcatatcttcttacaagagtatatattgcctcctcctaaactaccagaattattatgtatattttatcaatgtcatgccaaattttggtaacactttaagtggcatatgcctggggtgttattggtaattctgccagatactgtaaagcctgtgtaatttcctttaccgtccaccttagcatcgagagtaaacatgaggttacgatcctgggaggacttaatgaatttgtagtgaagttttatggaccacaaggaagtaagtacatgtgttggtatgtgttcttctattacagtcttttactctgtttcttaatagaatatcaaagacagatggtagcatgcgtagtttctgaaaagcaagtttagttggactgcagaaccagtgaggaaatctttctcttatcacaatcactttatatacagtcatcccttgatatctgtaggggattggttccaggaccacctcataccaaaatccacagatgctcaagtccctttataagatgacatagaatttgcatgtaacctacacacatcctcccatgtcctttaaatcacatctagattacttgtaatagctaacacaacgcaaatgttatgtaaatagttgttatactgtattttatttatttatttatttattaagtgatggagtctcactctgtcacccaggctggagtgcagtggcacgattgtggcttaccgtaacctccacttcctgggttcaagcaattcttctgcctcagccttcgaagtagctgggactataggtgcctgccaccacgcccagctcatttctgtattttagtagagacagggtttcaccatgttggccaggctggtctcgcactcctgacctcaggtgatccacccgcctcagcctcccaaagtgctgggattacaggcatgagccccaccgcacttgtcctttttggtattttttttgtgttatttttaattgtattgttatttattattgtttggatttttttctctaatatttttgatctgtggttggttgaatccaggggtgtggaacctgcagatatagagggctgactgtagttttctctttatctctatgtgacagtactagacatgaattgtaaattctgggttttgttatggatggccacgtgaatggtttccaggaaatgttttttgttgttttctttttggccttggaggggggatgaatatggggtttattgagataggagggaaagtaacatggctattacttaccaaataattgaatagtgtttagtacttttgaagaatcaagtaaattgcagaatgaatctgcttattttttaactctggatctttccaagaaaagtatcttaatctgaacgtggtacacctattgattgtagtaggtccctgactcttgaaggaattaatttggaaggttttcagaagattaggggataatgtttaatttacactcagatttattttctaatttggagatgtagttctgatgaacatttttacttttatttcagcaccatatgaaggcggagtatggaaagttagagtggacctacctgataaataccctttcaaatctccatctataggtatgttactacttggtttttctccttagagagttttgaaatctaagggggaaaaatcttacatttcaggggaggtaattaatgccagaaatggctgtctaattgaatttttccttttttggctttggttaattaatcagtgacttttggggggaacttctatagtgtgttagaagacgtttaaatatactctttgcataattataatgaccattactttagatttttgtcttttggtgtcagattaaaccagctttaaggccccactgttctttaagctgttagcaggaaaataataaacatatcttaagtctaattttgaatgccagattgcaagaatgaatgttacatagtatgtgttttaatcctatcattttcagaaattctccctagatcctactttgcttttttgttcactccaactctgggtaccttacaattaaatgaccctttgcagtcttcccacctccagtctctttagccccctaaacagcag

SEQ ID NO: 127462 - DNA, 1039 bp, Homo sapiens
ctaatgtttaaaaattttgtttttgtggagactgggttttgttatgttgcccaggctggtctcggactcctggcctcaagcaatctttctgcccttgcttcccaaagtgttgggattaaataggtatgaaccactacacccggcctcatgttcatttgtagtctactgtttgctgggtactcttctgtgaacaaaataaacaattcctgctcttacggagcttgcactgcagtaggagataaaagtaaaatacatagtatattgcatggtgggaatgttaggagtaagtggttgtaaataggatatcccagaaggcctcactgagagggagacattggagcacatatactttgtttacacttagaaatttagagcttgaattagaaattagaagattgatttggagatctgcttttttgttttgtcatgaaaattagacattgtagcaacgttggagctttctactggctctgccaggtctgttcagctgtgaaggcctgtgagggctctgtttaatgtcccatgattcatgtggctgttatcttagttgaggtcttgaatatttctttcctactcttttgctttaactctgcttattcccaccttcagccagtcctacacaccacagttgggttatctttgtaaagcacaggtagatgcactgtgcatggaatactgtttccctgtttgccagataaaatccacacttcggagccctccgtaatctggtcttggcctactttctagtattccctagggtccactcatcaaaataaaaatgtattgttctcagtttcctgaatcagttctatactaaatctttgcattaaattccttctcccacctcgacatgtccaaatcacactctgtttaggacattttgtaagtccttaccttccatagcagaccatccctatccctccctccgggctggaagaaatctctcctactctaagctatagtattactttatgcaaactctttctgtacttcttaatgaacagatctcgtgttcccttgctagacttcaaacttctgg

SEQ ID NO: 127463 - DNA, 1764 bp, Homo sapiens
acagtttgtacctacatgtctttgtgtatgtgatgacgtggatgtgtgtgtatataaacatctctatggaaagtgcataagcaatggtagtatctaggcagtgggactagaagttgcggggtggaaaggctattttaagccccagtcatgtttttaaaagacaagaaaaaaaaaaaaaggcctgcaactcaacacttgatctgatgaggttatttggttgtattgagggtgctcttgtgtctttcaggagggattctcctctgcactgtgccctctgattgcaccagcacatctcacatggtggcacctgagcctatcagttctacttgtctccgtggtgcaaacacgagagaaggaaactcaatagttttttcaccttttcaatgtcaagttttcttactatatatacatccactgttgtgtctaggtttgttttctgttgttttgctaaatagcttgatttttttcatattattcagttcttcaggaagtactactccttgtgagaaacttgatttttaatttccttctcatacttcataacaatacagccttcattcttattgttgatgcatatttaaatctaaacttctacttaagtgattaggttggtttcttttatactgtttatcacttcatatgtcctaattgtacctgacagatcatttcttaactgtatgttaatcatttctgttggtcttgagctagcagttttgctaatatggcagggtggctttttctctgagatctatcacctgttagtagtatgatgctgaaaatagctctaccactcttgttgtatcacattgcacacctagatacagtctactttcacctcccttgactttccagggttttcttgcttatttactcatattggtgtgattttcttatggtagggtgtttctttaacagcaatttttttccataaaataattcatttcttttgcttattttcactatgggtttttttaaaaagcagcattccagtttttgttgaaagttttttatcccacttctttcatcctaaatgttgataaagataataaatacaggcagcttataatagctatttgaacgtattatcaaataaggtattttcctgttaactacacttctgtatagtttttaagcagaatttcaatcaagaagacactatttttctatatctctttagattactttttgatttttttaaacactgtttatacaagtttttatcaaacttccaacagataatgggtactgcctctcataaatcttccaaagggacaatggaaactgggcccagttgaataaagccatattcatttgttttggaacgcagagttctctgcatgtagattgcatttagcattctgtctagtgtatccatctgtagttttgcttttttcagaataaaaccttgacagtaattttgaacctgttactttatttctttttgcatgtattgctttaaaaaggccgaagtctagtattctcttcccctttttaagttttatgaaatcaaggttaaattgatattagtgccacttaatatttgacacctgctatgcctaatgaacttgaagtagtaaagggagcagcaggggtcagccattcatattatgcaagataactggagaacgagcagactatgattagagctttagactagtgggttctaacctctttataagagcaaattcattatttatatgtgcatatgtgttaccttttcctttttcctctggatttataggtatttgagtttcaagaattttc

SEQ ID NO: 127464 - DNA, 1609 bp, Homo sapiens
ttcattcttcttctgagcttgcaggggtgacccttttatgagataccttaatcctttgcatgtctgaatacattgattctggctgtacttgaatcttgctatgtggaaaaccagattttctctttcaaatggcttgtactcccctcagtcattgtgtgttgatctcgagttgaactctgaggggccatcttacttcatgtccttggaaaaaacttcactgtagctgccatataagagcaaaatgctaatctcccattgcatttagccagcatcaccacctcttgaaaacacctttggcttccccacctcctggattaggacaggagcaccttcagtgtgcctcttcagcactgctgagtaaccctcatatcactcttaactgcctctttggtagtttattgattgttcatttccccactaaacttggagctttcagagggcagatgctctcttatttccagatcctactgtctagcgtagtgcctggcacctactcacactattcatttaaccagtttctgttgagcatccactgacacgtagccgaggctagtcactcagctacatgtcaggaataaaggcaaataaggttcttgccctcttggaagtcgaatttcgttcgaggtgagggaggatataaaaagacaaaatagtactcatgataaaacctacaaggaaatagacaatagaatgaggtagagaataattgggatggtctgttgggcatgtacttcaggtgatcggaaaggtctctaaggaagtgccatttagacacaccataaaggcctggtgcagtggctcacactgttaatcccagcactttggaaggccaaggcaagaggatcgcttaaggccaggagtttgagaccagcctcgccaacacagcgagatccccatctctatttaaaaaaaaaaaagacacaccttaaaggataagaatcagcaagctatctgtcaaaacagggaaatcagggctgggcagaagaaatagccattgcaaaggccctggggaggaagagagcttattgtgtttgaggaaatgaaagaagaccagtgtatctagaaaggtaagagaggaagaatgtggcagactgagaccgtgtcaggcatattgtgggcttggatgagtgaaattagacagctgtcgatacagtgagtgattcacatactttagatttgtttggaactagcactgttataaattgggattctaaatgttaattttgcacattcttttctggaatgttaatactcaaaaaataacgattgaaagataacctagaacttattattttttaagagacagggtgtcactctattgccgaggctggagtacagatgccagcatagctacctgtagccttgaactcctgggctcaagggatcctcccatttcagccttctcagtagcttggataacaggtgtgtaacactgtgctcagctagttttgttttgttttttaaataatagagatggcgtcttgctttgttgcgtaggctagtctcaaactcctgggctcaagcagtcctcctgccttggcttcccaaagtgctgggattacagacgtgagccaccacatgcagccatagttttaaaatttttgtagat

SEQ ID NO: 127465 - DNA, 1021 bp, Homo sapiens
attttttaatacagacagggtctcattatgttgtctaggcaggtcttgaactcctagggtcaagtgatcctcccacctcagcctcccaaagtgctaagattacaggcgtgagccaccactcccggcccatttttctctttttgaagggttcttatttctactcttccagggcaattagaagcaaaaggaaaagacccttggactggagtctggtagaaagaatgctcagtgagcaaacctggggctctgaaccgtccccttgtatgtttttcatggccttgcagctcactccttggagctgtggttctttgaggtgtaggtcagaaattcacggggtgcttcatcaaagtgtgcatgtctgatgaatacctaccccctgcctgcccctctctaggtatcagtggggcggggaatgtcactctcctggtgattcttgtacatgtttcttcttcccatttccggccatttttcccacctgacattttctccctgctccttatattacatagttctttatgatctttctcctgtgttttgtattccttctctgagagagaggggctccagttgcaatgaggttcaaatgatggttttagtgtctcaattaaaactctgaatgcacttactttttttagtaaaagcattggtatagatgatggctaatattccagagttaaatagtgtacttcagataaaagtgagttaaattggcttttgtgtgtaggaagttacattctgagttctacgcaatggacttaagaacttttgaaacaaaacttaaggctgttagttaaggactcatggagtcagatctgcagtagagaacatcattctatacctcctgccttattcccctcttgtgaccccccatttcttccctttactggtaagaaacccaggagcaggcagtctttgttggggataatcatagattggcccttggaaagtggattggaaaatttgaaggtggtgctcatttgtgtttaaacaattatttgctatcatatttagcagtatgctt

SEQ ID NO: 127466 - DNA, 1049 bp, Homo sapiens
agcctcccaagtagctgggactacaggtgcccgccaccacacccggctaattttttgtatttttagtggacggggttccactgtgttagccaggatggtctcgatctcctgacctcgtgatctgcccgtctcaacctctcaaagtgctgggattacaggtgtgagacaccgcgcccggctgtatttagtatttaaataaagtgtgaagaagcaggtgaagaaaccttcctaccatttaacaagagggagccaagcccgtggtttttgttgcaggaaatgtgcttctgccactcctttaaagctgtgaaagttaatttcacagcctcggggaaagacattgtttcccctaaagatcaggtcttgaagttggaagttgtcatttggtctataacttacactaatgaaaagcctcttagagtgcttactgtgtgccagacacattaatcatagtagtaacagctgacatttgagcgcatcctgggccggacattgtgttttttagcactttaaatatcttcctcagtcctcagaataactcaagaggtaggtactgttttctttttttctgttttaaagatgaaaccttaggcccctatctcatgccaagtaagttgcagagctgagagataagctcagtctgtataactcgggagctttgactctgaacaactaaattctctattatggtactgataattccctggactgtctggcagagagtgtggttctttatttcatcaagggagtgggctcagagaagataagtaatttactgtcataagccttgtgttgaaaccagaactcaaacctgggtcggtttgaagtgaaagcttatgttcttgccactgagtgtatcatatgacctcttagagtacattactgtaatatctgatttacaaaggtctttttatttcttgtgtcggcttccctctgtttctggaggggagttgtttaaaaggttgatttttggtcgggcatggtggctcacgcctgtaatcccagcacttcgggaggccaaggtgtgtgggtcacttgaggtcaggagtttg

SEQ ID NO: 127467 - DNA, 1790 bp, Homo sapiens
atgttggtatgttcattgagatgcaggggcaacactgagcattgtgtagatcctatttttaatttaggagaatcctatgcaggtaggttaacttttttaaaccttacagttcaaagttgttgtttttttacccctccttttcacctcccagttcaaagttttaattgtgtttcctagctccttgatatttaacaattacatacttccctgctctctctaaaataaaggctttttattagttcaggatttagtccagggagaccttttactgcgtgaaccatgcttgagatgaaaagaactagacagaagcatgtattgcccagtgtccctgcctgtgccctttcttctcagaaaaccctggctagttgattgtctcagcctcatggtcttttgttaccaccaacctccctgcaccccagactccagcaggcacacacacatctgcacacacacagtttagctgatggagaaggagtagggatgtgagggtgtgtcctcagggtaggggctgggactatttcattttctttctgtcttcagcaaatgtaatgcatgttaacaccttggcagtaaaagtgggctggatcagttggatacaaggtgactgttctaaaataaaatgaaaaacagcataatctcgaatttgtaggcaacatgtgagacccagcaaatggaactttttgtttgtttgtttgagacggagtctcgctttgttgccaggccggagtgcagtggcacgatctcggctcactgcaacttccacctcccaggttcaagcaattctcctgccagtagctgggactacaggcacctgccaccatgcccagctgtgtttttttttttttttttggagacggaatcttgctgtgtcgcccaggctgaagtgcagtggtgtgatctcggctcactgcaagctccgcctcccaggttcacgccattctcctgcctcagcctccagagtagctgggactacaggcgcccgccaccactcctggctaattttttgtatttttggtagagatggggtttcaccgtgttagccaggatggtcttgatctcttaacctcttgatcccccttcttggcctcccaaagtgctggaattacaggtgtgagccaccgctcccagccgcaaatggaacttttgcaggtggtttggccattagccgtgtacatgcttagagtgtgtttaggctagtggacaggatgttctctgtgtgtactgtgtaaccttgaggctttgcgtctatttctatttccctagaaatgaaatctaaaacaggctgctttccttccccctagctttccaaacaaaagtaaggcttgtagatgtgaactagactgttgcaaagttctggagaggatggctgtggtttgggatttgatttttggtaggcttttttttttttttttaattgttagaacttgagtgtgataaatggcttctttttttttttttaagtgggaagaaaatacaagatcattaaccacttgtgcatattctatttcaaatggcttagaaatttaaagcaaacttgttaaagtttgtagaagctgagttgttgatttctgtggtggataaaagccagtgctgtatctggaaactgttttcctgtttttcttagataccccttgaatcggatctgtttaatggaagaggatttttctgttaagctggttataatgccggttaaactttgtgtttaggatgttaaagtcctggaatgaatataattacctgcctatataaaaaaagctgaagtcatttgacgaaaagttaacaagtgcagg

SEQ ID NO: 127468 - DNA, 1059 bp, Homo sapiens
tacttgagatatgaataaatatcccttcatttaaaaataagctgatcaggacaatatttgacaaataatagtctaatgtatgtaacctgaagcagaattgctgctttgacagtgctcattttcagcttggcgagagatgaaaaatatcactcttcaaagtaattttaccaaactcacattcccatcagcaacatatgagagttcctgtttattcatatccacaccatcatttatccagctttctaacattttgcctatctgatggatgtgaaatggtatcccagtgttttctcagtttattttctagtcaaatatttttggtgccttctttctgtcagaccctgtgcaaagcagtaaagatggtaacaagagaggtgagacatggctttcctattctagggagcttgcattctaggagagagatgaactttgtctcccagtgagtggcaaagggacacacaacggggtgcaatgtgcagcctgcctagggaaatggggctgttccaagagatgaagtttgaccttggtcttgaaagatgagtgggcattttcagagagctgtggagttgaggggcattccgggtggaggggaggcaaaggcatagagctgtaaaaccacattattcaagaaacttaatgagtgttcatgactgtagagtcccaggattggtgaggccaaggaataagcagaggagagcctgcagatatggaggcaggtggagttgtatgctgccggcaccagactcattgaaggttttaagtagggtgttaacaggagttttattttgtttttacaagtctaggaatggattctggtattaaacgtgatggtcaatcaagtttttgtcttaatttcagtttcaaacgcattagcttagctgtttactatagtctttttgaaacaggtagataatagaaattattatatttcctttgaactagagttggtcattttctattctttcctagcatatgacacatttcctttcatccatgtgccttgttttttggtgctttttttttttttttttttttactttgtttttgtttttgagacaa

SEQ ID NO: 127469 - DNA, 1028 bp, Homo sapiens
cccacatttttaaatttctaataggtttcttaaaaaagttactgaattctattattaacattttagtgtctctgttttattctgtataaaaataataggaccattacatggagttatgaagatagtgtatgaataaaaagcctaggcatccttagaagtacgttttaaaaaggagaatagggccttggaaaagcacagagttgagtctatcagagaaggcttcctggtggaagcagaatgtcatagagacaggagatagatgagcaagagggcactcatgaggtatgaggcggttggtaggttatcttgattaaagaatcaggttgtaaataagttactgttaagtacatatgtactagtatgtactagagcgtggcgtttgtgaccaagattatgtgggctgctgtatggagaaggggctgagctttttatgatctgacactctgcaaccagtagggccatacctgatacttttctggaggtgtgatcacttatcagtcagccagaggaggactcttggtaaagaatttactcacaggttgaaatccaatcatggttggcagggttttaatgaattagaagacagtgaatggatttgtggcacattatatgagaatgattgagataattttttgaaatgcctctgctttttcaggtggctcatgactgtaatttcagcgactcaggaggctgaggtgggagaatcactcgaggccaggagtttcttttttctttttttttttttgagacggagtttagctcttgttgcccaggcggagtgcaatggtgtgatctcagctcactgcagcctctgcctcctgggttcaagcgattctcctgcctcagcctcctgagtagctgggattacaggcatgtgccaccacactgggctaattttgtatttttagtagagaaggggtttctccatgttggtcaggctggtctcgaactcctgacctcaggtgatccacccacctcagcctcccaaagtgctgggattacaggcatgagccactgtgccgggccga

SEQ ID NO: 127470 - DNA, 1065 bp, Homo sapiens
tttttcctagtagagacggggtttcaccatgttggccaggctctaggctggtctcgaactcctgacctcaggtgatccacctgccttggcctcccaaagtgctaggattacaggcacaagccactgcacgtggcctgaactggattatcttaatggacatatgtatctttttatttgcttaatgagaattagaaattctattttttttttttttttgagatggagtctggctgtgtcacccaggctggagtgcagtggcgcaatctcagctcactgcaagctccgcctcctgggttcatgccattctcctgcctcagcctcccgagtagctgggactacaggcgcccgccactacgcccggctaattttttgtatttttagtagagacggagtttcaccatgttagccaggatggtctcgatctcctgacctcgtgatctgcccgcctcggcctcccaaagtactgggattacaggcgtgagccaccgtgcccggcttagaaattctattttttgtagaatcagaaatcagtttgtgacttgtgtgcttttaaattgggcatattactcacttgaatgaattggataaaacatgatggttttagtctgccagttctggcagttttatttcttaaatgtcattcttaaagtgttttgtcagttctgatgaagttctgatggcatcttattatttaaagttaaattttaataggtattagagtcatagattttagcatgtttttatacttcgagaaaacctggactgcaaatactagtattacaaagcaatggtggctttccgaatataagggctcttagtgtggaaattaataatcatattctctctaggcaataatagcatttgttgccttaaatagtagcttaagaagtaataatgcttgactgtacacttcattaatgcttgactgtaccgcttcagattaggagagtaaactctggtaactttgttattattgatagaaaaaaacagatgaaagttgagaggatactacttttcaactgtgattaacatcagttttactagtagtcatgtttgttgtgtgaa

SEQ ID NO: 127471 - DNA, 1040 bp, Homo sapiens
ctttgtaggtatctaggacgttatgtaggcagtgtgaatagttgctgctgatcttctgacctgtccctgcagagaagtcagagagaggagtaggtagcccttgtgaagggagaggcttggctggactttgccattctctggaagactttgccattctctagaagataggcatggttggcgggtctgtcagtggactcaaaaaaggcacctgttctgtagcacttggaggatccatatttaggatatcaattaattgagaatgtaatctttgtctttggttcaatctcctggtttctaacttttaaaccatttttagggaagcattatatgtgaaggtaggagatactccctacatacaaaatcatgttattaatgttgtgaattatgcatttcctttttagtattaggcaactttttttcatatatcaagttatcatgtacacttttcaaggttttttggattataaaatcttagttgaggtaatataaatagaaaactagatacagagtgcgtgtctggtttgtgttacctcagaagcaattgggctgtcacttagcctagcaaaaagtaaatttagttgttttgtccaaagggtgccagtataactttggtaatctggattttgcttttctttctttctttctttctttttttttttgagatggagtctcatgttgtcgcccagtctggagtgcagtggctccatctcggctcactgcaatctccgcctctcaggttcaagcgattctcctgcctcaggctcccgagtagctgggattacaggcacgcgccaccatgcccggctaattttttgtatctttagtagagatggggtttcaccatgttggccaggctggtctcaaactcctgacctcgtgatccacctgctttggcctcccaaagtgctgggattacaggcatgagccaccgtgcccagcctggattttgcttttcaatttgatgactatgttgcatagacagttgctgataagttgattaatttaaaaattcagaatttggttggacatttccattgtag

SEQ ID NO: 127472 - DNA, 1001 bp, Homo sapiens
gcctggaattttttgaagcttttttttttttttttttttttttgagaccgagtctcacactgtcacctaggctggagtgcagtggtgtgatcacagctcactgcagcctcgaacttccggattctgaactcaatcctcctgcttcagcctcccgagtagctgggactacaggcgtgtgccaccacacctggcttacttttgtatttttcgtagaaacagggttgcgccatgttggccaaactggtctccaactcctgggctcaagcggtctggctgccttggcctcccaaagtgttgggattacaggggtagccactgtgcctggccttaagttaatttttagtgaaatggtgcttaaaatttttttttggcatcttaagagttatttgataggttattggacactgccataataaaattagacattgatttgtaatagttgttgttacattctttctgataaattataaacaatttatcttatggacatttacatgtgtgttgctaaaaaaaaattaaagctggattcagtggctcatgcttgtaatctcaccactttgggaggagtgcttgagctcaggagattgagggtgcagcaagccatcattatgccactgcactccagcctggacaacagagtgagaccctgtctcaaaaaaaattaatattactgacagctggaacttttagtttggctaacaaaaaggtgacctggcttgtacctgttttagtttggagcaatgatagtatgtttggtgagtagactgttttggtattcagacacaggaatggtgccctgagcatataaattccagtgtcttggccagacgcagtggctcatgcctgtaatcctagcactttgggaggctgaggtgggcagattgcttgaactcgggagttcgagaccaaccagcctgggcaacatagtgaaaccctgtctctactaaaatacaaaaaattagccgggcattgcttgaactcaggagttcgagaccaaccag

SEQ ID NO: 127473 - DNA, 1031 bp, Homo sapiens
ttggtattttgctgttaatcagtagttactctatccctaagttagtagtctttgttactctttaatttgtgttcaaagggtagacagttccctaaatcttttaactagttctagtgtcaattgggaacctgtggtttgcctctttatttccagtggactctgttttagtgagatgatgagatgaaagttggcacagctttatggtcttcaagctaaaagttaaagatttggcaactctcagtgttctgaatttgtcttccctgcctagattttggtgacaaatataacatactggtacttattttggttaggcaggaacctacatgagtaagcattcacagcttcagaacatctgattcctgcagtgcagttctagtaaattacacgcaagcctaaaaattcagctttttgggaaaaaatgtttcgcagatgtgacccataaacgtccctcctgtatttgtgtatgtatgttagaacaacctaagtttgttggttttctagtgttgcaattttcttagccccttgacctgcattttatagatatatttaaacattggtattcttttcagtcttaacagatttgatggttccaagaatcattggatttttaggcatgtaatccagaccttacattacgttataatgtttgcaacgtaatagctttttacctgtagacctacagagtgtacctgttagtaaaatacttaaaagaacttagttggatttcaaaagtaaaaagataattgagaaaaacataggttacaagaaggaaaaccagtcacctgtaatcctagttctttaaacagtagttctcaaactttagtttgagattgcaccactgcactccagcccgggggacagagcaagattccatctcaaaaaacaaaaaacaaataatcacctggagagtttgttaaaacaggttactgcataccactcctggagttttctaattcattgggtctagggtggggtctaagaagttcgcagatgatgcttctggtccaggaccactgtttaagaactgttgg

SEQ ID NO: 127474 - DNA, 4002 bp, Homo sapiens
cagtcagtccctcctgttaagctttctggtccccgggagaaccctactgttttcctttccactgacaaagcctgtcccacccatagttgtatgtgatgaagacccccgggccctccagcaagccaccctccatattgtgggtatgacagctggggaaagaggagctcctggacaaaataaatagtccctggactggccacttgggcaaaacttcctctgtgagggtcaggttcttgggggaatacttgccctgatgtcgccaagtgacaccctttattttctgccccctccccccaactttatgcactctggaggttgcagtgggaaagctataactgataagagcccttcaggcagtggttttggttggagtccagactgattatttcaggaccagctagagaaattcgcgaaggttcctgtgacaaatcgagaattttttttttttgaagggtagtttagagggtagggggagcccagagttctgaacagctagtccttggggaggggggcaagtgggggcttagagggtggtagtgtggaacacagtttaaaagtcctgtctcctgtttctctccctcctccccatccccccaccgtttccccctgttgcagggttttgtttatataactcaagttgtttggctaaattcttcaggtgaataccttttttcttccttttatttgttgctgtttttgattgagtgttttacctctttgtagagatcagtggttattgtcaaaaaattcagttagggaatttgctgaagttttaaaaaagtagtttttgcatatggtttggcagtgggggatgggagggaagttgtctgggcaagagatttttaaaaaataatcttttcagaaataaggtgtttttctccttgctcagggaaaacttggttagaaattaggagcagtagatagacttctaagtttgtggtttggagtttagaatttttgggggagtgggagattagagcggagcaactaataaagtatagtgtacccaatatatgttcaggcgcaagtgaaatcaactctttatgagctgtttgtggctgtgattgttttgtaaatgtgtgaatgataccagtaatgttggcttttcataaggctgcaggaaaacttgtaactatgactgtgtgtacattttacacaaagcagtttcgggttttatttttgtttagaaactaggaaatgacatagtggcagcatctgagttatttttatcttgaattgagagttactgtcacacctaatgcgaatttctacctaatgtttaattgggatggagtggggagacaattccagctgtttgtgatcgttgtcagagtctcaaattatgtacatagacatatttttaaaagattgaggataaagaggggggcctaacttgacctgatgccttttccatacagtgccttttgttcatttagtagttgtggcatctagaatgattaccgcatttaggagtcggggtgtggggggtggagagggagaggaaaacagacaaagaacagcagggtgtcttttttttctccccctaagtggcttatttcatagcttatttttagtagaagatgaagaaaggcaaagatgcattggccttctgttctttccccaccttccttcctttctgacaaaagaaagcagaggcgctttaaaattgtagatctgagataggaggataacagtttcgagatttaaaagccagaggttatctttgtttcgtgtttattttctggtataatggagtttggaagttaaaatgtttcggatttccttttgtgtgtgttgtgtaggtgagagattttgtgtcctcctttctctgttgaattcacagatcagtaggcccaaatggagccaacaatttttgagtaaggtatatttagcagaaaatttaaggaaaaattccccagccctctactaaaatgagtacaattgtgtgaaaaggctgggggttgagaaagatggtggagaggaagtaggaagaaaaggtctgaaggaatgcacttcttgccccccatgccccttgatgatttctttggtgtggggggcgatagctggtttccttgcagtctcctgtttcagcccatttttggatgtctcctgagcgtaattataccaccacgatttacagcctggcagggaacctatatagtaggaaagtagcagtgtgggggtagggagagaagaggatgtgtaactaattggccgctgccttccaccacctcgctcggttcttttggagacaccgtctctggttgttgtttggagtcagtgatatttcttttgtgacgggttggtaggagagctgactcccaagttatgcagggagtgagtgttttgcaccaatgcacttaataatctgctgggtgattatgttctgaaactctgactcattcattgtttctcttctgatcctttgctaagggttgtgcaaacctccccaggagcctagaaactgatttacatgacttttggatcctttaggaatgtgtcccagtaaaaaaaccttgcagttagcccagatcctatggaatagtctcgaatagtgcggccatttgtttgcaaagtcaggtagattggtgatctgtgctgcccagagcctggcaacctttgaggtttccacctccaaccagctgattatttagattgtctgagagctggggctctggtgaccttaaagcgtgatttgccctaaaggaatatcggtttaagttctccctggtggaggaacaaacagctcagattacacgggtttccttgttggtgggggttactcgtctcaccctgttgcacagccctggtgatcctttcatctgtgaaccagtggcccctgctgaaggctagagctgcttgttttggaaaagcgtatgcaggcaaaaggccgcaggcaccgctcctcagcgctcattggccgccctgttactacccggaaaaggaggaggggaggagctaccaaacagctgatggagtatgtgacaagagagtgtgtttatatacaaaagaggtgggggctggggaggccctctgagtggtgttacaggaacaagtgtgttttcgaggggtaaaaagagaagaggaaaacctgacctgttagagtacaagaaatgtttagaaaaattaaggttaaatcagaaaagtagatcggataataatggggaccggcatacaccatatgtacaattttgtaacttacaataccaagagttttcaatgattcttcttttcagagggagttcagtaataggatcccccccttatttatttttacattttttgtagagaccgaggtctgactaggttaccaggctggcctcccaactcctggcctcaaatcttcctcctgccttggcctcccagagtgctggaattacaggtgtgagcccagtgcacctggcccagggcatgccactttaaatgcacttaactgactcatttgcagggattccaaagtatggcagaaatgtcagcttcccttaagaaagcgtcaagtgtgatagaaagggacggtgtcttacattaaaacggcctgagttaattttacagaatcgttggtgtctgctttagggtttcagaagctttctctaacaaattcaaaacctcagatgtggccaagtgtggtggctcacacctgtaatcccagcattttgggaggctgaggcgggaggatcacctaagtgtaggagtttgagggtccagtgagctaagatcatgccactgcactcatgcctgggcaacagagcaagactctcttaattaaaaaaaaaaaaaagctggcacagtggcttatgcctgtaatcccagcactttgggaggccaaggcgggcagatcacctgaggtcaggagttcgggacaagcctggccaacatggcaaaaccccgtatgtacttgtactaaaaatataaaaaattagccaggcgtgatggtgcgggcttgtagtcccagctacttgggaggctgagtcacgagaatagcttgaacccatgaggcggagg

SEQ ID NO: 127475 - DNA, 1040 bp, Homo sapiens
gcctggcctctttaatgtttaagtaaatttagtgtcaggctaagacataagcagtaatttgtcttcactatttgggtttgaagtttgcaggtttcagggaaaatctgcagctggtaaattgaacaatttagtactaacaagagttttggcagttccagggagactccatctttctcagtcagcagattcagggcaattcagaaagcttctgtgtgatactatagccctgtccctggaagtattttgttctctgtgaagagaagtatcttcatgtttgtaatttccttcctgattttcggcttgtaccatctaggtatgttataatgtgtaatttttctttttatggtggttgaaacgaagttttttacttggctcccttgtagtgcttgacagaagacaagatcagtcttctcctacacttgcttgaagatgaacttgatcaccgaactgatgagagaaaaactacaatcaaattaggctcagacatccaagtccacgtcactgcctgtattctctctgtgtgtggctgggcgtgtaggtgagtcagcagattttgcctggagacatgaaccatgacaacagcattacacccatatatatcagtcactaatcgtatttagaaatcacatggtgtttcccgtgagaaaaagagacaaagaaaaactgggtgggggatggtgcgaggagaatggataataagaattagtaacaaaaccagaattggaattcaggaattcttggtgttcacaactgaactttgtttcttgtactgttgcttcttaactgggaatttgtgttctcttttttttttttttttttttttttgagacggagtctcattctgttgcccaggctggagggtagtggcgtgcgcgatctcagctcactgcaagctccgcctcccgggttcacgccattctcctgtctcagcctcccgagtagctgggactataggtgcctgccacacgcccagctaattttttgtatttttggtagagacggggtttcaccgtgttagtcaggatggtcttgatctcctg

SEQ ID NO: 127476 - DNA, 1156 bp, Homo sapiens
tctaattggttcttttttttttggaaggagtgggtatgaaaggtccctccaggtagaaatatcaaaattgttttttctgctgttaagagtcgaatttctgccaggcgctgtggctcacgcctgtaatcccagcactttgggaggctgaggtgggccaatcacaaagtcaggagttacagaccagcctgaccaacatggtgaaaccccgtctgtcctaaagatacaaaaaattagccgggcccacgcctggtggtacgcgcctgtaatcccagctactggggaggccgaggcaggagaattgcttgaacctgggaggtggaggttgcagtgagccgagatcgcaccgttgcactccagcctgggcaacagagcgagactccatctcaaaaaaaaaaaaagtcgaatttctgaagagattcaaattgtataatgcatacttgaagtcttgagtcttattttctgtctactaaagttatgccaaatacttgtggagaacagtgagtgagtgaggagaatagtttgctaggattagtggagccctgtagaggtagaaattgaagtttagatatgggtaaactgtaaagagttttgaatgccagactgaaaaatttggattttatttagtaagtattataaaaccattgaaaataataagctgaggaatgacatgagtaaaatgatttttaggaagcttaaaatccagcgttggtgtgatttatgatacgatgtgtagagaagctagataacatttaagcagagggtactgtgaaaggtttaccaacagttttgccactttatattaggaaggacacgtctgccacatcccagtcagttaatggatcaccccaagcggaacaaccttcattggaatctacaagcaaagaagccttctttagcagagtggaaacattttctatatccttttttagttcatgtgaattgcactttctgcctgcttctagaattcctccaaggtattacaccacttactgtgatgctttaaacttaagaataaaaccttggtaagaaattatataggaaagtcagcatcctaatatgttatcactcagagggacagttgaggttatctaaccttttctttttacagaagaaaaaactaagagcctgagaaaagaagaaataataactaatactt

SEQ ID NO: 127477 - DNA, 1022 bp, Homo sapiens
ctggggagtgtatgggaaagagaacctagaggattagggaaaactagttggattattaatattttggaatgttcagagacaggataatggtgtctaggttttaaggggagaaagtgaagatcaaaaatatacttagtgacacaattatgctgtgtttacaatataaaaacaactgagaattggaaaaatgtacccaatacaattatttgacattttggtctacagtgccctagccttgagttcagatgcttttgaaaacaaaataaaatcaagtggatatgtatgtgtagacaattttaaagaggtatgtttgtaattgaatattcaatctagtagaaggaaggtagggaattaaataatgcagagaacgtcaaatatcccactgggcaagcttatttttactatgaaaagaactatcaggaatgatgtgttaattattcatcgtgttttttgtgaataatattgattatattagtgatatatttgtttagctgatgagttttgagaacatgatgaattggtttttatgaattgtgcttaagactgtaccttatacttctagtcaaaaattattatttgattaaattgaagatgacaaagggaatttagcacatttaatgagacaattgcttatgttcgtgatgaggttgttgatgtgtgctagaaatgtacattaccccatttatatgcattaaatcgaggcatttgtaagtagtcatataatataccagaagttgggtttgagacgttaatatcagactgggcatcctagaattgctaaatatacgatctttaacatgaaaaagaaaaaaggagcaatcttttttcttactcccaattaataataaaaacttagatttttgtgtattggcagcttagaagatgaatctcttagcaaacactgtcaccagtttgccctctactaccgcaatctttaggtctttgatcacggattaattataccatgggcttcaagtaggcattcctaggttcctagaacctgcttggtgcacttcctcact

SEQ ID NO: 127478 - DNA, 1046 bp, Homo sapiens
tgggattacaggcgtgagccaccgtgcctggccaaaatcaggttctttaatgtaaagtagtggattagactctgcatccattgcgacagcacaaacaatagtttgtgaaacctttttttaagcacttgcctttctcctgttttctgaagttcactagtgattatgtgtttgcctcataggccaagaaattaatagctttttactcctggatttttactaactcataatttctatacacccagtaacgaacagggaattgtgctttttgtagaataagtatgcagagagctcaggagcgcggggttcatggggcaatggaattcaggtagctgttgtgatttaactgtgtgagtttgattaaataccatgattagctgggaaaacagttaaacattgttgctaacatgggaactggaaaactgacaaagaaaaagaaggaaaaatgtaacagttggtaaagctgggtaaaaataatactgtagtcttaacttaaaaattttaagtaagtaatgtgtataaaatccaaatgatacaaaaaagtatatggtaaaaggcaagtttttcttcttcctttgaccccagctaattgactgccttccctagaagcaaccaatgatacatttcctgtatattttttccaggttcaggggggacgggagggactttgtggagatggtagcattcctttgtttggatgggtatttaagatgtttacaatcttgctaatacaaatagtgatacaatgaatagccctatacatatataacttttgcacatgagagagtctttctttaggataaatttgtagaagtacagtttctgggtcaaaggatttatgtttactgcttaaattttgatagattctgtcaaatttcaagtttatgtttccctgttgttgttcgagtgctgtcttccttgttcttttggtaacggagtgggttatcaaacgttatttaaattgtcagtttaataggaatagttttcttaagtgtctttccaataggtagataaaagagccatttatttgtttcctttatctatagatc

SEQ ID NO: 127479 - DNA, 1051 bp, Homo sapiens
acccctcgttttgcagtctgtctccctagcagtgccatctccctagagtttctggtctgtctttccagaaatagaatttgcatatatgtgcatataggtgtatgttatctttatattaaaacagagtgcaacaacaaagtattctttctgcatctgtcttttttttaacttaaaaatatattttggggattgttctgtgttagcacatttagacttatctcatgcttcttcatggctgaaagtattgtgttgtgtgaatgtgctgtaatttaccagccacccaattgatggatatttagcttgtttctggtttctgttatttaagaacaatcactgcaatgtataatgataaatattgctaatttgccttttaatatctgtgtttttaaagttttcctcaagttgtagaacttaaaaactcacacttatccccttattttactctgctttcccattcagctagtcttttacatccttatgttttatccctataataatattagccagggatttatataaacatttacttataacccagtaagggaacagatactattgctgtccccttttttatagttaaggaagctggggtacccaggacaaaaccttgtccaaggacatacagctagcaagggacagagctaggatttagacccaggcaatgtggttctaaagtccctgcaccatgctgcactcccctctgcttcctgtccttcccagttctttttgttactagtactgtaattgaggtcctcactggtgtaaactggactacactaaaaatgttttttttgctattcctagtcttactttcctgacccattctctatatttaaacaagattaattttcctaatgcacagctatggttatgttgcttgtcagatcagaatccttcagtagcttcctgctgcatttagaatccagcccaatctcatgctcttcccttttatatttgctatattccatgaatttgttccaagctttatctaggatgtgagcattaaagcgtcataaggcataataagactagatagtgaagtgaaattaga

SEQ ID NO: 127480 - DNA, 2633 bp, Homo sapiens
tattcttaaatcttttacacaatacctcaatttatattttttcatcaatatctatattagtcattttctatatccttcatctgaataagacagatactttaatgttcttctggttttccttctctcagcctcccttcctacccttataaatattcctgttgatagcatctgagattatagttctgaatgttagtaatgtttttttccccagtcagtgcatatttagacttaaaggttttactggtttctctgcttacccttttcttgggccttgtttgttattcttgcattaattttttaaaaaaacaatccaattatatatctttgagtaattatttcattagaagtctgaaggaagcaaactttttgggcccttgcatataaaaaaatttctttatttcactctccttcttaagcaagagttggagtaggtatagaattctaaatgtaaaactatatccaagtgtcccaggacaatttgttgaaaagactatttattccccactgaatagtcttgtcacccttgtcaaaaaaatcagttgacactgtggatgttagggtttacttttggactctcaatttcattaatttaatctgtatgtccatccatatgccagtaccacactttttgaatactgtatctttccagaaagttttgaaatgaggaagtatgagtcttctttcacttctttttcaagattgttttgatattctgggtttcttgcttttttccatctgaagtataggattagcttgttcattttggcaaaacaaacaaaaagctagttgaaattttaatattgttcgattctcttttgtgtcttaactttttaatatacttttctataatacttcttcatgcttgggccttagttttatgctcaatcatctttatcgtgagtcctagttagccttgctgtgagtgttaaatctgtttattgcagcaggtctccacagattgtggatagggatggagtaagcaatgagatgaagtgtactacttgccaggctccttcagtgtgactgtcccctcttctgcctgggtgttagtatccccacggggttctaccttctccctctgatcccagtgttcacactgattgttctagctggagagtgacacctttgttgtttttgccactgttcccatctgggagcaaatacctctattctataatgcttgactcaaagaggtagatggctgggaggggttaacctgctatgtaacttctgtgctacactccaatcacttaggctgtaaatgtttaaaatggtttcacttcttcctgctgtcttttaccttggggcttagttgaccccgagagttggtccctccacttgccctggtcctctgctcttggtgtgtaggactgtggtgtcttctttagtccgattctatctgcttttcatcttccagtgattcctcatagtattagtccactaagggcatttcttgttttcttttaattatgtctttttttttttaatgacttttttttgttatttgggagattttaggggaaggtgagcttgctcacactgtgctcagcctaccatcttaattcagccaatgactatgttatatttatagtgaagtaaacatagtaagaaagagaaaaaactaaaaactagcaaaaaataaaatattgatgaagttattgaagaaattattattattattatttttgtggagacagagtcttactctgtcgcccaggctggagtgcagtggcgtgatcttggcttactgcaacctctgcctcctgggctcaagcagttctcctgccctcaagcagttctcctgcctcagcctcccgagtagccaggactacaggtgcatgacaccatgcccagctaattttttttgtattttagtagagatggggtttcaccatgttggccaggctggtctcaaactcctggcctcaggtgatctgcccatctcagcctcccaaagtgctgggagtacaggcatgagccaccacacccggcctatatttttgttttgaagagtcgaagctatcacgtaggaaggttggcactttgaatatataaaaattaaaactcaatgaataaaagttcagaccagtaatatatttatatgaaactggagaggcatacatttatttaaaaatttaagaagtacatttgtgttggcgtcacactgttatgttgctggtttctcttttttctgctctttgggtgaaagaataaaatgggttttgaagtcagtgcctgccttgattgaataacctccgcagagtcaacaggagtctgtgcatacagacttatgctggttgctgagagagagacatgccaaagatgtttgatagaagccctgagaagacataaaaagggttttttattacagttttggtgtgttaattatttttgtttgtttttgtttttgagacagagtctcactctgtcgcccagagtggaattcagtggcacgatctcggctcactgcaacctccgcctcttgggttccagcaattctcctgtctcagcctcctgagtagctgggtttacaggcacctgccaccacgcctgactaatttttatatatttttagtagagatggggttttggcatgttggccaggctggtctcaaactcctggcctcaagtga

SEQ ID NO: 127481 - DNA, 1120 bp, Homo sapiens
caatggttctctaagattgttgaatgtcataaacctgtacattaaaaatatatatatacttatatttatccatatatgtatatttatagtagatatgggcttgcaaattttcagtttttccacgaaaaaatattaaaaagaaaaccaactaccattttcttatcagcatcatttcataaagtaaagaatatttaacaacaaaaaggttctaatctctgaaaaaggagcaggcctttaaatggaacattttagctttttgaaaaacttattgccttgtccatatttttctcattttatgttggactggtgaatcttcaccttagcctagcagtggtctgtagaccagcatttgagaatcattgatttaaaagacttagactattaaaagataaatcattttgcaaaataaataattctccttttccatgagtctgtattctctacaaaattaagtgcaaatgtgcaggtgatgccatttcattatacagaatctgtatatctctatgtacaagttctgtagtaagcaaactagaccctgctaatggacatctgaatatatatttccagttgccaaaaataaaaactgttctttttctagggaatttaagacaggataaaatatggtgtagtgggaagaggcaagtttttagagtcagaaggcctcacttgaatcctggctctggcattaagtcatttaattttcctttagcttccttgcttgaaaaattatgatgatactatcttcttcaaagtattttgttagctcctgttacagcaattccttcacagtaacgtaattatttgtttacacatctgccttccttatgagaccatgggctctgaagagcaggaatcatgtccttgttttgcaatctcaggtcctagcatagggctccaggcatagcagatgcttaataaaatgattgttgaatcaatacaggattgttgtgagaattatatgaggtaatatatgtgaaagctctttgtaaaccctaaacattatgcaagtgttaattgtttttattgtcaataagagctatatttgggagcgatcaaaactttgggaaaagagataattaccccataatagttccattaatttaattaggtttttattcta

SEQ ID NO: 127482 - DNA, 1048 bp, Homo sapiens
aggtaatttgcttcctgggaaggcagatgagccccttccctcccttcccccatggaagtgccaagatattaaatgtttgtttaatttggttgctgttttaaaatttaattatagtagagtcagcttatttcgtatttaaagaatggtgcccattgctttatcttcttaaccatataattaatataaccttgaagagaacaggagcctctgttatgtccaattagtttcagagctccattttgaaattaactgacttaaaaatgtcatcgtttctaatctgttcataaagctcctggtgaatttttgccacaagatggcattggtgattattgagtgcacatgctattgaaccagaattcccaaaaacggtgcacaaaattgtattcttttgggggtaagagttgaaaaccttcatcactgcttatatgttaatttaattttgacttccaaaacagggttaaatgctactttacgtcactttctttctgtattcaagtattgttttgtttcctgtttttctgtctttataactacagtaactatgtattatttgcaatgtgttgtatgtgtctgacttattgctgataattgtggtaacaggtaagaagaaaatacgatgggacccagttaggaggcgcttcattcagtcctgtcccatcataaggatccctaacaggtttttgagaggtgggtgataattagcaagagatctgtgcttcgtatgggttaaagggaactttgaatgaattttctaagctcaaaactctggtttttaaaaatcatctaaacagctaatgaaacagttggaataagaaaaatctagaacttaattttaaacctgtttcttgttggccactattgggattgtaattgtaagtttcagggagtcagaatcacttagtgtattattagatggtagagataaatcatctcactgatataaatggtattccacagtagccatattagaaagaattttgagtgaataatctataaaatatggatgtgggaaagaattttctaaatatgattctaaggaagaaataaa

SEQ ID NO: 127483 - DNA, 1087 bp, Homo sapiens
gggccgggcatggtggcctacacctgcaatccagcagagtgaaaccctgtctgtctacatacacacacatgcacgcatgtacaattagccgggtgtggtgggggcatgcctgtagtcccagctacttgggaggctgaggcaggaggattgcttgcaactaagagttcgaggctacagtgagctataatcatgccactgcattccagcctgggtgaaagagcgaggccctgtctcattaaaaaaaaaaaaagtagagaattgatttgacatataaggaagtggaagtgaaattagatgtagattttaggcaaaggataataaattcagtttagtctctccagaacaaccaataatagcattaatagcatatcctttaacactcagtccaagagtatttccagggaaacttccttggcaggcctctcccctctttgttctgatggcaccctccgtgtacctacctatatcatagcacttattgcactgaattgtagttgtttacttgtctgtgcctcccattagactgtaagctctgtaagggcagggacaataggacagtgcctttcatatctttactccagtttgtagcatagtgcatgtagcaggtatatcatatgtatttgaccttgaattaaagtattgtaaaggccactgtcagaaaataggatgggagtaacattttattatgttctcaacttctctctggtattggtgacagtgaactaatgaattgttgagaacatgaaaatgctattgtttaatgcttcaataggttgtgtggttttgcttgtttgtttgtttttaacttatctatacttttgaaatagccactttgaagcctgatattttggaattctttatatcacctctcttggttcagattgtagacagtttcatagggcccattttctgtcactagattcctcttcactaggtcctacatcttctctaaaacatatttctaccaattaaaattgtggtgtagtgaaaacagtaatggcgtaatgaaaacaatggtttttattataaaatggcagacttaacatacccatttacttttccctacttctcagatgtcattggaaat

SEQ ID NO: 127484 - DNA, 1147 bp, Homo sapiens
gatattaagtgtttacctgtgaatacaggttctgttttaattttttgcttttacatttcccactgggagttcctgaatcaggtaaacgaattctatggtagattttattagcagcaagtaatttttaggaaaatgggatttgcagatggagaagttgggggaggatttagagagctactttagaccctgaaacacaatttcagttttgtcaaggttgaggaccctatgctatatttcacctaataaaaattaatgcttagtctccgtggcattaatccagacagacaattcccatggtttatccaaaatggaatggctttttaatatgttagtcactcttgggttataaatatgagaaagaaatctgtagttactggcgagagagaaagaggagttgcatttttactctcagctatgagattccttgacaggatgtttaatatttatcaaatattgattagatgctctttacccaaaagtgtgatttgcagagatcgtgaaattattaacagaaaccaacagttgggctggatcagcactgtgtcagaaataggtaaaccacaaaattaaaatttttccagtacccacatttaaaaaagtaaaacagacaggtaacattaattttatttaatatttttatttaacccagtatattaaaaatatcatttcaacatacaatcaatatgaaaactaataatttcacattcatttttgggtactaagtctttgaaatccagtgagtattttacatgtaaagcacagttcagtttggaccacccacatttcaagtgctcaggagccatatgttatggctcatggctactgacttgggctgtgcaggctggactgtaagctcccaaggacagaggtagtcattgccttatcactgtatccccagcacctagcacagtacatggtacttagtacatagccagcatccaatagtaactttttttttttttttgagacggagttttgctcttgtcacccaggctggagtgcagtggcacgatcttgactcactgcaacctccacctcccaggttcaagcaattctcctgcctcagccttccgagtagctgggattacacctgcctgccaccacacctggctagttttcgtatttttagtagagacggggtttcacc

SEQ ID NO: 127485 - DNA, 1060 bp, Homo sapiens
aggtgtaagggaggaactctgggatttccaagcagagagaagtatgagaaactgacagtaggacaaggttagtaggagaaaagctctaacatgttgggcaggggacttgatacttgagtggtgaggaaccatcaaagactttcaaacacgactaacaggttggacgtgagtgactcagtgattcactgttttttgttgctctcaatctgtgcacaatttcagctctggtttaaaaatataaccttagaaagtgggattttgattttaaaaagtaaatatagaaggcctgtattaggttggtaataaatgtataacatgtttattaggtgtctagcgttgtcctaaatattaactttatactagtatctattaccaacataaaaaactacgttcatctttagggtcacaactatagtagcttcttattccatccaatatgtatttaagcatctttggttctgaagttgggcaagggtttgtatagattggtataaacattttaaggataacagaaactacaataaagttttttgttttttgtttttttttactctaaaataaccttgaagtaatttttagtaaactagttgagaccgggtgcagtagctcgtacctgtaatcccaggatgttgggaggccaaggcaggctgatcacctgaggtcaggagttcaagaccagcctgaccaacatggagaaaccctgtctctactaaaaacacaaaattagccaggcatggtggcgggcacctataatcccagctacttgggaggctgaggcaggacaattgcttgaacctgggaggcagaggttgcagtgagctgagatcgcgccactgcactccagcctgggtgacagagtgagacttggtctcaaaaaaaaaaaaaaaaaaaaagttgatataatttagacttcaggacactttcaaatttaaactgtaggaatagcttttcttagtaaagctcttaataggatgaaagatgctctctgagataaatataaggagattctttgttaacctccataatatccgggatgttatttaaagtcaaaattttactg

SEQ ID NO: 127486 - DNA, 2219 bp, Homo sapiens
atgtattgaatacgtcatatatgcctagcaatgaactatgtgatagagcccatatagtggaattagatctttttctgcagaactttgtagtataggctatgtatcccttatctgaaatgcttgggaccagaagtgtttcacatttcaaaatttttttttgaatatttgcattgtacttagcataccaaatccaaaactttgaaatccaacatgttccagtgagcatttcctttaagcatcattgttggtgcgcaaaaagtctaattcggattttgaattagacttcagattttcagatttggcacgctcagctactagttagatgtcagtggtttgagctatcttatgagatcattaaagcagatatgtgtagcttctcagatattctgggtttatgtgggaacaaattgcaggtagccatttgtgaacagaacttgtgcttctccttcctcagttgtgctgcatggaaacaacctgttagtatttggaggtacgggcatcccatttggagagagcaacggcaatgacgtccatgtgtgtaatgtgaagtataagagatgggctttgctcagctgtcgggggaagaaacccagtcgtatatatggacaggtaccaatctgtggccagtcatggtgtatttgttcatatttttctagtctggggatggtgttagaatatttgtaattgttaccattttattttaatggagaagagttctttgtggttagtacttgattttttagttctgatatgaaattataatttgcaaatctggttacttgctgtgttcttttcttttctcttcctttcttttctttttttttcactttctgtttctaattcaatttaggtcaggatgtagacctgtatggaagttcctttaaatgttagaaccccacctccacctctaccctcaccccccgtgagagattgggcttcactatggtctgggtcctggtcatttttagagtgattcttgagtagatgagaaagcacttggtgaagaaacttttacatggatctgagctaaaacatacattatgtagagattagtttaggttccagcgcttcaaaccttaggtctgaaaagttatatccagaaagatagggagcaacccaccatacatcagagactctttgagagtttaagcttaaaacaaccaagctttgacttctttcttgactcgctggcattagtactgataaacagcttctgagcttaacttcaaaggagcacatactggataactttgttgcttccacaggaggcatttaaacttaagaagtggccataacaatagctgaaactttcattgaaaagggtccagtggaaaacatcaggttccttgaactgctaactagggtttctacttagcagattgtggtggcttattttcatatctgctgcttcttgagagcatttttcttcagactgcttataaagagaagcagctttcaatggaaatgcttatgcccatgggctagaaattatttgatcagccaggacccttaagaatcatcttgggaggtaggacttcctttccagttgagtaaagcttcacctttctaaaggtgttttccaggttcttaaaataatctctgggttctctaaaatctttattcttttaagagtctgatacattaaaagattaaaatacaagagaatttcataaaacctgatttggaggtatctggtaagtttacattctttaatcaagtgttaacaagtcggtcttattcacctttccttgttatccaggctatggccatcatcaatggctccctttatgtctttggaggtacaaccggctatatttacagcacagacctgcacaagttagatctcaataccagagagtggacacaactgaaaccaaacaacctatcctgtgatctaccagaagagaggtgaggttctaggattcaagcatatttattctttcgtgctaacatttgacctctttcagagtgttggcaatatgaagaaaaccctttggccccagttagaataactaactggctgttggatgttagatctcaggtaaatagtaaagaaaggtctatagtaaaaaaagttcttctggtgaggaaataatatttccttctaaactacagaatttttttccatgtcatttcctcttatactttagtctctctgcattaggaagatagtaacactttgaagaagaaaccagtggtaacaactataaccaaatttc

SEQ ID NO: 127487 - DNA, 1066 bp, Homo sapiens
gtagtcccagttactgaggaggctgaagtgggaggatcatttgagcccaggaggcggaggctgcagtgagccaagattgcactgctgcattccagcctgggcaacacagtgagaccctgtctctaaattaaataaataataaagatctacctatctccttgtgggtaaaagggcttgggaaagccactagcaactcctgtcctttccctctttgtttccggcaccttagcattgtactgttatgatgagactcctgatggcttttgaaataaggagggagtggaaggactagtcaatgtttgcttaacatgtaacaaagggattgttttgagttacacgtagtgtgtctttcactgtgttatatcagtgtggttcccagtctttctgtaagtaatggaacttctgtgtttgtgtgtttggcaggctttcctgcagcccgaaggtgtcacagttgtgttcaaataaaaaatggtaaggattctaaataacattttgcttccatttctgtaattgtatcttctgaaaatgtcttatttcctaagatagccccctcaaaagaggctcataactttgagaaaagtctatttcttgtaaacttaaagggaaattcatagttatgcctctgtcagctgttttcataatgtaaactagtatggtgtttgggttccttcagttattagagaactcaaaaaatggtgataaataagcttttattgtagcacttgatctttcagcatcccacacctcaacagatgtctgtggttatggtggctaatactaataatcttgactgtttatactgtagagacctcagcgaacattgtattaaaattgtaataactccttcagagtgttatttcataaagttgattctgttctctctctgatgccaaatggaactcttcactcattctttggccatattacaacaaaggcattgtatggcttcagaaagcagctgcagctactttaactaaatgtgataagtgactcctctctggataaccttcctgtcttttaatttacaacttatttcatcgtctgatatagctcttaaattttttct

SEQ ID NO: 127488 - DNA, 1106 bp, Homo sapiens
tgccttgaaaaaaatggacgatctggcaattgccagccttaagtctgttataggaccgaacagctggggctgcatagctgtcgcctcttttagagcatgagcatttctgtctgttttcctgagacttctgtttgtttatcttccctagacccccttgctcatttactttctgtgcctggaatctgtaggtatgtgtttgaatttggtaactttgacatgaaggctccttagaggcttgcattcttagtcccagggaagaccctgacatagcatctcagttctgttgagggacaagacaacagcatgagaggctgcacagcagaagtcgtctgtgtcatggggcaatccacttcactggccgcatgtcagctggctgtgtgacctactctaaaacactccatagctttggctcttttcctttgtgtgatcttggctttctcttttcttcatagatgtatttatttgtgggggctataatggagaggtgatcctgggagatatctggaagttgaatctgcagactttccaatgggtgaagctcccagctaccatgccagagccagtttattttcactgtgcagctgttacaccagtaagtttttattttcatatcttccttatgtagttacagatgataaggaaatctttttagagatattagcaagaaaaaaagccagatataggcaaaccttagatgattaataacatatttttaaaacttccttccaaagctaggccctcctctaagaaaagaggagaaaaatcatcacacccaaatttgagagaataacataaatgtaagagaaatgctacctgtggcattccggccctgaccgtgatgtcaaaggtgtttcctgggagggcggaatagttttacccccttgataccatattattgaagatcctgctcatttcttgaaggcaaaggcctttattttcatctttgtattcccagtatttggcatcttggatacttaatataggtttagtttaatgttagttaatagtgaaattgtttgttgttgaagtaaaaaaaaattcatatatataggccgggcgcggtggctcaggcctgtaatcccagcactttgggaggccaaggtggg

SEQ ID NO: 127489 - DNA, 1115 bp, Homo sapiens
gaaattaaaacatcatcaacataaagaaaaatgaaattaaaaaatttttacatctagcaacagcaacaaccacaaatttaggggaagctgagaaggctaaccttgggaatcttgcaggttatacttaaacctagatgtttaacttagtgttttcaagatgtgtctaactgagtagtagctgggtctgatggcagcagtgcttgccatcttgttgcacagataactcaaacctaccctttggctttgaaggaaggttaagcagcccagcaactcttggttagtgatttctttctcatcctcatggtgccagcagtggttagagttggtttgtcaaaagacttacgtgtgtgtcgtggtcgtgctctttgttgttgctcttagaaattatggcaccaagaatgtttcaaacggaaaaacttgtggtggccaaagttcttcattctggcagttttgaaactctcttatgcttattaatggttttaaatatctctttgacttcttcatggggaattgtagaccctaagtatgtggtgtaaatgccatgtaacatgaacacaagctcccgagggaggccagagaagagccaggcagagaaaacctgcatcctctgggcttgttaacttggcttccactcgggctgtggtctttggctatcatcttggccatttccttttgagaacttgtttcttttctaatctctgggccaggtacctgccattttctcaggcagttggtccttgatttttcccttagcttgttgccttcttttccgtctgctttaatgtgcatggtgctgtgaataattgtctagtaattggatacaaggtcttgggggtaaagccacaggtcatccttcctgaagaaccaagtatcatttaaaaactagcatgaggaaggaatgaaactgagtagcattcattttgtgtgtgtgaaattttagttctggtttgtttgatttgttttttttttaattctaaaaagaatgacataaattttcactcgctttgccatctggctgctaggggagctgagcaagaggctcaccatgcgcatgtgtaagccgcaggtgtactcaaggtgctgaaggcgtgcaaggggcagcgctggtcctcccg

SEQ ID NO: 127490 - DNA, 1872 bp, Homo sapiens
cagcctctgtgcttagactttcatggtccttaggatagaagtgagtctctagccctgctacaccagagagctgaagagagatgtggtctggttccatccatacttgctggcatcctttgttaagccttctgagggcagtcttctttgaggtagaccttggaggcctgacatcgaagacctgtgtgttttattttcataaaagtatatatccttggtctaaagtgtcttcttttaatataacactagtaaaaatgacatggtatgaccagcactgagtgctatagaaccacacatgtgtacatgttctggatgccaaatgagactgtgtgtaaatgactaagtgtagataactagaaattagataggggtcatcaggcgtttcggtatacctataaccagcactcggaattcctgacactgtttacttgatttaggaaagtttatgcctgctgcttctctgcctctttgaggtactcccagccgtcttactacagtcctgtaaatttaagtgcaatatatagaaacatatggatatatacagattatatatagggtgtaactataaagcaggtagactacttttttgcatcttggggaagtgagctcattactttaggttcaaattatgccaagaattttagatgtgatcagctggcttaagccaactcatgtcatgataaagctggattttcaagtccatgttttcttactccaactcttagagactcattgttccttaggtttgttagagttgagattttttttctccctgtcatctttgtactctctcatgtttgcatgtcttacattttgttgccggagaacaaggaagtccatctgtaaggagtttcctaaacggagaattaaaacctagtatttaacactaaccattctcctatgtatatactaatttatctgggaatgtaatactttattaaatgaagaaaatgatgctttcttcatttaatattttccacatcctggaaaaactataaactgacacagaataggttgaaatcttaactggggctaaacaaaaccctttccattggcagaatctccttttttcagggccataatgacatgatgtaaaaatttgctttaaaccattcatgcccttaaatagctagattttaaagcataataagcatattaacatttttaagcaaaagatacgttaacagtgacctttggttatccacagtagcaagagtaaagcacagatcattgaaatccatagataatcagtgaatcaactttcctaccaaacaatagattcatttacatttctttttcctccctatcctttcctgtaagcacctgtttttccatggaatggggttaatgagtaggtagaaaaggaaaaggaataatcagtaggagctgacaaccagtgaccatataagcagctgattgcctgtaattagtcaggctgaacaattagagttgaatgctgaaattaggaaccacaggtggtaatcctgagtagatgtagctcttcagcgtcatctcctgccctgagctccaggccatctctctaaccaccaaagaactcttagtacctacgggaaggaaaagctgtgtgcgacacagaggaaactccattatttgaacacatttctttggctcttgacaaatacttgcttttcctctaatcttgcaagagctatggctcttctattttccaatcacacagcttggcatgtaggaaaggttgaatgatcctctaagactgtgttggtcttcgtattctgtaaaacccattttttttttgtggtcttacagatgtttagaaagtggcacaggttactgaattgtctacctgccagcattctgatatagcacaaaaagctattttcctttattttttgt

SEQ ID NO: 127491 - DNA, 1056 bp, Homo sapiens
gataagcagcacacggctgggctctctggcaggaaggcttcagggaaggacccatgtgaggctttgtctgcccagttagaatgagagggctttgtacaatcagcacgtatgcctcttggaccccagtgacactgccatatctcactgggtatgccagtagctttctgctgggtgtgcaggattgttaggcgttagctctgagccacattataatttgatccctggatgttcatcaataataacgtttccacactgaactgcattgacctgggatgggacaggttatggattctacagaggcggcacctcagtgggagttaggaaggagagtctaacagcaggatgggtgtggagaacagcaccacagccctgccaccccgcaggggacagcagcgaccctgaggatatttcttagcaaacttgcatgcagacagtcccaggcactactgtggatgagatttgtatgtaagtccttttctgccccaaaccaaaatgagtatttcaaaatcagtctggctagaagagccactggcctcaatgcactgagcattcagtgggaggactaagctctgtcattaattggggcaggacaactagtctctcacactgattttttttcttcttcttcttttgagacggagtctcgctctgtcacccaggctggagcgcagtggtgtgatctcatctcactgcaacctctgcctcccaggttcaagcaattctcatgcctcagcctcccaagtagctgggattacagatgcctgccaccacacccagctaattttgtattttttaatagagatggggtttcaccatgttggccaggctggtctcgaactcctaacctcaagcgatccacgtgctgcgattataagcatgggccaccgcacccagccctacactgatttctgataaaataaaatgggctggatgtggtggttcacgcctgtaatcccagcactttgggaggctgaggcaggaggatcacttgagctcaggtgttggagaccagcctgggcaacatagtgagaccctgtctctaaaaaaaataataag

SEQ ID NO: 127492 - DNA, 1066 bp, Homo sapiens
aactaaaatatacttgacactgatattttatattttaacagtaaagacacgcagcatgtggggtggcactttttttttttttttttttttttttttttttttgagatggagtttcactgttattgcccaggctggagtgcagtggcatgatctcagctcactacactcagctcactgcaacctctgccttccggtttcaagcgattctcctgcttcagcctcccgagtagctgggattcaggcacccgccaccacgcccggcaaatttttgtatttttagtagagatggggtttcaccacgttggccaggctggtcttgaactcctgacctcatgatccgcccatctcggcctcccaaagtgctgggattacaggcatgagccaccacacccagccctttctagacagctttgtaatagaaatgcgcacattgaaatgcacacattcctcaaaggtcagtctttggtcctctgattcactgtatatgcttttccttagagatctcattcattccacttcatttatcacctctctgcctttgactcccgaattcatcttcaagcataatgtttctcctgagctgtagtgttgatttccatctacctgtcagacatttccgcttggatattctgtgaactccgtgtctggaactgcgttcacatctgctcaaatcagctccctctacttacatccctttttctgttcattgtactaccagttaccgatgctcaaaattctggtgtcatcttttgattcctggagctccctgggtccccaatccaatcaggcaacaaacctcatccattctttcttaacaatgtctcttgcagctgcacttcttccatttctgccaccactatgctcatttacacccttatcaacccacacaggactactgcaacagcctaattaatctcacagccttcgaattgttgccatgcttccatattttccaattcatcctgcacattctcttcaaattcatcttcctagaacacctgtttgatcatttcatccccctgataaattccttagcctgacatttaaagctccacacaatctggcc

SEQ ID NO: 127493 - DNA, 1774 bp, Homo sapiens
tatgtattttgttgttgttgttatatgtagtaggatttaatgtattactaatacacatatgaaaactcactaaagtatccccagtagttagtaaattcctaattcaaatcaagtaatacagttctctgagaggctagcatctccatatcttccatcttttaaatacaattgatacttttactttaatcttgcttgttaaaattattctgttagctattacctggtgtaatagttcttgtttactgaaaaactgtcaacactccataaatctatttattctaaatttgggttttaggcatagttaagaaagtaattactgttactggaattcacctgataaaccatgtataacataattcattgcagaatcacattaaatatcagttaaacatgtattattcataaagttttttgttattagaaaaagaccttaaatgcttggcaaccaattctaataaaaattttttttctctttataggagagttaatcttggtctatctggtgtgaatatattgtggatctttggcgagtagcaagtcatatatttaattctgacatttagactatttcactgaaccagaagtcgaaactaaacatctctgagccactgactcttctgaaataaaatacacatgggtgtatgttacagactctttagatttaacagaaaatgtagctgttatgaaatgtaattgtaaaaatatgtcccgtatcttctatatcgagacattgcctttaattttatatcgcttttcagaaatttcagttgactacaaaactgcaacccttcggatttttattgactcaaaatagtgccattccccttaatgaaatagattttgagtctttttttcattgtaacccccaaatgagaatcatctacctgattcttgtaccaaaaaaaaatttttttcagtcttttttttttttagagagggtctctgtcaacgcagactggagtgcagtggcacgatcttagctcactacaacttctgcctcccaggctcaagcaattctcctgcctcagcctcctgagtagctgggattacaggcatgcaccaccacgcccagctaatttttgtatttttagtagagacagggtttcaccatgttggccaggctggtcccgaactcctgacctcaggtgatccacccacctcggcctcccaaagtgctgggattataggtgcgagccactgcgcccagcctcagttattttatttaacagtgtaagtacttagaaagtaagaaaattgctgatttagtttttttttttttttttttaatgtttccccagcattctgcaagttaggccaaagcccacattcaaagaaatgagattaactcttaagtaatgtattaagtttatgtatattttaaaatattattaaaggaggtttgaaagtattgacatttaaaaagtcaacacttagattaaatttagctggtagttttaatttgggttttagttaagagtgtgaggacatcaggaaaactgtttactactttggttttagcagctcagttttactattccataatgtgttatttttaaagttctctttttaagatcacagtgatatcctatcttcaaattttttaaatatgttcaaaatatctggagggtgagaagttaccaagtttgtatgttttgtttgactcaccatctttattttctgtatatgtagtagctggcaattgcatatattttcttgattaacatattagagactgcttccatcatcttatgtaaacctggaaacagctgaaact

SEQ ID NO: 127494 - DNA, 3054 bp, Homo sapiens
ccccccagtatgttacctttctgctcatctttcaggttgcagcttaaaatacaaaaaaaaaattagccgggcatggcggtgggcgcctgtggtcccagctacttgggaggctgaggcaggagaatgacgtgaacccaggagatggaggttgcggtgagctgagatcacaccactgcactccagcctggacgacacagcgagactccatctcaaaaaaaaaaaaaaaatctttccctcagggaggcattctgtcgctaaccagtctaaatcagacactgcatcttcatatgttcctatggcacctcctctcatagcattcctcacactttgttgtgattcttagtttactgtctgcctttcctactggcccttatgtccttgacatgtatcctttctgtcttactcactgcagtattcccacttcctagcacaaagcgtaggtactttgtttaataaataaatgaaagtctgaattatatggaattctgagttagtaggatatgaattgataagatatgtatttacctaccagattgaatctttttcatttggtttaaatcttgtcttttttgtctttgttccagggcagaaataatatgtttcatacattgttgatgtttctctacatcataaagaccaaagagtcaggaatgcttgggtaggtacttatgctttaaaaacgtaagtagttatttactgattttcttcctatgttaagattctgcagaaggcagcagcatgtaactgaaggtttatggattgaacaatagataatggcttcagccctgtcacagactacctctgctattttgggcaatccattagctaactcctcggaacccattggtaaaaggcaagtggactacatcgttagcattatagttgtgttccctggaggaataattcagagatagataaaaattagactcttgccgtttaaaaacattttttttttaaaatctggagactgtttttttccaagccatttcatttcagacacaaagcattctgcgaagtgtttacacttccagagagacagagtcggtacctgttccataatatcattaactggaatggaaaagtagtcagttgaaatcgtttacatacttggtaacaaagctcacatactgcaagaaattcaaaattgtagtattgtcattttgatgattagaaattttagtgtatcaaatgacacatgaaataagtagaccccagctaaagctagggatatttgtagtgcctgatctgggagtcggaaaacctgggttctgggtccagctctgccatactaagtaacctaaggctagcaaaaaaaaaaggggggatgggcttggagcagaagggattgtggtcatttccacttccgatatgcatgcgtctttaagttttagatagcatcctgtttgtaatttagagtttatacgtgtcctagaactgtgccatccagcacagtagccaccagccccatgtggcactgaacacttgaagcaggactagaccaaattgaggtgcgctaaagtgtaaaacgtgtaacagatttcaaagacacagcccccaaaaagtaagataactccttaaaaattgtatatatttgttacatattgaaatgctagtttggatagatttagttaagtgaaatatgttcttaaaattaatttcacctgtttattaggtatctactagaaaatttaaaattatgtggcttgcatttgcagttcatatcatattgtatttttattggacagcactgctctagagaaagcaaagctccttaaatatatcggatgtaaagattaaaacagacatgaacaaaaatgtgtaaacaaatatgaacatttattagctttttttttttttttttttgagatggagtctcgctctgtcacctaggccggagtacagtggcaccatctcagctcactgcaacctctgcctcccaagtagctggaactacagatgcccgccaccatgccgggtatttttggtagagacggggtttctccatgttggccaggctggtctcaaactcctgatctcaggtgatccgcctgcccggcctcccaaagtgctgtaattacaggtgtgagccaccacacccagctattagcttcttttatcatatattttttaatgtaagaaagattaggaaactaactttattgaggcatctaaactaacagggttttttatttttaaattatgaaaataatgcatactcagtagataagtatttaaataacacagcagtgtataaactagaactaatttctaattatgtgtagagacagtatctcactatattgcccaggctgtgatctacctgccttggccttctaacgtgctgggattacaggcataagccactccacctggctttatttttgtttcttttgcttaaaaatgtattgtatccaaacatagtactttatgatctaatttttaggcttatggcatatcttggacattctcccatgtcaaattttccctaaaatgtctaggaatgtttggttataaatatacttacacatatatattagatggaatatggaatttgatataaattccatattgttattattccatgttgttaatacaggtcaagtattctttatctgaaatgcttggaaccaggagtgtttcggatttgattttctccgattttggaatatttgcaataattactgagcatccctaatctaaaaatcccccaaatgctacagtgagcatttcctttgagcatcatgatgtcactcaaaaagttttgggttttggagcatttcggattttcagattataggtgcttaacctgtataatataaataagcaattaatttttggttctaattgaaaatgtatcttttcctctgtggatccaaattgatattttgatgcataaatggtttgtcatgatagcatgaggtttgagtgccatatacggtctgtcatatgctttaaaatgaaaaagtgcttagtggagcagcactttttcatttactgaaatgtaatgaaatttactgaaaggccaaaagaaattgatacaatttttaaagcgct

SEQ ID NO: 127495 - DNA, 1557 bp, Homo sapiens
agtgaacactgtcttgttctagattggatagttagaaaccttttgacatatttgattctttctttccacatatatatacacacacacttttttttcttgttgtgccatttgaaagtacattgcagacattactttttagcatgcattctcctaaaagtaagaacattctcctaaccataatacaattatacctttaaaaaataatagttttctgatatttaatatattgtccatattcaaattttccctacccatcaactctttttttaagaagccaaaatagtagtcagataaatctaaaatcccacattttggatttatctgatgtcttcagggacatgtttaacttttgtctttttatatcttttatttctttaggtttgggtgttttgatcaagttttttaaatgatttgcttcccttattatattcccttagctttttttttcttttcttttttgcatactcttagcttttaaaaatttcaccttgttgccacagaactatctcagggaggttgtatgagctcatttcgatggaacagaggtggcgacttcaaaggacgaaagtgggatacagacctgcccaccgattctgctgtaagcccctagattctttcattcatttatttatttactgttgattgactgacacagggtcttactctgtcacccaggctgtagtgcagtggcacagtcacgtctcactgcagctttgatctcccagggctcaagtgctcctcccagctcagcctcccaagtagctgggactaggcctgaaccaccacacccagctaatttttttaattttttgtagagatggggtctcacttttttgcccaggctggtcttgaagtcctgggttcaagtgatccccctgcctcagcttcccaaagtgctgggtttacagacacgagctactgtgcctgacccttagatttattttgtttttttcagtttccattactggatttatgtgtttttgtttgcctatcataagaataagtgttaaaaataatttagaaaataaggtatttataatagtatcagcatgttcacccaaccactgttaatatttttgtgtattttttccctttacttggtggctactattttttaatgtttttatcatatttgtaattctccggtatgtaaaattatgtattctgctttttttccacttctgtaatatttagggtttttttttacttcagcctcctcctacctagatattttttcattattacacactgtcatttaactattctcctatagtggacctaaaagtttgagacacttgtggtggagaaggaatttttacttgttttttgatcttgagtaatgcagcatgcaaatagtgtgatgcgcattgctttctttcttgggattgtcactttaagagagactcctagaattacatttaggagatcaaagaacataaatgtttttgtgtgcttacaagtttttcaaaattatgttcgctttttttttatagtgactgttacgggtgaaaattaagttttatgttgagattcagattgagaattgaatgtatttta

SEQ ID NO: 127496 - DNA, 1511 bp, Homo sapiens
cccagctgcttaggaggctgaggtgggaggaggattgcttgagcccattcgattgaggctgcagtgagtggtgattgtgccgctatactccagcgtgggtgacagagcaagacactgtctcaaaaaacaaaaagagaagaagaaaaaaagtacattggacagtggttagtgctaaggaggaaaaaagcacaggagggtaatgttattaatgtttagagaggaggggtgaaatttgaggtagggtcgtcaggggagacgtcattgacttgtatgaagacctgaaggtagtgaggaaccagctgtatgaacacatgagaagagcattttaagttcttttggaaactcacttttagaataatcagtgttctctgtgttttatgttaacagaggctagtattactagcttgaaacaagctgccctggttaaagcgcctctcattccgactttgaacacaatcgttcagtatctagaccttactccaaatcaggaatacttgtttgaaaggatcaaaggtaattattgatttgaagagaaaaaaataagagcttttttactatgctggaattttatcagtgaagattaacaaggaaaaacttttaattaaaagtataacatgtcttataaatacgtattaattatagcttaataactttattttgtgtaggaaacttaaatatgagctaaatgggctccagtgactatttcactcatttcctacttttagactcataagaatgggtgccattatgacattctttatagttccggtgtgctgagccttatttctcttaatttttataattcctatttaataagtttcttccttatatttctgtgatattcttattatttggtggaagatgtgctctcctgaggagactgacttgagaatcaggaaatgtaggctccctgacacccccatacaccctctgtgcctctctacttacagagcaattcataacgttagaattttttaaaatttggataaactttttaaaagattctcatcactaagacaagttttagaaatagtattcaaattgatcataaatcttaatttgaaaatattatagtgttctccctttcccctaaggttagagcaggattcaggaataaacatttttcatgactttttaaaacattttatataaggagaattttaaacatacacaaaactagaaaaaatagtatacacactcctcttgtacacatcacccagcctcaacaatcactagtccctggccagaccctgccctatccataccccgtccactttcttcctgtattgtttgaagcaagccctcatgtcattatcagttcatctgtaaatatttctttgtatatcactaaaagataagcctcccgcgaccccctgcttttgagaaagggtcttgctatgttgcctaggctggtctccaactcctaggctcaagcagtcctcccacctcagcctccccaagtgccgtgattatagacatgagccaccgtgcccagctgagcctttagaaaa

SEQ ID NO: 127497 - DNA, 3115 bp, Homo sapiens
aggtctgggcaagagtggctatgaatagacaacttcttgatcatatggattcatggacagctaaatttagaaatgtaagttctgacattactctttggacaatattagtgcctcttaatatgcaaagcatgttattagaatatcatttagagttcattataaattagaatattagttataaaggtacagtatgaatggtacatatataaggataaacatgactgttactatatggtatttattttcatgagatttttttcttcctccatatttagtgaattgttatgttttgagaagataaaggaataatatgtttagttattgagatcctcccttttcagttctcagttttattttccaaagagcttttctattggagccttttatttacctagaattgtgaggggaaacaaaaatgaggtccttgccctcagaaaacttaaagagttagagagataagacaacatatgcttgaagctatttcaaagtagattatgatttctgtttttctagagaagaaccctctaatcttgggccaacttttccatatacagagtgagtgagttccctatttccaactccacgtcttcctcccaccttctctagtacctgtgtgttctgggttctgttaggcatatggacttccccttccactatacggagctccacttagctctgaaggggctactacttctgttgtttcatccttcaacattcatccatccactctgcatcttctagaactattttgaaatcacttgtgctcattttttatccttttactcttatttaaatagggcatcaaaatagaggggcaaaaaatggtagcctactttattgaaacagaaacctggatggcattttatggataattcctgaacccaatcctagacttactcaattagaatttataagggtggggcctagacctctctctgggacacgttaggtaattttgttacagccaaagagtacagctgtactcttttgtaccatttgtcacagctggcaaattaagatgcatgtagtaaatgttggaaggatgaatgagtcaaatcatctcctgaaactggagtttgttgtagtttctgttataggctagtctaaaaatgctaacatgtttaaaatatgaagtcttagtcagacagagtattagctacttagaagaaatacaaatacatttcctcatctgaagtccctaggtgaccatgtgctataaaatttagagtttttggatttttttaagcaatacatgtatacctgtaccgtataatttataacaccagagtctagttaacactcagtaatcaaccacattaatacttctgcagaaaaacatatgaatagtcacactcagtgggataaagcctataaatagcttcatgtgaattcagttcaagtcttgccagtatatcaaaatttgcttccttacatggattacaagaaatcttttaagttcccagaaggtttttgtttcagttgtttataatattgtatttcattggaaacattttttcatccttttattttatggataaacaaaagcatggaaacagaagtggtaattgaagttgctacaaacacatacacaaaataataacacacaaaccagatgggatgtatccttagtcttttcacatcccagcattagttttatattagccatggaaaaggcatttgaaagtcccagtcctaaagtaatattgtaatattcaaaagccagtttcaaatgtaataagtctctgtttttccacatggttagggaattgggtgagcctgctgagagttaggcagttatgttagtttgaaaaactatcttactgattgcaaaccaatataaacactacattaataaatgtgtgaatagttaccctacaaatgtaaactgaagattatccttttagctaaacataataatcagaaaattttaagaaaaatttaacatatagctaaaagttttatatttttttttcaggaaaaaaaataaaaacatgttatttaagaatgtaatttagttgccaggcgcagtggctcacgcctgtaatctcagcactttgggaggctgaggcaggcggatcacctgaggtcaggagttcaagaccagcctggccaacatggtgaaaccccgtctctactaaaaatacaaaaaattaactgggcgtggtggcaggtgcctgtaatcccagctactcaggaggctgaggcaggagaatcctttgaacttgggaagtggaggttgcagtgagctgagattgcgccattgcactccagcctgggcaacaagagcgaaactccatctcgaaaaaaaaaaaggaatgtaagttagttaatttacactccagtggcatatttatttaaccatctcttgatttcgggtagctattactttcattctctttcactatactttatgattcttttaatattcaactataagatagtaaaaaaaattcttagagttgcttgtaaaaaagaaagtaattatttgacagctacttgggaattatgtatccaaaatctgtaccttatttcttctagtggatcaatgagacaatattagtgccacttgttcaagagattgagtctgtcagcacacagatgagacgaatgggttgtccagagctacagataggaggtatgtgaaaacagagcccagtgttggatttctattagtaaatctaccaagtggaaaacttcttgtaatggacggcttaacttattttgttaccttggggtgaaaaaccccaaatgtctataatctagtttgatttttttttaacgtgacagctttatcaagatgtaatttagctaccatataatttacccatttaaaatgtacagtccaaagtcttgggttatgcaaccatcaccatagtcagttttaaagcatttcatcacctgaaaaagaaactctccaccttttaccagtcaccccctgttctatacatttctcccagtcctttgcaagtgccagtctattttctgtctctatagataggcctgttgtggatatttcatatgaatggaatcacagaatatgaacatgactttgtgactggcttctttcactgagcataatgctttcaaagtttgtccatgttgtagaatttatcat

SEQ ID NO: 127498 - DNA, 1031 bp, Homo sapiens
cttatttattcaggcgctatgctagatgctagggaaaaaaaatgctccctgctttcaaggagctcaaattctatttgggaaaacagacaaaaactataacccggaagtgtgattaatatcctggttcagaggcctctgtaggagtacattcctaaatagaacttttttttacatttcttaaaagtaaatttataaatttagaaggataaccatcagatagtcttttagtacaactcaggaattaccacaggctgttaagtaaaacacagtgaagtacagggacaaataagtttagcttgttaccaggagagtaatcttttagtaggaggctatagttatcccttttagaaagagcttctagaaatttcaaataaagaacttgcttggcctatttatttcctaaagaaatttgtcttttgtttgtttcttactaaatgatttaaaagtcttagagaatgaaacgagcttaacttttcaacagaactagacagatgcctttgactgcttattgtttttatgactgttaaattgatatggctcagaaaatactatttaaaatttttaatcacaagcagactgtgatctctaaagagaaaattatgttggggagaagagaatctccttgagggttggtcttctgattcctggattgccattgcctagatataagtgttaactgtagatgtcagaattgctacaacacactgatactgtttatcttaacaattgtagggagcccagattctacctctccttccagcagtcctactttctggaactatagtcgttctatgggggattatgcacaaactttaaagaagtttcagtatcagcttgcctgtaggtctcaggccccatgtgctaacaaagatgaagccgatctcagctctaaacaagccgcagaagaggtaagtggaaaataaaagtgacttaatatttatgatttatgcattgttagaaagtcttctacttctggaacattttttctgtaatcttccattctgttggacagaaatgtaaatctggcacac

SEQ ID NO: 127499 - DNA, 1129 bp, Homo sapiens
tcaggattttctgaccaacatggtgaaaccccacctctactaaaaaattagcgaggcttggtgacgcgagcctgtatcccagccactctggaggctggggcaggagaatcgcttgaatccgggaggcggaggttgcagtgaaccgagatcacaccactgcactccagcctgggtgacagagtgagactctgtctcaaagaaaaaataaataaatgaataatgacaatatgattgtcatgcttaagatactatgggtgttcatattcacatttccccagttgacccaatactgacccttgtagtgctttttttttcttttattgatgcaggatccaatcaggtatcacatattgcatttacttgtgcttctgttgtctccttaaatcgaaaccatttggatagtgtgggttttgtgggattttttgttttgttttcttttatgacatttacattttgaagagatgaggctgttgttttgaaaattcagatttgtttgatcattttgttactgttagattccgtttaaatattattttctggcaagaatacaacatgggtggtggcatgtccttttcagtgtatcacatcaggagatacgtgatgctgctttgtctctttgtcggtaatatataataaaataggatcacttggttaagttgatagcaactggatttcttcatgattttccctttatgtcctgtttccttaacagccttttacccagtgattttagcatctgttgatgatccttgtccttgataaagtggtgattataaagtagagattttctttttttttttttttttttttttttgatacggagtctcactctgtcaccccggctggagtgcagtggtgtgatctcggctcgctgcaagctccgcctcccgggttcatgccattctcctgcttcagcctcccgagtagctgggactacaggtgcctgccaccacgcctggctaattttttgtatttttagtagagacggggtttcaccatgttagccaggatggtctcgatctcctgaccttgtgatccgcccgccttggcctcccaaagtgctgggattacaagtgtgagtcactgcgcctggccaaagtggagattttctaattatttatttctacac

SEQ ID NO: 127500 - DNA, 1080 bp, Homo sapiens
gccagtttatttactcgttcacctactgaagggcatcttggttgctttcaagttttggccattaggaataaagctgccataaacatacaggtttgtgtgtggccgtaagttttcaactccttgggtaatactaaggagcacaattactagttcgtatggtaagataatatttacttttgtaagaaacagccagactgtttcaaagtggctgtatcattttgcattcccaccagcaaagaatgagagattctgttgttccacaacctcatcagcgtttgatgttgtcagtattgtggattttcgccattctactaggtgttttacttaagtcaaaaaccaaaacaaaatgaatttcaattaaagaaaaataaagtaaagatcttttattttgtatagttggcgagctttagcccctctcctccttctccgtaccctaccactgttggaccagtggagagcagtggattgagatctcgctaccgttcttcacctaccgtctacaactcacctactgacaaagaagactacatgaccgacctacgaactttggatacttttctcagaagtgaagaggagaaacagcatagggttaagctgggtacatatatatttctgtatatctactatacatatttttggtgtcaatccttaacctactattttcattattttaatatccatactaacatactttattagcttagcatgttttgttttactttatatgtaacattattttatgcagttagaattaagttcactaaatttaggaagtgaaatatagctaaactaagaaatctcaaacctacaataagattgaaagctttttcgtataatgtaagttacaatttctatttaaagttgaggctacaaaataatgttttgaagcagtgcgtagtgaacttactcaaattatagctgtctcttttcaagtagtcttttggaaggttggtgtggcagagcaggctgaaagagagaacatgtatttactcgagaagcgctgctgtttttcataacattttaaaacttgcgttttagtatttcctgaaagcctatagtttaccttgggaaagagtgtta

SEQ ID NO: 127501 - DNA, 2221 bp, Homo sapiens
aatgaaggtgaaaatatttattgtacagggttgctaggattagtgctattttgaaactcactagtaaattacctacacataattttttttttttttgagaaggagtctcactctgtcacccaggctggagtacagtggcacaatctcagctcactgcaacctccacctcccaggttcaagcaattctcctgcctcagcctcccaagtagctgagactacaggtgtgcgtcaccacacctggctaatttttatatttttagtagagatggggtttcactatgttggccaggctggtctcaaactcccgacctcaggtgatccactcgcctcagcctcccagagtgctgcaattatgggtgtgagccaccatgcccagccaccctacacataacattcattaaattatagtttttatgaggaataagaaggtaattttagtttgctaagtatagagggtttttgtgttctccaatagatgccctcctcaccccccttattaaaaaaaaattgttctcttccagagcttgcccttgcatctctcttcagccttaatgccttatttgatttttggagatatttcaaatatactgtggcaccaacaagtctggttgttagtcctggacagcaaacacttttagggttgaaaacagctggtgagtgttttatatctcttgcaaaggtggggaaaaggttggcaataaatctttctcagtttaattttcccatttcgtagactcaaagctggaagggacatcagctatcttaagcaggatacaataaattgtcttatgaccaatgattatcattcctacttgtatacattcagctatttcatggaagtttgttccattgttcaggtgcaattaaaattaaatgactaacttgctgagttgaaaccagtttctaattttgcactctggaaatggtaaacacgtaatttgtgtcctttggtaataatacattctgtgatttaacaaccaagtaactctgttaacttttttcccttaagagaaagacttagttgcttaaatatattttcgtataattttatttgaaggtacatacacatatgttgctttttttttccttctagttgtacagactacgcctccacatgatctggcagcaacccaaatccctcccgctccaccttccccttcaattcagggtcagagtgtgttgagttatagcccttctcgttcgcccagtaccagtcccaagttcaccaccagctgtatgactggttacagccctcagctgcaaggtctgtcctcaggtggcagtggttcttatagccctggagtgacctactcgcccgtcagtggttataataaggtaatgactctcttctcttgtctagtcacattattttagaattgagaggtatactaaaaatcatctaatgagtcaaaacttatcagtgagcaaactgagagttgatttgcccagaacacccatttaaaaaccgagaatagaacataatatcttaaacacaacatcttaaaatgaaagagaaaaaattagcatttacagagataacaaacttagtgcaccatctacgatctttcagctgtctttaaaacaagttgaaacaaggataattttttactttagttgcttttactcctgttttccctcttgctttccttcttcatgtgaggcctttgtatacctttttagagttttagtgtggtttatcatgttggagtgtcttctaagctaaaagctgagattgtcacatagtttcttttttttttccaatgagtacaaatgattcttgaatatggacgctttccatggaatagtaggaaccttcatttccactcccacagtaatgtgaaattttgttctaatttttaggattaatagaaacaggattgacaaattgaaattttgactccttcttgaagcataaaactattaatataagggggcgttgaaagaagagtggtcatttcagatgctgtcgctactgtgttcgactaacatctctgtagctgctagttaaaagaggagtctctggagatgaaactgacacattgtctgcccttatccatttacatatttcttttttttttttttttttttttttttttgagacagagtctcgctctgttgcctagactggagtgcagtggcgtgatctcagctcactgcaaactccgcctcccgggctcatgccattctcctgcctcagcctcccgagtagctgggactacag

SEQ ID NO: 127502 - DNA, 1165 bp, Homo sapiens
cgtctgtaatcccagctactcgggagtctgaggcaggagaatcgcttgaacccgggaggcggaggttgcagtgagtcgagatcgcgccactgcattctagcctgggagacagcaagactccgtctcaaaacaaataaatagataaataaccagccacttctctgttgattacactgtgatgccaattaagttacatataattttgggttcccttttcatatactgatattaaaatggaagaagttttgataaaacattttaaagatgagagaaggtatatgcggtttcagttacctttataagggatgcaaaatttggtttttaaatggagcaatagtttcttctggttaattcctgtgctttttgttttttcatagatgcagggggaggcacaccctagtgcttcccttattgacagaaccatcaagatgagaaaagaaacagaggctaggaaagtggtcttagcctggggactcctaaatgtatctatggctggaatgatatatactgaaatgtaagtgaatcagtccaaaaaaagtgaaactttaagaagccagtggctggttccacaggtttttgtgtttgtttttgatttttggtgtttttaggttcactggaaagcctttctaattttttttcaggactggaaaattgattagttcatactacaatgtgacatactggcccctctggtatattggtaagtaagtaattttcactgtaacttacatttaccaataaaaaactgccttcaggtttaattcagcttagtatacatttccttattcaacaagtatttgactgcctgctgggttgtaaaaactgggaatacagcagaaagggagcaaggtaaatccctgctattatgaaaggaacattctgttagacaatcagattaataacacttcaggtaattatgagttctgtgaagaaaaataagtttagaggttagtgagatttgtttttattactctcctgaaatgcgctttctgtgtctctacctttttacttttcaagaccagcccagatttctgctccattgatgccttcctcagttttcacattctttcctctcttcttgtctgctcttccatagtcattgggtataaagagtctttatggatgttaaagtaaatttcatagtctatacacattaaagtctttc

SEQ ID NO: 127503 - DNA, 1325 bp, Homo sapiens
aaaaaattacatggggtcaggactcttgacatagatactttaacacaggggaaagaaatgctttgtcactgatggtgtctggccactttatcacgccactctatcctacggtgagccgccctacttaatcagtttacacatgtgagtccataaatgccctagggaagctaaaattatattaatagatacaaaattcagcttgttacaattattactttttactgcgggttcagagcctggtctgaattttgctgcttagctttctcccgcagctgagtgggagccgcaaaaccgagacctgtttccctggtaacgctccgagcgcctgggcctgcgacccctccctttctcgcgagaagagactacctagttcttccggtaactttagagccgcttgccggtggcctcccgcttgagcttggctttgcgcatgcccagagagagtggcgcgagcctgcgttttccggccagaggacatggtgcgttttcggggtcgtgtttgtgcttcctgtcttggaatctacgcgggttgtgggagttccgcgcctgctgatctgtcctgggttcagccaagggggatgtggctaggcgttccgcctctctaggggaagggaagaaagaagcaatagggttgctgaagttcgtgcccaggagccggggagggaagctctggactgggaaattgggacgcgggggctgagtggcgcgaaagctattgctctgtcctctgtgggatacgactgcttgtcgctggaacaagttttgcacggtctgtaagagttgagcctagctgaagaaaggaggaattataaatcccaaatgtggaccaaaacaatgcacgttttcccctctctccctcttactccgctcaccaccccatcataagtacgtgcccttctaaaacttggatccttgtcctttatccacacacaaaagggagagccctggagtacagctgtccaagtgcagagttgttgagatagtaatggcgtctgcatgaggatgtacaacagtctttatgacttacagcagatatggaatatagtctcccaaaacttgacattttgagtttctgaagttagccttttgcctagtccgtgtaacataccccaaagacaaaatacaaagtatttctagacataacccttaaattacaaaataagacatttttatgtattggaagtattaaattgttcttaaataaccagccacggctgggcgcggtggctcacgcctgtaatcccaacactttgggaggccgaggcgggtggatcacaaggtcaggagttcgagaccagcctggccaaaatgttgaaatcccgtct

SEQ ID NO: 127504 - DNA, 1062 bp, Homo sapiens
ctcctgccttagccttgcaagtagctggaattacgggtgcgcaccaccatgtctggctaatttttgtatttttagtagagatgggttttgtcatgttggctaggcttgtctcaaactcctgcctcaagtgatccacccgccttggctgggattacaggcatgagccaccgcacccagcccattgcagttttaatttgcattttcctgtggtaatagtgaacatcttttcatgtgcttgtttgttttctgtataccttctttggtgaaatacctgttcatatcttttgcctatgttctaattcgtttgtttgcttttttactgttgaattttgagagctccttatacattctagctactgatcctttgtcagatatatggtttgcaaatattttttcctagttcataacttgtcttttcatcctcttaacagggtctttggaagaacaaaagtttttaattttgatgaggtccattttatcagcttttccttttatggatcattattttgttgtctagtctaaaaagtctttgcctggcctcgatcccaatgatttttttttctaccatgattttttttctaaaagttttatatataagttcatgataaactttgaggtaatttttgtataagagatgtgactcacatcaagactaagtttttgcttacggatattcaattggtctggtgccatttgttaaaaaggttaccttttctctatttaattacgtgttcacccttgtcaaaaatcagttgggcatatttacgtgggtctatttctgggttctctattctgatcccatgatccatgtgtctgccttctgccaatatcctaatattgattactatagctgtatagtaaattggatacttaaaattggttaaactgactatgcccactttctttttctttttttttttttttgagacagggtcttactctgtagtccaggctggagtgcagtgctgtgatcttggctcactgtaacctccacttcctgggctcaagcagttctcccacctcagcctcccaagtagctgggatcacaggcgggcgccacca

SEQ ID NO: 127505 - DNA, 1048 bp, Homo sapiens
ctgtgatccacccttctgaagtaagtgattctgtgaggtaagcacctagatttaaaatgctgtattttttctgaggagtctagatattattttacagactactataaaggaaggaatttcttttggaatctgtatactttcttataattaaaactttaagagctgaggtttatttcagatatatagatttgtctatgccttcatagtttgtttttttttttttctttcctcctggaaattaaactgggatttgtgaaggacagctcccttcttcctctttaatttctcaattcataaccaaaatttgactcaataatggtgcctaagattaatttcatttttttgatattgagataaaagtatatctgctttttacaatacatattaaatacatatgtccttttatatcctgagatttttaaactggcttttttgttaaacttttaattttaacataattgtagatacatatatattttgtagacaataatgcagagagattccatgtacgctttacccagtttcccatagaggtaacattttgcaaaactataatgcactatcacaactgtgatattgacatttgatacacacagtcaagatacagaacgtttccatcaccacacggattccttatgttgcccttttataaccacacccactttctactcccaccccttagcccctgcgatcaccagtctgttctacattgctgtaattttgtcatttcacaaatgctgtataaatggaatcatacagtatgcaaccttttggattggctttttcacttagcataattttctagatattcatccaggttgttgcatatatcagtaatttgttccattttattaatggctggtattccatgatatgaatgtaccaagtttaaccattcacctgttgaaggacatcggggttgtttccactttttggctattaaagtataagtgctataaacacttatgcacatatttttgtttgaacctaaatcttcatttctctgggataagtgctcaggagtacaactgctggtcacaatgtagtt

SEQ ID NO: 127506 - DNA, 1016 bp, Homo sapiens
ataggccccagcatcgccctggtgcgatgtaggatttttagaaccccggtgtctccgtggcgcaccttaggatttcaagaacgggataatcgcagtgccgagatcgccgcggtgcagcttaggatttcaagacccaggtatcacggtggcgggagtcaccgcagtgactagaactcgcagtgcccgtcagccgccttaagtatttttcagatttcagtaacaagcgcgagtgagaacggcgatgtgaccaaactgtcatgttgcgcagggattgttcaccttggtttcgcgggttttcaaagtggttcgtctcgcggcgacgccatcaggtgggcggcaggttgggtggtattattacgggagtgtgtttttctgtttacaagatgaagaaatcaaggctcagaaatttttggaaagtttgttactggagtttgcttattgtctccgctcatggctcatcaaatagttgggattttggccaaaaaatgtttgcttaacccattttgcctactgacggctaggttgcttcacttctaaaaatcctaaaagttcatgggggcatttttactgaggtaataagacaaaaaatggccccctgagaggttgcctctttgctttcttggagtaagaggaggagggtgtggaggggggtgtccaggagtggagtatgttggtcgatagcctcgttttttaaccccccactttccctgagcagcggcggggaagcctccccatttgccgctctggccgcccctcccggggctctctgctgagtcactgcagagattcagctgctggaaccccggggatgaatgcgatgagaagcactgggggaaaggagtaatgaaatctgcacatgaaaatgtatacattgaagtacaggacagatagggctgggcaaatgatcgtcaaaacctaatggtttttgtcatctgacctttcaaggagatactgggatacagcctgctattgttgggtgaaaactgtgatataaccatcatgttctggcacttttt

SEQ ID NO: 127507 - DNA, 1042 bp, Homo sapiens
cagttacactacaaataatctacagaaaaaatgaaatcagggatggtaaggagagagaaccaatggtggttatatctattaatattttatatattacctgacaggttgctcaaaaaaaaaaaaaaactaatattggaatacatatcaagctacaaagaaaacttatactaaaaggtaaggtctgcaggttggaatctcagtccctacccccattctcccagcagttttctgcgcttctctgcaagcacactacacagaaagagagagagatactctcctccatcattaaggagcaacaagagaccaatagccacaaaataaatacctcagctgggacttatgtgaccgatacacgcaggacttccaatagtccacttcttaccttggtagaagatacgcagtcccttgtaagtgaaaaacttgcctgaagacttccatgagtgaagggcaggggagagctgagggggtgggatgtgcaggtacgcagcaagcaggggcacggccagcagccccacctggacccaccactccctcatcctgtaggaaaagcagagacccactgtaagcagtcaggtaacattgtccactcatctacaaaccaaaacctggtaagatggggtgggagattgctgttaccatgcaatgattacattgcccttcacataggcacaaagctgaccgagactataatcaaacctctgtctgccatagcactcaccatatttgttcatcattctaatcttaaggaaaaaaaatacattatttcaacatataatcttctgcctctgctccccgactttaaccccttagcccctacccttgtggtcttcccaatacctgctgaagaggactttatataaataaaagggacatgacttaaatgctggacactctttcgttgacttttatcaaggcttcccaggaaaaaaataacttctttcttatttactccaaaagctctaccatctacccactacccccaaccagtaaaatgttcaaaaaatatatatgtgctatatctcatgttttaaagagtgtgtgt

SEQ ID NO: 127508 - DNA, 1045 bp, Homo sapiens
ttgtcataaaccgtttttcattattgctcctgacctcctctcatttgctatattcaattaagtaagtatacaatttttattatgttggcttgggttacttccagttttactgttttagaaaactaatgttgaagtaaaagcttcatgtccatacagtttattttttccttacattttcaaactatactacttgtataaatggaatgattttatttgcacagattctcaagaacaaaactcttaggctaaagtatatacaatttttaactgcttctaaattatttttgaaaaccttattaccaaattttcatgtcactggcagtatatgaatatacctgttctaatcccatactattagcaaggttaatattgtctaaatgtttacctaatttagatgatgctgaatgcttccatattgtcatatgcattaaaaaagttcatgtttatgttgattaagccctttttatagttgacaggattttgtaatagttttattatgtttttgatgttagattgggtctcctgctgaataaaaagtgctgagcaaacagcataagctaaaggtgttccttgggaatagttgctgtatcttagagaatttctgtgaggccattcatgataaagtacaaagaatttgtagtttatgtgttgtgatcatatgcttttaactgaaaatttacttttcactgaaaaaatttgcatattacagaacaaaaggagaaatggggagatgctgtttaaaaacacctaggtgaaagtaaacaaggtgccttcaagtattttcacatagcatgatttttacaatgttttaatatacagattgaaaggagaaaaggcctgttctcacctaacgcagttaagcttacattttacaaataattgtgtcattttaatgtcaatttggtcacagttgcttgttctttgtatcagattacttagattttaacatcttcgaggttatttttatagggatttggcataattgattgtactttccttcttcctagactctgtgggtgtggttggaagtccagagatagttgtg

SEQ ID NO: 127509 - DNA, 1036 bp, Homo sapiens
atttgggaaggtctgaccttgaggtttcatcgggtgattgcccttgatttcttaggctttggcttcagtgacaaaccggtaagcagcacctatgtggggctggtgatggggtgtgggggcagacgcagactatgagggtcaggctggcagagagagctgtcctcatgacttcatcctgtgtatgtgggctttcctttcctcagagaccacatcactattccatatttgagcaggccagcatcgtggaagcgcttttgcggcatctggggctccagaaccgcaggatcaaccttctttctcatgactatggagatattgttgctcaggagcttctctacaggtcagtggagcttcagacttcagcttatgatgctaggaaagtacattgtttctggactgtttgtatcctttttctctcgttttcagcggtgcactggtttaagtttgctcagctacatgtgtgtttcctcgtctcccttctaggtacaagcagaatcgatctggtcggcttaccataaagagtctctgtctgtcaaatggaggtaattgccttggcggtaggtagaaagtgggtgtaatctagaagggccatctttagatacagcggcacctaaatggtaatctgataatatttcaagtagacataattaaactatgggatctctacctcttctgtgccatcaactcctttggtggtctgacaagatttatggaccctttctcagaatgttttaaaataaagaaacaaacagcattacaaaggatagtgactttacttacatagtcaataaaaagctgcattatagtcacatgtgctttttcaatgcattagatagcaagttctagtggaggacctagtaacagctatatcagaaggagtgaggagtgtaaagactgtttgccatatctgaaacaactgcaataggttatgagagtgtaggattgaagatacagaaaaaagccacaagtgtttctaatactactatgatgttagtgtagaaaatccttacttaatgtcatcaatgggttcttggaa

SEQ ID NO: 127510 - DNA, 1020 bp, Homo sapiens
aaaccattcagtagcaggagatttggctaaagatttagttcctagtataaaaccttttgccccggtgaggatcttcctctgggttcttgagctttacctccacttattcccctccagctactcaaagatggaggtgtgctgtcacccatcctcacacgactgatgaacttctttgtattctctcgagggtaagtgtcactgtcaaagattgtggcctagagcaatgtcgtgaaaagttgctgccattacaattctgggccaaatcctaaggcttgatattttaaagcaaaggtgttggccgcttgccagggaagtagaaggaattcataaatcacttatgggtcagactgcatggcccagactgcatggcctctgaggttccagccatattgaacattctgagttctcctcacacttatcttcctgcgttttggactctttcagtctcaccccagtctttgggccgtatactcggccctctgagagtgagctgtgggacatgtgggcagggatccgcaacaatgacgggaacttagtcattgacaggtaagaagttaccctttgctttggtttccagagacgtgtttttgtggagagtggggattgcttgttctgttccttgctggcttattccctatcacaggaaggctgatgatgacctatggggcaaaccaaaaagtcatggtctatatgaagaaagaaatagaaaataagagtgaaactggactctttgttagtattaaatgcttcaaagtattgaatcatggttgtgaaagtagcctagtgcctccctcaaggtacaaggctcttccttttgcctatctttctgcagcaacggggagtgagagggcagacttctctttctctgtcttgtacaaagaattcccatgccttggttcaaatgagaatgtagacactttcacaagggacccagaggtggtgatagctgtaactacttgggataagactctgacttctagccacctggctcagtgtagcttccagtgtttttactgatgg

SEQ ID NO: 127511 - DNA, 1027 bp, Homo sapiens
gcatataattttaaataaaataccccctctctcatctcctcctgggattaagggaagatccttggttatctctgcttgggcagtgagttgctgtgtgatccacttgtttgatgcttcatccttctctaaggagctgaaagtcatcttgctttgacaattgttgcaaaagtgttatattttcaagttgttgtttgttggattatgaacatttaaaaactagtttgtataaatggaattggcaagtttatctgcctaagatacaatttcagagtagaaggtgaataagctctttggtggctccttccagtgtggtgtgtccacagggtcatttactggggcttcccactggcttacatccctcccgctccagcctcaagttcacctgcgtgctgttctcttccactaggaaaacgctgccgcggtccacagtgtcgattctggatgaccacattagccactatccacagctagaggatcccatgggcttcttgaatgcatatatgggcttcatcaactccttctgagctggaaagagtagcttccctgtattacctcccctactcccttatgtgttgtgtattccacttaggaagaaatgcccaaaagaggtcctggccatcaaacataattctctcacaaagtccactttactcaaattggtgaacagtgtataggaagaagccagcaggagctctgactaaggttgacataatagtccacctcccattactttgatatctgatcaaatgtatagacttggctttgttttttgtgctattaggaaattctgatgagcattactattcactgatgcagaaagacgttcttttgcataaaagacttttttttaacactttggacttctctgaaatatttagaagtgctaatttctggcccacccccaacaggaattctatagtaaggaggaggagaaggggggctccttccctctcctcgaatgacgttatgggcacatgccttttaaaagttctttaagcaacacagagctgagtcctctttgtcatac

SEQ ID NO: 127512 - DNA, 1084 bp, Homo sapiens
tcagctgtttttagttataaacattttgttaaaatagatattggtttaaatgatacagtattttaggtatgatttaagactatgatttacctatacattatatatattttataaagatactaaaccagcatacccttactctgccagagtagtgaagctaattaaacacatttggtttctgaataaattgaactaaatccaaactatttcctaaaatcacaggacattaaggaccaatagcatctgtgccagagatgtactgttattagctgggaagaccaattctaacagcaaataacagtctgagactcctcatacctcagtggttagaagcatgtctctcttgagctacagtagaggggaagggattgttgtgtagtcaagtcaccatgctgaatgtacactgattcctttatgatgactgcttaactccccactgcctgtcccagagaggctttccaatgtagctcagtaattcctgttactttacagacaggaaagttccagaaactttaagaacaaactctgaaagacctatgagcaaatggtgctgaatactttttttttaaagccacatttcattgtcttagtcaaagcaggattattaagtgattatttaaaattcgtttttttaaattagcaacttcaagtataacaactttgaaactggaataagtgtttattttctattaataaaaatgaattgtgacaaaagtggactctggcttcccctcccccctcccccccacccctctgggataaaaattttccagcattgccaggagctttcaggtacacattaaagaataaaatgaagttaagcagctggagtataggatagtatttgattttcaagatcacccaaagctgcactatcgtcccaaagctgaccaagtagaataaaaagaaaaaaaaaaaaaaacaacccatgcgcaaagatagacatttgcttgatctgctggctcagggccaaatgtttaatttgcttctccaaagtcattcatcttcaaaagtctgattctgggaaactgatgccactagcctaaaagcccactgaccatgtagtgtgcatcagtttcctctt

SEQ ID NO: 127513 - DNA, 1336 bp, Homo sapiens
tttccttccattttcttgcaaagcttaataataggatatagatgggcatcttatgccttgctgttgtcccatcatcccattatatgagtaacaatttgatacccagtcaaaatgaataatttgttttgcatgctattcttggttattcttttaagatgtacatttggcccaaaacaaatctctccaacagataccaaggccaccaccaacattccttttgagtactccaaattggtatttttgaataccttctatgtacctggtttcatgggaatataaaaatatatatatttggaatttatgtttgtttaggattcagtttccacaagtctctggaaaagctaaactaaactaatagaaaggagatgcagggatagcatgataaatttcattatccagtgcttgttttgggttcttaatatggttttccttacttttttctctcaggtatattcagaggtggctatgatttattggtgaggtccaggctggccttagccgatggagtgaccatgcaggtgactgtcagaagtaaagagagaacacctgtagatgttatcttagcttctgttggataaatgcttactggacaagaggaaactgatgcacactacatggtcagtgggcttttaggctagtggcatcagtttcccagaatcagacttttgaagatgaatgactttggagaagcaaattaaacatttggccctgagccagcagatcaagcaaatgtctatctttgcgcatgggttgtttttttttttttttctttttattctacttggtcagctttgggacgatagtgcagctttgggtgatcttgaaaatcaaatactatcctatactccagctgcttaacttcattttattctttaatgtgtacctgaaagctcctggcaatgctggaaaatttttatcccagaggggtgggggggaggggggaggggaagccagagtccacttttgtcacaattcatttttattaatagaaaataaacacttattccagtttcaaagttgttatacttgaagttgctaatttaaaaaaacgaattttaaataatcacttaataatcctgctttgactaagacaatgaaatgtggctttaaaaaaaaagtattcagcaccatttgctcataggtctttcagagtttgttcttaaagtttctggaactttcctgtctgtaaagtaacaggaattactgagctacattggaaagcctctctgggacaggcagtggggagttaagcagtcatcataaaggaatcagtgtacattcagcatggtgacttgactacacaacaatcccttcccctctactgtagctcaagaga

SEQ ID NO: 127514 - DNA, 1039 bp, Homo sapiens
atgctgaaaacagacgatggcagtgggttttcccatataggaaagaatgaacctatcaagcctgcagaatcaatttcaatgccattaggggttgagaaaagaacgactgtggtttaattaggataggattttcttcagagagaaggggaaagaagtgaaagttaacacaaggccagaacaggtcaggtgaggcattttttttaaaccatgaaagagatacagaatatggtaggggaaaaggtcatgatcaagttagaatgaagagtcaggagagacattaattatagcaacccagtgtggttccaattaagcagagaggctacagcaaatgaggaggacaaagagacaacatcaggtatgaaggcagatcacagactgggcacaggggctgagttttatgtggaggtaaagacagaagacacttacatataaggacctgatacagagaaagagattaaggaagtaaataggaatggtgttagtagagataatgttcctgaaaccttagtgggaatttttttacttaaatggtttgattgatacaatgagaggttacagggatctaaggaagtctaggcagtaatctgtcgaagctgctggagaggatgacgaaatggggcgaggaggcaagatgcgggggcctttccatggcaagaaaatactgaatgcactgccataatgtaaatatgagagttacacagacaaagcaaggcaaataccaaagagaatcaggaaagaatgccctgaagatctgcattaaaactgttctctgaaattaagcttgtcttgtgaggattcactgaaaatgagagtcaaccactaaggagatttgtatgaaaagaacccagcgaattagagaaaagatagatgctggcagctaagacaggagagggacatgtgagttgggccagggtacagaaaatgcagtgtggcaaagggcagagtgggaaaggtgggagggagctgccaggtctcaaccacctgggggagaccatgacaaagtaagagacacttatgaggtatttccagaaagctttgt

SEQ ID NO: 127515 - DNA, 1046 bp, Homo sapiens
gtactgcatttagtgatttgcctaagatcattccacaagtctgaggcacataagatgtgaccaaatatactttagcagtctttcgaaggctagggaagggcaggaatgagaaatcttttgaggtatagtaagctgggcatggatctagggagcaaagaagaccccttccccagcctgaaggcttatggctgagctctaaaacaaagatttcttatgtggcctggcaaactgaggtgtaacacagagaaagatctctagaatctgccactactactaatgccctgctgaaaggggaaacctgatctgttcctcagatcatttgtaaacagcagataactgaatttaattaaagctgcagcaaagtcctgacccagatcaactattagctgctaaaaatgaaaaaggacctgcacttttctaatgataagtattagttacatcagtgtctactgcacctttataagcagtgtctagcaaacaatcaaaaaatacagaggcagtgacatgtaacccataaacaagagggaaaaaaatagtcagtagaagctgacttacagatgacccacatatagaaattaggaggcagtgactttagaaattactaggcagtgacttttaaacaacttctctaaagtgaacaccaaaggagttttgtaaagtgaacttttgtaacttttgtaaattacatctttccactaaagagtggaaaagatggacaaaatgtgtaaatgggtaaggaattcaatagataaatagaaactagaaaaaaaatcttgaaccaaaaaatacaatatcaaaaataaaaatttatttgaagcacttaatagcagattggacacagtggaaaaaagattagagaacttaaagacaagtcaatagaaattgtccaaactgaagcatagggagaaaaataagaaaagaaaataaaagaatagaacatctgaagcctagggaatatatcaaaaagtctaatacttgtgtaatgagtctcagaaggaaaggaaacagaatggaatagaataaatctttgaagagataatggatat

SEQ ID NO: 127516 - DNA, 1976 bp, Homo sapiens
tgcactgttgttctgttgtgattgttttttattttttgcattacattggtagcagcgtgagacttgaccatgctagtgctagcaataaaactctttttttcatctgaatattgctctcagtctttttactcatctttatctgccaccaccttcccagtgctttttcccagttaaagttaaaaagaactgtatttccagaggattttatgttgagggctcactatagtagtacactacacatttaattctttatgtatctcagataatcagggattacgtttgatttctaggactctctgggatctgtatataatatgtgcccttcacatagaggaatcttcataacttcaaaagcaggctccatctccatataggaatttctttatgactttcctgatgggttcagcctctgcttgtgtatttcttccaaactgagattctccattttgagacagtttatttcattgttgaacagttattcttctttatatataatcttaaatgttctttcttaaagcttcaacttcgttgtttgggttctgccctttgggatattattactatattatcatccttttagtgcattctgaatatttgcacagaaacaaatataagattggtttttgaaaattattttgaagcataagagtaattttgcataagcatgtttttccttaacaattttttctttttgaatgttattagggaacaatgttgcaagccattgaaagatacatgaagcaggccattgtggataaagtttccagtgtatccagttcagcactggtatcttccctggtaagtgaacaagcagcttcctagttcttaagcatggtacagttttgagttgcgaaaacaaagtatcactatgattgtctcacaaatgaaacagttaaaaatatgtatacacctctattactttatccaagtgtgttttatctagagcaggggtccccaccccagggcttcagaccagtactggtctgtgacctgtcaggaactgggctgcacagcaggtggtgagtggcaggcaagcgagcattgctgcctgagctccgcctcctgccagaccagcagcagtgtgagattctcataggagctcgaaccctattgtgagctgcgcatgcagggatctaggttgccggcctcatatgagaatctaatgcctaatgatctgaggtggaacagtttcatccaaaaactatccctctgccctctgtccatgggaaaattgtcttccataaaaccaatccctggtgccaaaaaggttggagattgctgatctataggatcattgagcaattaaaaacataaaatgttcgtatgtttgaaaggttttggaaatctgaaagttatgttgtacacataataaaagaggggtaagtgtggggtatgggacaggaaagaaacctaggacccttttctttcatttaaaatcttctttatgacctgcctttatgacttctactacttgtctctttgtcctctgctttttctggtgccctttgtctacgtgtatccttcaatccaaagtttcctgtcccacttctgaatttcctcccaggaagtggtcttttttttagtaatacatttttctttccgtttttcagcagaacacaatttatacattaaaacctatcacattgcatttgattaacgtcagttacctatatgtgaatgtgtaagacatctaaatacaagagttcctgattctggaatataattggctgagttttatagcagagaatatactagtactctctttcttccaggggagtttcctggaagtaaagcttgttatgataacgttatttaagcaccgttctgttgactgtccatccctatcctgttcttcctctttcattacttccttttacacacctctcccagcttacatatactcacctttgtaacaggtatgggagaaaatacttctggtttatcagttgctccaggagtaaagacacaaaatagac

SEQ ID NO: 127517 - DNA, 1038 bp, Homo sapiens
aactcattggcccttgattcctgttggttgaggattatctttagcacagaaataccccacacttcaggattatatatttctgagtgacacgttggcaaccacaggcagctgacactcccatgtcagagaagtcagggccacaaactgagccagtttgcatatttggaatgatgatcactgttaggtcactttggattcttcattctagtgaaggtaaggaaagtgctaccgtactcatagaggtcattgaccttgattcctgtcaggagctaggatcatttctgtataatggtggcagaaaggactctgtctagaattcatggtattcccttgagtatattttggtgctttcttgcctctgacagtggtggtaggggtagagaacaatcagtggttcaatcagggtgcacccaacacagggcttacatcctttgggataaaggtttgagtcaactattggagaagtagccaaaaccaggtaaagtgctggccagtggggaaggaaatgtagaatgggtggttttaggaaggagatgatgaatatcaattatggccttggaattagttgtagcagcaaggattgaactatgttccactcaccttcctttatttagtcttttgtagaaatagtgattgctaccgtcttgaagcctccatgatagattagacttaatggaggacatgaacaaatttgagggatggaaagggtagactgtattggacacctcttttgagccacttcacatggtctcaggccttatctgtgattccagctgtggcatcatgagcaagtcttttggggctcagctcactggcattgttactgccttacttcaggtatgcactgagtgttttttgcctactcagattcacttgcagctcacgtgtatactccccagaagtatgggggaattaatactctggggttaacgttcagccaggggctaacagttagtggttctgagatgtatttcataaggctcctcggaagattgctcattaaataaccagtggccagcatcagtgacccactcaagg

SEQ ID NO: 127518 - DNA, 1955 bp, Homo sapiens
cactgcagcctccgcctcccaggcttaagccttccaagtagctgggattacagctgtgtgccaccacgcccagctaatttttgtatttttagtagagatgtggtttcaccatgttggccgggctggtctcaaactcctgacctcaagtgatctgcccgtcttggcctcccaaagtgctgggcttacaggcgtgagctactgtgctcagccgttaggtttattttttaattccatttttccacagattttttgaagtcccctcgtatttgtgatagccctaaactggaaacatcccaaatgctcatcaaagaagaaggaacaaattgtggtatattcatgcaatagactattactcagcaataaaaggaaaaaattgctgattcaggcaacaacatggataaacttctaaaacatttatgttggaaagaaaacagacacaaaagaatatatgctggatgattctcttcgtataaactccaagaacagcccccaaactcatctgtggtgatagaagtcagaagtctactgggttagaggaaattgattggaaatgggcatgagggaactttctggggtgatggaaatgttcagtatttttattttggatggaggttacatagatgatcacaattgccaaaactgatttagcataatatttcagttgtccattttattgtataaattacagctcggtgaaaaaaaaaaagagatgtagttagtgtcttaactaactaaatgtatattgacaacctgattttactgttctactcattacaagaaggcatacccttatgtgatggcacccacccagtgaaagtctggaattgagtcctgagagaattgaggaattgagaattgagagaattgaggaattgagaattgagagaattgagaattctggaattgagtcctgaggaatgatccatcactcacattaggaagtactctggggagtgggcatcagtatgtgagaagttacgtcccggtttcagaaaatcaaatgaaaaattcaaagaccatggtttaggaagaaataaatgggttgtagaaactgttatcagctaggcagttttgaaatcaattgtgccgataatgtgtggattcgggtagggggagaaagatactttgtgcttcctaaggaaactaaatgctaagttcatccacttagtaagaaatatacaagcccgaaacaacttttctatttgaatggtgcagctgttcctgaataattacttctgaagatttactgccaggaaatggtttagaacaagaaaatgagatactattatgacttaaccaccactgtagtgaaactcctctcaaagatttccagtaacttcttacttagttaattttaaaagttaattttctgtccacattttacctgacctctttcccagttttaacatggttaaatacttcctggagttgtaccatctttggctttcagaaaccatagtcctggatttcctctcctctttgatttctccattttatcctatgatagctcagaagtggctggttttcttctgcctgtcatctaaatattggtattccctagggttcatatcagtgctgtagttctttcccaaactcatcatgctctttgataccctttatatttgtacatgcttctccctgtgcctggaattattctgttgccttttccacatagctcaaatacatgtcattataggtactgacttccttcttcttctttcttgacagattagtcattgtcttctctgttgttctcttttttttttttttttttttgagaggtagggtcttgctatgttgattaggttggtcttgaactcctgacctcaagcagtcctctcatctcagcctccccaagtgctggaattacaggtgagagccactacccctagcctcggttgttctaacacttgatttttttttttaacctctgttctagtattttaatatattgt

SEQ ID NO: 127519 - DNA, 1052 bp, Homo sapiens
gtagatcttcaggaagatcagcagtcccctgtaaggcagctgtttcaggggaggccattatatactctacaggcaaaggaagactaatttcctcacatatgggataaaggactgatgcttctactagcagaagatgtcacagaatttaggagttcggggtacttggcttcatcagagtctgtccatatatcttcattctacttttcagggccccattccttgccagtcaaggtcctaactttaacataagatgtcctgcaagagtgtgaattcaatttgcattgtaactgagccacctgcaggatatactttgtagaagtctcagccctgtagccacatgatataaggctttctatgaaggcagttatagatttctggcccccttacccagatttgagtagtgcttttaaaactccgagctcatcattttcttttcctgagaaaagaattatccagtgtacctagaaacaactaattaacccattatacaacttatttttactaaaatcttctatggcatccactagttagttacccaaggctttgtcttctgtaggtccttgtctgcagatgatgattttaaatattttgccactgcatgctgtggactactagtagcccctttaccattggaaactggtcattaataccttcaatcaaatcagagaagcaacttcaggttcatatctttaaggacttcttttaaccacttcctgtagcagaaattcagggttcagacagggaaacagaaccactatgagtattgtggaattaggtgtttattagaggaattagactagaaaactaggcaggttgagctgctggagtagggttcagagggaggctgttacataagtcatggaaggctattgcctcttttgtggctttgtttttgcagccaggtgtcttcccaaggctgctgttactcagagggctggcagttgggaagaaaagctggacatgtagtggagaaaaggaagcagagtaagaaagaaaaaggatgaggacaaacttttgaagcctgtagcacagaggtttatattaagaaaaga

SEQ ID NO: 127520 - DNA, 1022 bp, Homo sapiens
atagtgtaagctcattcacaagacattactacccagaactctgaattcaagttttctcttcttctccatttttgaaagtgtcagacgacaagaaagcaagctgtttactaaagaactgcagcatgaataatttctgtattataaatgataagatattctattttgaggttagtttataattcatttctgtctgttgtgcctaaaatcttggctattcagaatgatgacggctcctcagatactatggaaataataaatcatcaaaggcatacatttattcactctttcgtgttaactaaagcagaatgtatagcgcagagactttgtaaacaactcttacttaactgaaactacaatagaatctgtgtactagccatacaaaatccactatacagtgttccttcctttattattgaggttaaaaattcacataacataaaacttaccgtttttaccattttaaccattttaaagcatacaattcagtggccttagtatgttcacagtgttgtgtgaccatcaccactctctaactccacaacattttaatcaccccaagaagaaacctgtacccattaagtagacattcttcattcattcctcctcccagctcctggcaaaatctgctttctacagacttacatagtctggacatttcatgtaaacggaatcatacaataggtatgatacatgatacatacatacaacagggatgatgcatgataaaaggtacgcagccttttctgactggcttctttcacttagcatgatgttttcaagattcatccacgttgtagtgtgtatcagtacttcattcctttttatgactgaataatattccattatttggatagacaacattttgtttatccactcacaggttcgtactggcatttgagctgtctcgttctttaaatttaaacttttatttctgtcagtgtaatatatatccataaacaagtaagagggcactgagtcccagagcaaacaaacagctgttctctgtcctactgttttctctc

SEQ ID NO: 127521 - DNA, 1065 bp, Homo sapiens
aagtgggagaagttggatgtaggctggatatttgtgggtaccaaggaattgtttgttttcttaggtatggtaagattttgtggttatgtagaagagtgtcttcattttatagaacgacctcaaagtagttaggagcagtgtatgtatgggtggttatcaatttactttcaaacaatgcagcaaaaaatatgtatctatattacatataattaaagcaaaacatgataaaaaggaatagttattgaatttagatagtatggatttaggaattcattgtattgtcattccaatttaatgtataaaattttttataacagtttataaaaacagtgcacacccctttaattaggtggcctgggtacatgaagtatctttttggatgcctagaacacaaaaagggacgacaacaggccacctaataagatgataccaagaactataccatgacggcgaaaaagaactgctgcaaaaaataatttgccaaggagaactcagagtacaaagccttacctttggagtagagggaaggagagtcttaagtaaagctcacaaaaacccctaactcatagatgcagtctaaggaattcattccggaagcgacattagcatctcattagtgccattatgtgacttacttggcctctgagctagtctattttcttccctagaccccaaaatctcagtaatcctttggatccaagttatctccaagtgaaaataataggtttaggaaagcgtttttcttcaacttctatggagcacttgcttgctttgtcctatttgcatgtccgacggacggttctccagcaccactgctagtcgtcctccgcctgcctgggtacttgatcacaggatgcctctgacttctcctgcctttacccaagcaaaggattttccttgtcttcccacccaagagtgacggggctgacatgtgcccttgcctctaaatgatgaagctgaacctttgtctgggcaacttaacttaagaataagggagtcccaggcatgctctcccatcaataacaaattcagtgacatcagtttatgaatatatgaaatttgcca

SEQ ID NO: 127522 - DNA, 1176 bp, Homo sapiens
acatcccctcctcagtattccccagcagcgtgcagcacagtgcgggcttctaggaggcagtcggtggatatttacccatgattttaagaggtctgtcttgaccaggaatgttgagaagtgacctgtgtctctgcagcattgctgctagttagtccctcgtggaagaagtggcatgtccctcctgtgtctggctcacggggaccggcgcctcctgtgtttgcccccgccatgccctgtggtttcctttgacaccctctgtcattgtctatttttatgttttaaacttcagtgggatttacctctcgtttgctcccatatcctcctggtaaattgtaaacttggtgaatcaatgatgagtaatcagtaggcagaaatggttggaatttcctggtcccagtttcagatcatatctgtctttccccagactcctaacttcctgttgggacatcccttggtctggcctttccctccagagaagcccccagacccacccgcagccttgatttactgatgcctaatcttattttagtctttcacaccagtttttaacaactcgactgtatagatcttctggaaattttacccaaaaatgttagatgtgccatcccctcacaggggaaagtggtggggtggtgggggttaatgtgttgaaaatctatgtatcttgtattttatttgagtcagctgtgttttcacaacaactctgagagttaacatcatttctactttataaattaaaaaaacaaaacaaaaacaaaaaactaaagccccaaaaggattgaatagcttgccaaggctgtgtaacaagtgaaatttgaatccgggtctgtatgatcccaaagcttaagctgcccgtctttctattcccagttcaaacgtgccttgaaatgggagctcacttgatagtacttggcttttaaaaggctacgtacatgtaagtaccttcactcaaatatgctggggctcagtaggagaagcaaagagaaggaaaaggtattgattgatcgatttgattctaagcagagattgacagagataagcttctaagacctttcaggccccagagtgtgactgttgagcacctaagaagacctcacttgacccgtgacttcccgccagagccttgggaagcccatgagtgcagcgtgctcgccggctgggctggaacttgctgct

SEQ ID NO: 127523 - DNA, 1044 bp, Homo sapiens
tcagcagcattcgccagcgtcgggtcagactgagtcatggggcccgagctctccacgagttggttctccagttggttctcgttgggggtaatgcccttcatcgaaccgcttcatccccagcctgtattgtctccgtctcttcgcagttgtcagagggctcggccgccaccctgaaacagcccagagctctctgaagagcacgagcttttacgcttctctccccaaatcaactgactttttcattgcttctgtggaggctttctgtgggagaaaagcgtgtttatggggcaagctcagagagctcctgtccccgtggtggaatttttttagtggctctgcccacgtggtggtgagcgccggtgaggatgggacgcattttctgctaaaatggctgtgcgaggctgccacctcgtggccagcacaaggcagtgagtgtgtcccttgctggagcttctgggtgaaataaactcattttaaaggtcttcagcaaggacctcactccctcactctctcagtgtgcatatcattccagctccagggcttaatgcgtctgttgtggcatctctcaaatctgtactttgctatctctttgactacagagtcactaccttccgataagcccttctgctgtctccagaccgatccttctaaagcgtagatgtcattgtctttctctcattaaagctctttcatggctcctcattttccaggttccagctcatgtctcaggaggccgctaagcccactcctctgccccagcctgtgtctgcgcacgtctcttctcccttcctcctggtttcctctggctgatacctgctcacctgaaagtcatctcaggtgccacctcctccagggattcctcgcattagattagcttccttcttccccattcctagctgacttccttcattatgcctcagatcctttttttggaagaaaaagaaagaaatggaagacagactggccagcagggggagagagagggagggagggcatatcagagaattcaatatgctgcgttttaaccagatacttttcttcctc

SEQ ID NO: 127524 - DNA, 1061 bp, Homo sapiens
gctttccttttcttgtgggtagaactctggaaaagtggaggggggtgggtggggcttcaggtaaagtacgtcagcaaattggataagtcggatcttcgttgtgtgagtgggtaagagatgaactggggggaggggtgtgtgtttgggcagtgagcaagccggcaagagaatgtgagtgggcggccagttggttggcaagtgagaggctgtggagaggttgctgctgggacgggctgtgcaattaaacagttgagcagatcttaatagcagactggggcggtgctctccgcaggcctgcggggagcagggagcaggggaagcaagcgagctggaagcatcttcgggcacagagctagatacgaatttcagaagcacataacctgaggaatagaatgcaaccagaggagggagaaatagagattccaggcagcgtttcctaaacttaaaaagttttgaatacccagttttgccttgttctggggacctctggcaatgttgttcaagggaggaatttttaatttcatagaaaagtgaattttaccaccacaagagaacatgagaccaaggtcataaatccctttgtttggagtgtccgttctgaactccttgtatacttttatttgcaggaagaggctataccagcaagtattatggttttactgggtggggcggcaaggccaggaagagatggagatgctgttaaaggtccttgctccagaacattcagagatcagaggaactcaagaggtcaaagtaggctgatgtcattgttcatccatttattcagcaaaactttcttgaacacctactgtgtgccaggcactggttggcagtgaggtgaagacgatagtgatgaaaacaaaggcatggtctctgtcatcatggaacctaagtaaacacataccaaaaaaaatggcccaagaaaaatcatgccctgaggggaaggcactcagatgaaaaggaccttcttcccagtggtcccctgaggaggtgatttccaaggtctcagctaagggatgagcaggaatgtgtgggtgcagggggtaggggtgagagctctc

SEQ ID NO: 127525 - DNA, 1968 bp, Homo sapiens
aaaaaaaaagttggttttattagattacagagaatactttctctatccaaaatctgtgattttaatctagaacactgaatgtaggtcagtatccaccccattttcagaaatctgggaagatctttttttgtttttcagcttctcagaataaatactttctaggatgttacaaacatggatgaagttcaccagaacagatccagggttaaccttttaaagtcattagatatggctccagtaaaaggcatgagaaggcacccgtgagaccctgcagaggaagcctcactcctgggcagccttacggctgacgagctaccttactgagcatattcctgcctctacaccagagactcactctgtggtccggtgtcacctcgattctaaattccctgcttcctggtgaatgatgctatcacactttagaaacctggccaataaatgctttgaaatttaaggatagctatcctgaaaaaatttaatataacctaaattgatagtctaatgacatcagtattcagaagaggcattctatttcagcaagtggttttcagaaaaaaaaaaaaaataaataacctgagtttttcccctgccactctcccctcttgcttttatgctgcaaaaagagcttgtggcttgcctgacacaccgtgttgttctctgccttcgaagatctagctccctcagcctccccacgttgtccacctctccaataccattgctccactgggaagctggcccggaggtgctctaccacgttcatctctcgcagcccagggctgtctttaacgttacagagacacagatatcaaagtgttgcaatttatttggctttcattaatttgccggaagcaagggagggtagatacaaagtactcctctaacctgttattttccttgctgttaaaatgtaaagaagactgatgtaagaatctctgccttccaccagtcataaccatggtatgcacagagcttatgaatcatcttctaaattcacagctagttttaaaatttagcttccaggctagatctgcaggaaatgattgggagatcgtaagtgctatggagtgaatatgaagttacttaccagatcccataaagttagctcagggaatcctgaggaaggtgtcactcagaaagctgctttcaaagctgagtcagacctgcatggtgtttattacctccattgtgttaccatgccaaacatataaatagcttcaaagtgagttcagattaaaacacagaaaaatctttggatatattcacaggccagtgggggtcatgtaacaagtcagcaaggaaaataaaagatatttgaggtacagcctcaactttttaagatggatcttgaataaaaaggtctaatgaaatattttatggtattgctctctgggatttaaaaaaacaaagcaaaacaaaaaaacgagggcactggaacaatgttttagatagatcacgggtgttttccagtatgcatttttagtgcacttacttaactgagagccctctcatatgaaactggaatgtcaccaccatgtgataaagcgtagactagctgtgacctaatacgtactgatcatgactaacgcagaagtccaggtcactgcggttgtatttcctgtggcctcaatgttctggggttagggttaacagggataattcatttctgtgttcaagtctctaattcttccatcatgtaaactgtaagtgggagcagactggattcagcattgctacaagagaaaaacaacaaataggaacaccaccaacaccatgtgttgggagccccatgtgccaggcactgtgccaaatactcgatattgattatctcttttaatacacaatcctgtgtggcagatcctactatgagacccattttacagatagacaactgaggctgggggaagttggaaatggaggagccaggattcaagtcacagcagtctggctcctgcgcccaagcttttaatt

SEQ ID NO: 127526 - DNA, 3240 bp, Homo sapiens
gaaataaaagagttggggtctaagtggcaaagtgctgccgtgtttcaagttaagggcttccatggattgtgtgataaatacaggtgtgaatgtgggtgatttgttttattcttcagtgcccattaagtagaagcttgtattttcctccttcccccttcaagagcccccctccccaccatgcaggcacatggaggccccaagttggaagcacattcacagcctgaagctgaaggacaggctctgaaaaatctttctttcagcaaaacgtctactaatctcagaaagtgagctttgtcaccattgatactctgtaaggtgggatgaaagcaagttttcttactcattttgcccagttgtcaagaaatgctgcccttctctctaacataaattaacaggtttggctacagcctagagaaatacaaaatgtcacattttagccttagtggccggttttcaaagggtgcctgagtgtgaacaccatgtcggctgctctgttaatgtgactgggtctcataaataggtatttttctacccctgtgatggacaaatctgaaaaagttttttcatcttacaagcccagaggatggtatttagaggctgatttttggtatctcagttcctggtagggaagacgaattccgtatttgaaatttggggacaaacaaaaataattctttctctttccttgaagggttaatgctccaaccagcctcagattggttcgcttgaatcttaaaattacttttctggtcacgcgcaccgaaggtctaagcatttgtgaaatgtcttttttttttttctttcctcttgatgctgttctctttgggctgtcttaattacacaggggttgagaaaccaaattaaaattaggcgtgtctggtcaacagtgatcacgttgcatgcttttagctttgcttgttgaagttgcttctcctccccgagtggctttcctccccacaattttttttttttgaaggaaatatcataagctctttcagaaatactcacaggaagtgagagtccgtatgctggttactcaccagcaactgagtgttggcaggtggagaatgctaccgcagcccgcccagacggatctgcagactggccccatcgcagaggattagacagagggtgcatggatcatagggtttttgaacagaagggagttttaagaggaaattggtcactgcgtgtcatctcgaggggtggtgattcagggagcagggctgggggtcagaaggcacgtggctgccatctcagaggttgctgctcacttctcagagggcaggctggcttctaaaaatcaacgctccctccacccccaaacagcgattcttctgcagtgaatcacttccagaaatgaatagccacagttttttggaatgaacgttgtgaaatccctcctttataatggcaggttttcagttggtggttttatcagaatttctcaagatcaaaacgaaaccttctctttaaaaaggaaagaaagtactatcgatacagaaagcaaaagtatttccagtctcctactgaactgtcacggcagacctctctgtatctatatttagagctgtatgtccatatatttgcctgaatgtgtgagttcttggaagtatggattcattgccaggagctggtgatttcctaagcagaggtcgctaactacaagaaatgttacactcggtgagtaggtggtactttctgaagattattggtaacccagtgttggtcgtcttgagtcatggatttaaatgacggctagcaagctcttaaacaccttctgctttatatgatacagagtatggaactgcaggacgcacagacaactgtgaagggtttttaagaatatggattcattgaataatcagtgaatcttgtgaatatactagacctttggaggaggaaagggtgttttacagaaggaagtggtttgtgggggcttttaaaggtacagttatcgcttttctatatttattttcagcatcattcagtcctcctatatgaaagaaagaaatggtctcgatagagaaaaagttatgctgactctttaaatgaagaaacttgatcctcatgttactcttaactggacttttttcctcctaaatattcataagggaaactatcccatgaaggcaactaactttctggcaatctctatgatgtgtctaattcagaacccggtgggctctccatgcattattggcagcacttttatccaggggcacagacagggaatagggttactggaaacagggagtgtagctcaaggaattgttctctctctggagtggataagttgtttgacctactgactcatttcataggaattaggaaaacaacctagtgtggtttttattgttagtcctggaggattccaaaatctgtgtgcctgcaaataagatgagctggggaaagggagcaccagcatttggtgtttctacttgcctcttttcctgatggaatccaatcctctgcttccaggacaagtcctgcgcttggggatcctctgtacgcccgttcactggtgagtatgtatgacagcaatttctgatttcactagttcttgcttctaacacctaaatggtgctttgtctagggaaacgctttaaagagcattttcccccagtacgtttataatacatttcatatttacctccagaaaatactgtggatgtgataataattataaaagacaacccacagacaacaatgaaagttaagaattaagatatattctgatagatttttgcagcatattgacataaaggcagttttggttttgacatatgtacactaaaatgatatctgtaatgctattaaaactcaagtgtacaaggcaccagtatattctggcaaaaataatataatgatcaacagttaatgaaagacttgtgctttgagcttctaacaaaatgttaatatgtagagaatcttgtgattcatgatgctttggttctcaaccagggttatcaaataagctaaaagtatcagaagaggacaaagaaagtacgtaaaacatggataaaagcagaaaccgagaaaagatagctttgatatttaaagtgttagattatggcctctatataatgtcatatatgccagatccccccccaaaatcacaccctcaaattatgatcttcattattcaaaagatgtttggcgtgttggtggtacagtggtgagcgtagttgccttccagaagatggttggtgtataattactatagaatttcttgctctc

SEQ ID NO: 127527 - DNA, 2536 bp, Homo sapiens
gttaaagatataggtaggagaggtagctaccattaaagatacagatttgagattaatgccacagaaggagagctgaaaccactgtactacatataaccgtgtgtgtgtgtgttgcacatgtgcgcacacgcacttgtgttaaactggatttgttggcgtatctccaattcaaacctgggtcaggtgattatgttgtaacttactgcccagttataatcacaaactgttacaccttcatcagaaggaagagcgagttccctagatcagtgtgtttgtgtgtttgttttgttggatggatcctgccgaggcactgagagacagactttgctgggccctgttttgtaaacaaatctgttcacgcacgctttcttctatcattggatgtgtacactggctctgattttcccacccgacacgccaaagcctaagcatttagaagcttgttttcttttagaagtaggcaggcaccaaagaaaaacctgcatatgcatttaaagtgtgcacatctaccctaagtaagtctttggatctttacagttttaactctgggccatgtacagtgtatttcagcccactacacacggcagacctgcgagacgtcctgacagcccccacaaaactatggactgagcttagtgcaaaagagaaagcccttcttacccttaaagttcactgcacgggccattgtgggattagtcaccccagatgataaaacataatactggttttcctaagtaggggtgattcagctttctcttagattggaatatgaacttaatgtatataatacatacagtcacttcctgaacttgtagttttttgcatgttttatttaatattctagccaggtttaagtttttatggcaggaagtatgtgaatggttatgacaggagtaaataacagttgattttatgattacagtacaggaagtaacttttcacaccaaataaatctttgggaaaaaagtgctggcttataaatttaacgtacataaattttccagaatcttgcatacagtcgcctgtgctctcttaaatggaactaaatacctggctggtcttttttcttttaacttttttttgtcaacgaatgtctttgttttagaaagaggcattttcaagtgttttgatgtgacccaacgtgacctaaaaccattaaaagattctaagcaaaaataataaggccaaactttagtgtaaatagcatgaaaggcttgaaaactaaataaaaaattattttttcctttaagagtaaatagctaggctaggcatggtagttcatacctctgaacctgtgaaccattgctttggggggctgaggtgaaaggattgcttgagcccagaagttcaagacgagcctgggcaacatagcaagaccccttctctattaaaaaaaaaaaatagccagatgtggcacacgcctgtagtcccaactactcaagaaactggggcaggaggatcacttgagcccaggagtttgaggctgcagtgagctatgatcacgccactgtacgccagcctaggcaacagagcggggggctctgtcttaaatgaccaaatcatttttcatcattaaagcccgggaagcctccaaactgccaccgagtcaagttccttccagtgactcctatagccatgatctgcaggcacttgggaggaacagcctgttaacatcagagaggctgttgcatgtgaacaagtttacagagaagaggaaagaattggatagaacttcagttacatttcattgtaagcagagctttaacagaggctttgtttttccttgaataaaaaaatgaatagcgggaatacaagatttagagaagatttctttcttcacccttttcatcttaaagcctaaagatgttgtaatgagaaaaatattgtgacattcctttctgaaggttactattacacacacgtgaattatgtgaacgaatgggtggatgcctggcagattaaaatgtggagttccagatgcattcataaccaccatgtggctatgacacagtggcacatcattgggctgggagtgaaaggatgaaggttcagacttcagccctgtgtctgggagcctcacccaaccaccctgacggaaaacaggatctctgaatcccttctacctctacaactcggtaccacacattgtgcaactaagtaacttgcaagttatgtgaaactgttttcacaggatcagcagagttaccactgcttcgttgtcctgaatcttcattacatttttacagacaatatatttgcatgtgacatgattaaaaatctaccttgtgtttttatggtctttgtaggttttaaggtagtttcttatatgctgttttccttgctgtgcagccaacctgggtgttactggcagacatgctgagggcaggctctggatgtggagtcaaggtcaggctccctggctctgaatcctggctcaaccacctactgattgtgtaaccctgggcatgtccttaagcacccagggcctcagtttccttatctgtaggatgaggattaaaaatagaacttacctcca

SEQ ID NO: 127528 - DNA, 1550 bp, Homo sapiens
tttcttctctgttgtttctgtcactttcctctcccttctaccttatttttttcttcctttccttctccttcctctctttctggcattagcagtttgtttgtttgtttgtttttgtttattttgagaccgaatctcgctctgttgcccaggctggagtacagtagcccaatctcggctcactgcaacctccacctcccgggttcaagccattctcctgcctcagcctcccgagtagctgggattacagacgcccgccaccacacctagctaatttttgtatttttagtagagatggggtttcacgatgttggccaggctggtctcaaactcctgacctcaggtgatccgcccacctcggcctcccaaagtgctgggattacaggtgtgagcccccacacccggccctggcattagcagttcttacacaagaacagcgtaggcatgaatcctgccttcatggcacttacacactagcagaggaatctggcagcaaataagcacacaaaggcagctgcagggtatgatgtgccgtgacgtaaagggacaaacaccgtgagagtctaactaaagcctggcatgtgtcaatcctatgtacctattcagaaactagggttcatgacggtgcttctgttgttacctagtagaagtagctttgtaagcacaaagattgtagttttgtgaagctatctagtacagagtcactctggaagtttagcattatagagttttttcatagaaaggatggatagatacaagtttttcctaacaagcacaagtggcagtctttgaaaactaattttttatgtgtacattgtagcattggaagataactgtggttgagtgtgataaactgaaactttttaaaaaatctattattttttttacaagttaagttagagccagatatgctgattctctaccattttcaaaagaggaattggaaaagggagagcttgtttatgtggtattcacaatagtgtctgctcctgaagaaaatttttggaaaaatctcatgagtgtcctcagactaaaaacagggatccagtctgttgttcatgcaggactcaggaggcgagcgagcatgtgataccaggaagggtcccatccctgccctgctggggagccctcagtggcgaggtggcgagttcaggcttcacttcagagcatggatactgctgcataggtgctggaagggtgctgcatgggtgctggaagctgcttggcatagtgcatgtcctgtttcctgccacttggaaagaggactgtggaagtcaggtcttcccagtcctcaccagtaaagcaagcaacgaatgccttcagtccaggtaatatgtccaggctttaaattctctggatctgtctttggataccctgggaaaagtcttgtctcttcttaggcccttctgactaaaagcagccaggacttttaaactgactaatttttaaagatttccaaatagagaaaattaaagcaaaaatttttgaaagctgaaaatgatctttccaacttttctcattcagagtagaacactggagcattgaaagtttgt

SEQ ID NO: 127529 - DNA, 1034 bp, Homo sapiens
aggcaggccgtgcatgaggcctataggacccagggctgcctcccaatgctgacggccctgcgctgtgtgagcttgggtaagccagttcggctcacttcacctcaggttccttgttcctatgtggacgggttgcttgtttggaggattaataatgatggggaatgcaaagtgtggttggttttgctggggaaaagagcagggaagtagagacctaggcaggtgatgtcacctctctgatgaactccaaggtctctgtcaacaccggtgcctttgtcctgacattgcggggtttgtggcatgattggagagaccttgcgtgctctctgggcagcccttgttagtgccccccaactagctgggagatccagagtttcatgagaaccctccctccgtgacaaaatccgccttcctcgctgtcaggctcaggttgtcctgtgcccccactgagcctgctcattattgattaatgaacttgtaaaatgagaagtattgttttaccggaagctacatgtttatgtggttggtaaaaatgagaagagttgcttgagaactggttctcctttccatgagtatatacaaggttcaaatctgggctttgtggttataagacatgttgagtgaataaaaatgaaggaaatgctgggcatttatcacaatttttttttttttttttttttgagacagggtcttactctgtcacccaggctggagtacagtggcacgatctcggctcactgcagtctccacctcccaggttcaagtgattctcatgcctcagccttccgagtagccaggatcacaggcgtgggtcaccgcacccggctaatttttgtattttttgtagagacaagctttcgccatgttggtcaggctggtcgaactcctggcctcaagtgatccatccgccttggcctcccaaagtgctaggcttacaggcatgagctgctgcgcctggcctttcacaattcttaaactgttgacttacagaaacacagacctgtatgaacacacagatcactttagaggtccgtctc

SEQ ID NO: 127530 - DNA, 1045 bp, Homo sapiens
aaaggggttgagacctctgctggagccactaggcttcagccggacctggaaatgttctcgcaaatgaaactggaatgcatgatgtcctggattcagcgggtcacagctgactgccatcaggaggtgtgacggagaaggttccatttctgtgaccctgtggtgatacaggtcgggacccaggcgaagtagctcagccatctgaattggcacctttctgcttttctcgctgagtgacgggtgccttgcagttggcttcagatgtttgtgaatgtgctgtgtttcctaaagccatgtcagtcaggaagaagatgcaggtattcaggagaagggagaagaaaatctgaattagaaacaacgtgaggatggggagcacagggagggatgggttacctttgtcatcagaagaacgccaggcagattttagtccctcagctaataatactatttgaaaaattgatggagaaatttaactggaaggtttcagcaagacaaaagctgcatctccaaggctggactcagcgtgttcacgtgggaactgggtgtgagtgtaattgtcagaggggagggttgtcacaggaggtgcacgatgtgaagtcacaaggggacgcattatttccatgagttctcacagttcccagggcagccacagatggtagtggtttatgtctgcctctgccttgacagaagggcagtaggcagttgtggcaagaaaaatggaccaaatgagggctgcactcagcaggttaaatttgctgtctgttagtgttcctaggtgagatgcttcaaaactagaatgctctgctgggacttttatttcccttagaaataaaaggccaggcgcggtggctcatgcctataatcccagcactttgggaggccaagtcgggcagatcgcctgaggtcaggagttcgagaccagcctggccaacatggcaaaaccccatctactaaaaatacaaaaatttgctgggtatggtggtggtgggcgcctgtaatcccagctacttgggaggctgaggcaggagaatcacttaaacctgggaga

SEQ ID NO: 127531 - DNA, 1088 bp, Homo sapiens
ttcccactattccgaaatttgtatttataattatcctgatttttaaacaaacatatatttttatcacagtgtaatgagtaaatgtgtgttgctaaaggtattttgagacatataaaaatagtatcggactttgcatggtctttttggaacttgagattttcctccatatatttgcaaaattcatccatgttttcaggaatagctacagttccttcatattgccagaatattctagtgtgtgaatatatcataatttatccactatcttatttattgagggggggtgggaaacaaggagctctttttatagacatgttgagtctgagatctctattagaaatccattggaaatgagcaggcaggtggatgctgttattcaggagagatgactgagatggaactaacagcgtgtagatggcatctaaagcattgtcttcccaactattcttagaatgatgggccatttagcccatcaactgagatttctgtgttaacagttttttgttttttgttttttgttttttaatttcttaaaggtctatctggtgttttttgtttgtttgctttttcccaaatctgcctggtcactttgttcaagtgtgacttgtaagggagtaaacaaggagagtatgagcttcaaagaaaatggggggaagtattttgccagctctcatggagttttgtgagatccaaaagaaatgctatatgtaaatttgctttgtaaactgaaaaaagttatgcactcaattattatatttgatgatggcaccttgttgggttctggttaatgcctcatattcactgagtgcttactttatctatattaacacatctcatctttataacaatctgtgagaagtaggtactgtagattcatattttacagaggaaagtacagcttataaatggtagacccaggatttgaattcatagagtctgcttctagaaggtgtgttcttagctccagtgctatgctgtcatattgatttcctgcctgccttctccttccttccttctcccctccctccctcccttccttcctttccttcttttttttttttttttttttttttttttttttttttttg

SEQ ID NO: 127532 - DNA, 3938 bp, Homo sapiens
atgtagggtttcttaaatgcagtttgagagagcaagataggaaccagtactttcaaaatatggcaagtgcaagtcacaatccctagtaagatattccttctcattttgtgcctttgactcttatttagacagacgtttaagtacgagaaagctaatggcgcagattctgctgactgtgtggctctcgtcttaatgcgttttccaaccttgaacctgagaatgccagaggattgagtctctggacgttcatctgagcagatatctgctggccgcctggttcctgagctaacaagtgggtgtcccgggcttgtgtgtgtagtcacaacagtggaggtgccacgtggcacccagaggtcgactggggctaccgcggggcttcccgatcctcacaagtgtgtcttcagtgtctgacatgaactgggaacttggggcatctttagaagcacagacatttggagttccacggcaaacctggatgtaagcactcacacagcttttaaagtgaaagcagggaccttgaggaaggaatcgccgtcatctcattgccgacctgcttactgtgctgggaaacaaagtaagttctgtttgtttctttgttagtctctcctgcgtgttttttcttgctaatgttattagacactcaatatccggcaaatgccaagttttttccccttcattgggaagtaggatatagtttattcaatagctgattgcttcttttatcttttccctcttcccatatctagtgtgccggcttgctgtttagagataggaagagattgaaatttattatcaaggagaaaacaaaaagtgttttgttttgtttctaaatggtccaagaactttgccattaggtaaatgactatgacacagacaaggcgttttgcatggtatgaccaggagcacctctagcaaaacagccccagttcgccgccctgatttccatttggaagcaggcacagtgggtttccccaggaccgatgttaacgcagagggtccttgtgcaggaattgtgcagaaactaggtgggaaggtgtcacagacaagaggctgcaatttaaaaacgcatcaggaaatggaaaagagctgcgagaatatcaattatttaatgatgttgataaaaacaaatttaatataaaaatgagatacaatgtatagagacctaaccctgtcaacagcaactaaactttactttcatgttagaaagttttgtgccatgtagatttatggaaaatgtgcttaattgcctctagaaaataatgaagaggcttcgtcacctccatagaagatcctgtgacactagcctaattctgacacatggctcctgttttccattttgtttgtttttttatgctgatcctctctccagagatgtgatgtggattgattaacttgtaatataaagttctatggtttctgaaaatgcagagcaaatagagatgaagagtggtttgtgatttgttattaaatgatcttcccttctacatttaggactgatttttactgtagaattttttttttttttttttttttttttttttgtcaacttgaacagcaataccttgaaggtaaaaggtgggagcacgactggagtgtggaactggaaagcagaaaccaggggtgttacttctatgtctagtatggaatgttgtgaatttaagttagagcttctgtgtcctgggaattcatattttatctcaaagtggtgctgataggactggaggtagctgtatttcatttgaaacattccagcctctttataggaatatctgtgaatttttaattcagcaaacatctttaagtgtgtcatttatgtatagcgttgtagtcagagctgtaattgtttcaccattaaatttacggaaattcagtttgtaagtgaaaaattaagaacagtttgaaagaagggcgaatgagcagagcattgccatctaaacagtcttgttaaagatagtgccaagtgagcaggactgtcccttctaagctgcccctcctaattaaagggaaaggtggctgccatctgtcttctttcattcaaggcagtagggggtctagggtggaaggaagcaacccccactttatttttctcccactcttttttatagtcagctttctccctagtcagtgacccagaaggtcattgatgatctgtctatctcagaatgaatagtagcataagcacgcttggcacttgcaaaaaaaagaaagtttataacatgcactgatccatttaaagttctgcttgaattatgtctgagagtattgtaatctctgtattggtgtctctgccctgtttgttaccaagggcactactggcaggaaaagtggggagttttacttttattgattttgctttttcatgaaaaaatgtttacactccactgggcataatcagaagatggcagcacatggctatgtacaggagatgtggggatgtacaggaatattgttcttatcaaaatcaaggacacctattaatgatgatacatatatgtcatctcaggggaaagcatgaacaagcatggcaacagatgtccaagttactcagtggcctgctgcagctttttggaccagttattgaaataattcacattgtttagcttttgttaagcaataaggcttttagcctttttcttgtaagaatacgttgcaggagagtttagtttggggtcatgtcttcattgctttggaaatgtagaatagtcctccaacaaaatgactgcatttgcttgccttcgtttccacctctgtaaatagaagaaatatctgctgtttttataaatatataagagaatatgaaatattttccatctttcataagaactgtgttataactgaaaaattctcaaatcttcagttatgtttattttcaatttttacacacttaagcaaggtgttaacagtcttctaaagagattcagttgttacaagccttgtttagttcccaagtagcaggtatggacttctcagaacatactggtttttagaactctctttgtgacacagaagtgtggtatttcttaaacccataacaatatatttggagagctcaaatgtgaaagtcatgtctgtaattttatttagagcttttttttttttttttttttccaaatttgtcaccaacttgcaacgagctttcttggaaacatagacgtgtttatgttgttgagtcttgagatgaacatgtgtgggcttctgacgacactgatgcccagtttgtatgattggatgatacctgaaaagtgggtcacttcctagtcagtgaagggtacacagggctgaataggcagggctttttggctttttccgtgcttttgtttttgtttttggtgtgtgtgtgtactaattttagatactcagctaggtacttgactggctatcctttttagcatgtgatttaatttggttttacccatcagtatttatttcaaggggactaaataaacacattaaatgaagcacttaagaactttctatcttcttttgactatccacagcggtgggaaatctctgtcctttgagggtaggagggagccaatagttaggtctcatgaatatggtaggtgatcaaaccactgattcaagtcattgtttcatgttataaacatggactgagccagctactacatttcagtagaaggtactgtagattcaaaagtgaacatgggtctggcatttcagaaagacacaggttagtgagataaatgactataaaaagaggtagcactgtagactgatgtcctgtaacagaggtacacgtgtgctgttagagccaagagggggtcaaaataaaaagacagggcacggtggctcatacctgtgatcccagcactttaggaggctgaggtgggaggatcacttgaggccaggagttcaagaccagcctgggcaacatagatccccatctctacaaaaaaataaaataaaataaaaaaata

SEQ ID NO: 127533 - DNA, 1020 bp, Homo sapiens
tttctgtgtcattattaacccttaaatatcagagtgagtgtctgctcacctatttgtatttggaaacgagatactgttaggggtttttcttggcccttccctttcagattgaatcagactttgctgctttccttatacaaaataatgtaccaactagatagacggtgggagtggtatcgttgcaggaatgaaaccaaaagggttccgatgattgagagagattcatttattttttaactcttctcatgatctgaatgaagagtacagcatctatcaaaaggtaacaacctaatatttcagaattgcaagtggccatttagcctttctgctgcctgatataaatgaaagtaattcctagcaggcaggatgacacttgttttatcacgaatctgacaatccagcacattttctcaagcaattttgaagttgtcgtagtaacagcatggcatttggagggtctttttagtagttctttagctagagttaattaattgtattaactctggatgtttttctttttactcctctttgacaaacaagggctataattgctcaaatatgtattttgtgttctatattttttggtgactatagtttaaggacgtgatgtttttaagtggtttcagtaaaaggttatcagttgatttcagacacattaaacttgggtttttaatttctctgtaaaattccactatcattgtaggaccaggatttagttttatttaagaagtgaatctggggagatatttgcacaaattgaattgtggcttgcttccagtggttgcaactatccgttgctttgattttggtgtatttagaaaaagaactggggaatgcagaaagggaaatgtgtcaggcttacaggagaaaattgtttctttagaaatgcaacaggcaggcacaccaccaaaagcatgttccataaaagaaaacaaataaatttgattttgtgaaacttaagaatgcagtgctctttgaaactctaaaatatacttaaataaattctcccctaggaagatt

SEQ ID NO: 127534 - DNA, 2319 bp, Homo sapiens
ggcctttttttgcttacctttcaattctgtttgctgttttttgacatataggggttttaaattttgttgcagttggattacattgccttttgttacttttttcattgcttctataaagctaaatcttcttttcccattccaaattcagaaataattttctactaatttagttttcttccttttttttttccttttatatttagctctttaatctccacagaattaattctggtgaatcttatgaagtaggagttaattttactttttctagaatattatctggttcttgtgtttattcagaatcccagtatagctgtgacatgaaccaaaacaagtgatttttcttattttagtgctttgattttcccattaggaaaaatgaggaagctgtgagtaccagtggaaggaacgagccaggaagagggactggaaccatctcagaagccatgcccctcaggctggaacttgccctgtctcctcgcagatgaggtaggaggctcagcacgggctggtgggagcagcccacagcagcagtgagggtcagtgggcctgtgagttaagaagaaggtggcacagagcgagggtctctggatcctgactgtttgacttttccatgattaggataagtagccagggcttggctagttggagagttactcgaacctcaggtgacagttgtaaggcagcacatagtgaaaaagagtcctagcctgggaaagtccaaaaccttaggtctggtttcagttcactcacctatctctgtgacatagcaaagtctgttaatttctctaattttctgattagtagtatagttgcaggaatgaaataaaaatggtcctgattactcagagattcatttactgattactctttttgtgacctgaataaagagtacaacatctctcaaaaggtaacaatatgatgtttcaggaaattagagaagttaagagactttgctgtatttactatacagatagttgactgacagctgagcccggacccaagattcatttataaaatgaaggagttgagaagtacatactctgaggtttatcctaaataaactgaagtctaggcaagtggctgagctaggtttgccatgaatcaatctgctgagtatatttcttggtaactagttcatctttccttaattcagtcaacaaatatgatatcaagtttagtaagatgatgacagttgtcatgtaatactccatctggaagattgtatgcttctcagcttccctaacttttcttaatctaccttaagcttcctttctgaaaggtttctgtctttcctaacagtctcttctttccgccagctacctcttgtgtttaagaattaaaggaagatgagctaggaatcaagaaatacgcagaactgattcctgtcactggcgccaccctgccacttgcccagagctgtggtataaatttttttaataggctgaaataaaaatatgaatagcattttggtattaagcattaaattgataaaggctatgagatacacctgctctcaaccatgttaattttttattattggtattaataaattattacttactaacatattaacaagaattgcattgagaaacaaagcatccacaggccaaatcttctgaatttcaaatgtttatattaatgcgttgtattctagaaaagtagaattgtcttaagtagctttgtaatataaagtcatctatcagcccattacacctattagaatgttttaacctttatttcccacttttttgtttctagactgagtgtacttggtctggtatttgtggcataacttacggaacacataagaatgatacagatactatttaatgatgacctaatacaagcttagatagctaaggtgaaagcttctatggccttaacattttcctcttgaagaatgtattttctgtaataaaatacagtggctacttgaaatctataaacttatgtgaggtctggataaatctgagcaactttcttctttgtgctccaggaacctacgcactatatatataaataaagcttaagtaaacatcactgcaatctgtgttttgtttgattatattacgtattgcctgatctttaaataatgatgaaaaatagcctttaacataaaccatgaatggatatgcacttgagggaaacagtttcttggataattaaactttaatttctcaccgtggattccttggatcttgtaatattttttaaaacagtcctggggatttatttttaaggcgtccaaatgaattattagttctcaaaagccatagtatattcatgggtcgatatatcctcaaaacactattttta

SEQ ID NO: 127535 - DNA, 2861 bp, Homo sapiens
atccttctccttccctgctttaattcttacccatttgttaaatgtcctgtacccagattgatgggggcctctgcagagcacgtgttccagcctgtgcataaccaggtcatcacagcactaacaagttcatggggagttggagaagagagttgtttcccactccacagaactttatgaaaatcccaaatgtaaatcaaccactcctgccccagagctcttggtcatgggctttgtatcccttccatccttcctcagcctctcccatctgtagtaaccctaccctatttctccctctttacttattcagagcatcacagttctttcctgaatgttctgatccttaagtttcattcctgtcttgtctttgtttgggtttccctagaagcagattttgaaaaaacatgcaatctggtctgacttcactacttaggagctgtgagacctctctgtgcctcaatttcctcatcagtaagattctactttataggattgtaaggaagattaaattatgcatagaaagttttaaagccctatctgacctataatggtggtcaataaagcttgctgtgataacagtgattactattattattaaaaatatcactaccttcgggttgccatcctcaaccaatctagctagaacagattagagccccctcttatgtgtactaatagcattgtatgcctcctttacattgtaattgccagtttgctacaggaaggatgatgaaatattgttcatcatctagcacctagcccagtgcctggcagagttatacaagatgtactcaagtattttttgaacaaaattaatgaataaaatgacttgtagaaagagccttccaattacacttgctttcttacctttaaatagccacctctttaaaaaaaataaaacacggccaagcatggtggctcatgcctgtaatcccagcagtttggaaggccaaggtgggcggatcacctgaagtcaggagttcgagaccagcctggctaacatggtgaaaccctgtctctactaaaaatacaaaaattagctgggcatggtggcgtgtgcctgtaatcccagctactcaggaggctgaggcaggagaattgcttgaaccgaggggacagaggttgcagtgagccgagattgcaccattgcactccagcctggtcaataagagcgaaactccatctcaaaattaataaatatattaaataaaacacaacaaacaaaatagaactcttctccaggggcttgtctttaaatctggcattgctcagtgaccttggggaagcctctttagacatctgagtcctggaacagttctatctgagagcttctgtccagctctagaattctttaaatctgtggtaatagcacaaaatgggtatcgagtacattttaaggacactcagagtttcccttatgcttatgttttttcctgttgatgagaaaatgtcatcatgttgcttggatttgtaggttctttcctagttgtggggaatttttccaagctggctattatgagagggtctcaaaaaaaaaccacaaagaagtttggtatattatgttcaaattacacacagtatcccttcttattttcacttttgatctggattttcacttctgagctgacttctataatttatatttaaagaatttagtctcagaaataaggtcatttgatgcttgcatcattgacactcctaaacctttcttgcattccaaatcggaaacttattcaggacttctaattctgatggtttctttctttctttcatatatttatagatgaaatatatatatatatatatacacagataagactatatctatatgtaaatacagatacttaaaatatatatgtatatattttaatcgtggtaaaatatgtaacagaaaaattaccatcttaaccatgtttaagtacacaggtcattggcattaaatacattcatgttgttgtgcacccatcaccatcatccatctctggaatcttttcattttgcaaaacagaaactctgtcctcattaaacaacaactccccattccctcctccccccagctcccctgaaaaccatcattgtactttctgtttctttgaatttgactattctaggtacctcaaataagtgaaaccctacagtatttgtccttttgtgactggcttatttcacttagcacaatgtcctcaaggttcgtctaatgttgtaggattacaacaacattgtagcattgacatgatttctttgctttttaaggctgaataatattccgccatgtagatatgccacattttatatatccatgtgatggacacgggttgatggacacaggttgctctcatgttttggctgttgtgaataatgctgttagggacgtgggtgtacaaatacctgttttagttcctgctttcagttcctttggatcaaataagttattgatccttctctattgacgcttctgttttcatggactcttgccttactcttttgatcatttactgttcctccccccatcgacctttgggccatttttctggtaatgtccctactatcaaggttctcatacttcagttggacctcacagaactgctgcctggagaaaacagtttgacagctaaaaaaaaaaatatgattcattatcacctcctacacacacaccaattcctactgttttctgaaggtataccagtggttcctaaattaaaaaaaatctcttggtcatagggcaaatttttgtagctatcgatactctgtattttgaaatttaactgttgataatagtagcttcttgatgtattagtcctctaattgtgaaactgttatctgtttcttattatgaaaacaatatatgacaatcacagaaaatt

SEQ ID NO: 127536 - DNA, 1098 bp, Homo sapiens
ctaaaaatacaaaagttagctgcacgtggtggtgcacacctgtaatcccagctacttgggagactgagaaaggaaaattgcttgaacctgggaggcagaggttgcagtgagctgagatcacgctactgcactccagcctgggcgacagaatgagactgtgtctcaggaaaaaaaaaagaaaagaaaaaaaggaaaaaagaagtacaagtgtgaggttaagttactcaagcatgtgcacacatagtgttccctattgttatttgaggcttgcatttttaatttcatagagctttttcttgtagttcttttttgttgttgttgttgttgttatgttgatgtaattctcaaatatttccaggaatactaataaattgggggtttttttttagtttttttagaaaaaaatctttttcttaaatattctgtttcttttttgttattgttgtttatcttggtttttctctttcatgttgcagacttttaaaatatatatttgattttctttttaaaaatgaagtgccattacggctgcctagaagttctgcatgacagcatctgcctctagcaggcttcagcctgggtacacagagccaccctgagccctcttgctggggaactgctagatgtcagaatgaggagggcttgactgtggggttctcttaaccacactagctatttagtcttcaccagacgtttgtttaattttttttagaaaattatctcccttttcttatttttgctctgaagtggggaagctataaggtttttttttataaagacaggaagtagtcatgaaaagaataattgttatttccagacttttcaattactcttctcctttctacctttcttgtcacttctgtcacagttcttacttttcctgagtctggagcctgtttggggtccatctgaataaaatcaactcttcactgccttggcagtacccgctcagaactctccgggctgtaagctgcctctgctcagcttcatcgctcagtgctctccccacatccttctggcttcctgacatttggtgaaatctctcaggcccctgaaacttgttgttgttgtgggtctacataccccttttataaccgt

SEQ ID NO: 127537 - DNA, 1876 bp, Homo sapiens
ccctggagttagaagccacaagttgtcctgaggaggctttgctgttcttgtcactcctgacttcagcaggaatcaaggacaaaataattgaatgataaaggaagatggaagcagctataatcagctgttcagttccagtaacaggaaaagtagtcctcaaactttagaggacataagaatgacctaggatgccagttaaaattcattttcctgggctcctccccagagattctgagtccaaacttaggtaattcttagtttttaatgttttggttgatcactagtatagcacaaagattaatatatttttaagagtttttaccactctttggtaaagtttgctaccctcagggagccccaaaattacggcttagaattcttggcttaaaaaatgagccaaaccatccccatacctatgtatgactctcgggcagtcatgtaacacgaacaagctttggcagtggtgtgagacttatttgtaaattgccagtgtcaacataattcttttctcattggcattgcctagttaaggagtcaagtctcactgtggtttgttctctctgtggtttccgtagggttggggagaaggctacagaaaaacgaaccctttctagttttgactgtctagggagtaaaaaaaaaaaagcctgtcatctttctgaattaggatataagacgcctgccctgaaggtggcaaatcagacttccacacgcattgccttcatttagccaatagcccgctctgaatgtgtatattacgatgtgcagtttcattcatcaaggggatttcgggctccagcagcacgcagcctccagtcttgagtgactcctgggctttggctcagcagtaactcctccataaaaacaagtgtgtgcatctggctgttagaagaattcatgctcatccgggtaaggataaactggagaaattattcctttttttccctttgggtggttttgaggttttagaaaaattgatcctctctttgagaagagttcagaactatttgtctgaagtttttccatccaaactgctttatcgtattatccactgtcttacccttttcctgtgaaatctaccctcttcaaaacatagtttcattttcaaattttaaaagataagattccatttttctttccgtgcatgaaactttaaaaattaaatcaccacagttgctactggcttagaagtggggtcttatatttttaggaagtatactttaaaagttaggcagaggggaaatctatgtttgcatttgatttatgaaacagtgactgttacattaaagggcggattttcagacatactacttgatctgctctgacaagctatgagctctctctctctgccacttttctcccgaactgtgttctaatggtggaatcagctcatcttttttccttaggcatgtggtttagtctgtgtacattcagcgcggtggcatttttcttgaagaagtgactaaggcttcttggatgaattctgtctttgaaagaggtagtagaattgcatcagaaaggcatttacagtaaatggctacccccccttcctgtaatgaccgcatgtgaaagaatgcattaattcttgttttgaggaaatgagagttgtagagttctatgaaaaactcccttttttatcattagttagccaggtttgaatgttcacattttaaaaatcaggctcattttgtgctatctaaataaaagtcacaaagatacagctttccactccatgttctatgtggagtaaccaatcatcctgaactcaaaaagaggaaattatgttgaatatggctacagttaatggcataagcctaaactaaattaatttcttcatagtctttttttatattaagttactgtgcttcctagctat

SEQ ID NO: 127538 - DNA, 1139 bp, Homo sapiens
acaggagtcttctctgaaatttctgagaggccacacaatcttaggttgaataaagaaggaataagaataggaaatacggggccgggtgtggtggctcatgcctgtaatccaaacactttgggaggtcgaggcaggtggaacacctgaagtcaggagttgaagaccagcccagccaacatggtgaaaccccatctctactaaaaatacaaaattagccaggtgtggtgatgggctcctgtaatcccagctatttgggaggctgaggcaggagaattgcttgaacctgggaggtggaggttgcagtgagccgagatcgcgccactgcactccagcctgggcaacagagtgagactccgtctccaaaaaaaaaaaaagaaaaaaaaaggaaatacggaaagatgatgatttgttttaaatacatttccaacagtatttctctgtttccttttttagaaatcctttctgttcatagggcagttggggtagaaatggacacacttagccagcacggcttcttccgtggaggatgcaccatgtgtccctgctgtgagatgtagacacctgagtttgtgtgttcagatactttcgaagaagtttttttggtgagacttctttggcaaagaaagctgcatataaagttgttgatgcagtgtctggaacatagtaatgatcgatgcaggaggaagataagggggaaggtccctggagagtctcccaccagcctgtgcactgggaggaggggatggagcctcaggaagttctcaccctttgcagctaggagcctggcctctcctgttcctgggtggtgagttgggattcaatctgtgagatgggggcctgttcataaaaactcatcttgctttgctgagagtctttttcctttttgcccaatagattccataacccctcacccttcaaagggtctgtgtgcgtaacttttcctggtcatgtgacaagaacccagttttttctacaatagtaaggaatcagtgagcattagtattctttctctttttcttcctcttctctttggcagtatatttttcgctttccagctgtagcatctgttagtgtaatattcatatttgccctcaagtactgcattttccaggtttctgcagcttggacttttctgtctt

SEQ ID NO: 127539 - DNA, 1037 bp, Homo sapiens
tgcattagggtatcaaagtggaaaagaggctatctgtagcatagactatggactatacttgagcagcaggagaaatgaggacagacagcaaagcacaagcagtaatgtttccttcatgtgttttttcccttcttttctctccagtgtgagtcttaatctccattatggatgattgtggcattaactattaagggtacgatacagttgggattaggattctggacccagacttcctaggttcagatactggctctgcctcttaggcaactgacttaatttcttagattctttatctggaaaacagggataatattagtatctacctccatgggattattaaggggataaaatgcgttaatgatgtaaaaaatacttaaaatactaccagcacataacaagcactcaatatatgttaactattattatatgactgtatttcatggatttttttttttattttctcaaattttatcctctccccataaccccttgtggggagagtagggaccacactgggtgaatgagtgaataatgacttgcatgatatctttagaattgttgatgattaatgtaaatgcatcttgatttgtgggttggtttccaagttaaggacatagaagcatagcactgattaaaattaaattcacacaagatccactcacctaatttcaaacgtgatttttaatattctttttcttttttttttttttttttgagacggagtctcgctctgtcgcccaggctggagtgcagtggtgcgatctcggcttactgcaagctccgcctcccgggttcacgccattctcctgcctcagcatcccgagtagctgggactacaggcgcctgccaccaagcccggctatttttttgtatttttagtagagacagggtttcaccgtgttagccaggatggtctcaatctcctgacctcatgatccgcccacctcagcctcccaaagtgctgggattacgggcatgagccactgcgcccggcctttaatcttcttttctagtagtccatttttcctggaactcac

SEQ ID NO: 127540 - DNA, 1025 bp, Homo sapiens
cagacactactctcttctgatgatcttaaaaatgaatcctcttggtcccaggtgcagctaatgaaacagggtaaatggggcagggaaaatgcacatcatcacccaaaaaagtcccagcatgttaataccacttgcaaaatgtgtcatattaattaagtgcagacattactactcttttatccaaaagctgtatatttcttagaagctgatagactagataggtacatacttgaatcatccttttatttttttttaaactacagagaatctgtccaagcccatgtcaaaagtattggttttaaacacaaagaatacttggtagaaataaacggtttaatctgtttattgaaagaaattacctaaatatacctaaaaataacttacagttttacagtgatgaatagtaaaatcatatttcctgcttcttgaatgatattgacactggcgtgtagacagtattattcaatgagaaattttattttcatagcactctactttagctctattttccaaaggaatattaaactttcattgtcttcattttagtaagttatttggagaatgtatatacaagcaaattatggtaaagccttgtcacagtctacttactcctcagattttgtcttttttttttttttttttttttttttgacacggagtcttgctgtcacctgggctggagtgcagtggcacgatctcggctcactgcaacctctgcctcccgggttcaagtgattctcctgcctcagcctcctgagtagctgggattacaggcatgcgccaccacgcctggctaatttttgcatttttagtagagacggggttttaccatgttggccagactggtctcaaactcctaatctcacgtgatccacccaccccggcctcccagagtgctgggattacaggcgtgagccactgcacctggccagattttgtcctgattatctgcatatttcattgtgtttttaaataataccaaattattctaataatttaattctccacatcacaatgtgctgtcc

SEQ ID NO: 127541 - DNA, 1086 bp, Homo sapiens
ttttataagctacactaaaacttgggttagcaatgggtatttttccccccatttcgttcttggttgatcaagtcaaagtattatctcagcataggcagagtccggtgcttgggaagtggtattaaagagatttcagataaatacttcaaagccacttcattggaatccccaatttaaaaaaagttaagaaatcataaaatgagtctttaactagattttggtggttgtcatttggaagaaattctaagagtgaattccagcctgtttcctgatttcctgttgtccttatttactcctagtacatggtacatgactggaatccagtagaaaagccccagaatgtgtattttagtccctacagccaacagctttgagaatgtacagaaaaggaggctaaatccttgcccctgctgtggcttcaattcataagcttttgtctcttctctgttccatttcaaaagctaaagctaagtgtcacaggacaagattgtagtggcttcagagaatggtaggcttgagaaaaagactattgatgattcaaggggataaattatggtagaaatttaaacagtatttggggacataaaatactgtttttgagttgagtaaccccaaacaagaagaaaaacatgtatttaaaaaaatattttatatttttcccatttttttctggccatttttctttattcattttctgagagggaaatggaagcgaaaatagaaactattatttcttttttcaagacaaccaggtcgatcatgaaaagtgtaagaggtcaccatcaggtagctaagcacttcttttaaacctatgaataaaggaaaaaacacaagatgttaaatagtaagtgtgtatggttgctagttttgaacttcagtgcttaacaatgtcaaagtcaaagtgttcctgtgttgctgtgaaataagtaccaatacatgcagagtagctactattgttgccacatgcaaagaaaagacagcacactcagtaaattcttttagttgtgtttcttatagttaaggaatgttgatctattttatgtttttgtggtgtaacttaacatggcaaagaaaacaatcatgtta

SEQ ID NO: 127542 - DNA, 1045 bp, Homo sapiens
gatgctgtatgtcctgctatccgcctcgtccccagccttgctgtctctcctgccagctccccttcagcccctcagcatccctttattcagggtgggaaaagatgccagagatggggctgagagttgcatctggtagttagacttttctctcatggagtttatgttgcatcttcctcggccctgacttctgcttcataatttacatagtttattttaaatatgatgatgtatgttttaccatgtcttccttcggggattttgggatattacctttgacagttatgtttctgttttggaggtcttgcagctggcattattagcttgagggagaggtggggcactgggggtgcactgaatatctccatggctttcagacctttttattagaacccccaggaggaaatacctgttaccttagggcccagcacacatatttgtacatgtgggtatgtggtttcctgaagcttactttatgcaagctgggatagagttttttaattctatcactttttcttttccctttttctctctttttattgttcatcataaccagcaaagtggatttcttaacctgctagtcagtcggttgtcctttgacaagcttgcagtatttcagtgctatggtagggacgcatggtttcttgcccttctccctgtattcttcagtaacttctacagcatttttttacccctaaaaatgcctcaaacctgccttaactttattctttatgggccgagctctctccttccttttgtaataagcttctgtttctattttctcacctactgttcccttctcaactttctgtctgaacttgaacattcttctcctcctgatcaatacctaagaatgcttttgtttaccgtttcgaataagatcaatccttctgtgctgttagatacctggttatctcttggttggtgccatgggttgtagagagacatctgctggcccaagtgtagtgttgcattgtttttctgtgctgaatcaccttgtcattttttagtaccttaaactttcatagtgtgcaagtgagcttgtata

SEQ ID NO: 127543 - DNA, 1561 bp, Homo sapiens
aaacaaacaaacaaagggtttactctggacacattgtgcataatgaattggaagggagaaagtgtggaggctgggaaaacagcaagaagtgttttgtatttgtccaggagaaagaacaatggcagcttggactaggatggtggtggagaaggtaggataatgcttggctagagagatcgttttggaggccattggcatctaggtggtgactgctccgatatgctcactgagcaatctgccgtgaatttggcctaatctttgcctgcctgtgaggtgcctatgccttggatttactggcttccaaactggacggagcaagtgtccaggatatctgacaattacatttttcactataagtcaatactttgccattttggctttatcagtctcttgtgagctttgttagcatgaatcagtattaatcaacatgatcatctctggcaccttagtgagagagacttttggagccagagatttcagggacagaacctagacactcatgagttcccaaaggtaaatgtcacctgccagagatgatgaacaattaccttttctgggaaataacctcttttttttaacaaatgctttccattatcattttttaaaaattttcagtaaatctttaaaatcaaatccaccaattgtttctatctttagaacagcaattatttcacctagtgaggaaacatactgcccacctgaaaaagaactgcagagggagtgtggtttgaaaagtcgtatcaaatgtagaaggattcaaagtccaagagaatcttactctgtttccctgtgcatctaactttttattgtgtcaccttaatttcttttgaagccacaagttatttgtttttcaaatctcttattatctgtgtatgtagtaattatgtcttcttaagattctatttaggaactcagtaaaattaggcaggtgaaataattggctaaagttcagtgaagcccttttggcactctgagtttggaaaatagcaaataataatgtaaaacattttgtgtgcatttgtacctactcactaacgatattctcctcctattttgcaggaggaaaatggaagaaacggagatacttttagtgaagcagaataaaccactgaacaggtaactgagattagtagttctatatacatttattaaataagttaatatttgtaaaggcctagaatagtacatagcacatagtaaatagtatgtaggtgtttgctgttataaagttcttttaaatatacgtaagccccaaataaaccaattatacaaaccaaaaatacccaacaaaagcaaactctcctcctaaggcaagtgcgaacatcattggtaagttctgacgtggcctctgtatagtctgttgtcctggctctgagaaacgtaacttaaaacctctttgaaacgtcttaatctttgagcaccctaagtccttgagcacccattcatttttgtctttgaccttctaagtgtcagattggtttccagtttgaaaccaaacaaacttctttgaaattcttgaagacgtagttccaggggagcatagcatagcttccaggtggct

SEQ ID NO: 127544 - DNA, 1470 bp, Homo sapiens
gtcatgtcttgaagtaggttgttgccttgggtgttagagtgtgagaaaatgaacaaatggtaaaataaaacttcccagccatctcggtggctcatgcctgtaatcccagcactttgggaggccaaggcgggtggatcacctgaggttgggagttcaagaccagcctgagcaacatggagaaaccccatctctactaaaaacacaaaattagccgggcgtggtggagaatcacttgaacccaggagttggaggttgcagtgagccgagattacaccactacactccagtctgggcaacaagagtgaaactccgtctaaaatcaatcaatcaatcaatcttcccttattggtactaattagtaattaaggtaaagtcttgtctgaattagggaaagtttggagactcacttcactttctgatattcagcgttctaacataaaggcttataaagtgttgctgggtagttttgccagtagaggcccctgtgcttgttttaatgatacagagttattccaaactgcagtgaaatgctgtggacacattttctgcaggcgtctcagtaactttgaaagatggtttttagtataaaaacttagactttatttacactgctaaatactgacatatatatgagtaaaagcaaaatattgggactgtttctaaacagctaaataacaataaatggattgttaaacatacataaaataaccttaatgaaggccacagtaattcatgtctgtgtagaataagttcattgaaatcaacattcctctcagtatcagagttccttctacagtatgcatagcagatgataatttaggcatcatcatctctctctttacccacctcccctcttcttccttcctcccatcatccagtgcatgctgtatccaggtcactatggtcagcactgaggatacacagggaaatagcatgtggtcctgccctcagagacctgacagtctagatatttacagcagagggagatggtgcaggggagaagtacgctgagcgggcgagaagcaggctagccactctgcttggaggagagagagcacaagattcacagaggaggttgggttttcaagtttgcagggatggcccagaaatgaaaagcgttgtaggcacagaccatgtgatgcttgcagtcgtgaagctgtctggggagtggcatccggcttggcatgtttacagtgtacagtactggagaggaacagggtggcaggtggagactatctcaggaatgatgggagctccttactttgcaaaaagaaaagttctgtgtcccgagaagtgtattttgttagaaggtatgtgtgtatcacgcgacacgggccacttcttactgccactttaaaacctgtcagatgacgtggggcacagtagctcacgcctgtaatcccagcacttggggaggccagggcgggcggatcacctcaggtcagcagttcgaaaccagcctggtcaacg

SEQ ID NO: 127545 - DNA, 1918 bp, Homo sapiens
agtgagattctagaagccacactgatgctctggctattgattgtcagtgaaattttaagacagagttaaataaactctgtgaatatggtattagattagtggtttcttttctttctttctttctttctttctttctttcttttttttttttttgcctaagtttagattcttacctttgtacctattacaaggaaattactgaggaaaatggtccaggaacacgtgtatgaaaacatcttctccaggtgtcttacagtcattctacagactgatgtttgaggaacattaagagaagttttcaaacttttgggaagcagtgaatcctttcattaactgaaatcttacatgaaactctaccatgtaaaacagataaagtgctatcttactaggataaactctttgaagtttacgttcatgaagtttatttactgccgtgtcagtaagaacaatgaggctgttacgaagacagaaaacattttaagtcaggtgttgttaacttatcatggctatattcacatcatcttctttctttaataaaattgtatactttgctttaaatgcaggatatttttaaagtctgtttttatagaaaattgtttgcaaactataacagagtttttggtttggtttaaataccttgccttaggatcccaggatacattttagttcagctcgtggaaggtagggagtatttgtttcaaagctgtaagagaaaccctgtaactgaacttaggaaacagttgctcacattccttatcataaatctagtcatacaggaaacatctaattcttagaataaatatttactctctctcaagtgggatattatcacaaaggactttatggtgccatgaaagcaaggccgtacagatggccctgagccttgcctggcatttaatcgaagcccacgctagggtgtggttttgtattcatgtgcttgcttgaacaactttaggagagcagacgctgcaggcaggtatttctcacagggccgagctggggctacagcttccctcaccaatgtcacacttaggagaagttcacatgtgagcaagcacagagcgggcagagcagcctcctgtgagggctgcgaggttgcccggcctggccgggtttattggcacacatctcattcatgggcagagatctgcagtgcgtgaaaagtttgcatataaaccatttcaggttgttttcttaaattaaagcttaaaaaatatccaaaacatatttgaacatcagaaacagatgtttgtggtatccttggagcacttccacaggagtcttttaaaaaacagcctgatttttactagatgcttggtttacattgggaagaatgtgtggttccctgtggaatacagggaagaagttagggacaagttggtagtgcacatgagaaaaataactacagttcagaaaatgaattgtgtacaagaagaaagaacaaagtacctttgagtacaaactggggagtgacctcttctggccagaaagccagggaacatttcctggaaaagaaggcatttggggaggactttgagtacacagaggacttggataggagactgttgggagaaaaggtgatgtcctagggcacgttacctattgggagagtataattttagggggaaattacatagacatcacttccttcttaagccatttattaccttcttcattaggtatattagctctgctgcatatgcattttaaaatataatctttaaaaagaccattctctacatatacaacttaaacatgcctgaggtctctttcagctgttactatctggcggagatttacttgttcacatttagacttttaatgtgataattttgcctaacttggctgcccctgtgatacctacgtgtgtcataggtttgccctaaacctagcatctgcaggaatgacagccattcat

SEQ ID NO: 127546 - DNA, 1989 bp, Homo sapiens
cctctcctagcaactcacatgccctcttagcactgtaaaagtctaggatgttgagaaatttgtttaactttatttaacccagtttctgaaactgacttaaacatggaaatcaaatctttttttttttaatgtgatgacccgtggaactactacgtgcattttctgacaagcagttaacagtgctctcggaaatagttgtgtgagtaggttgagttcctgagaagacgctagatttgaatctgagagtctgggacttttcttgctgtcctacttgcttttatttgccaatctatattgtctacacttgagtgtgcttgctcatacgtatttcacagaagcaaaactttgatacttgagaggccctttgaggtcatctagttctgccttctcatttgctggttgaagaaactaaggaaggttaagtcacttgccagaggccagtaagtgagtatgctggagccattcagtgtgccattagtcaatctgaagtggaaattacttgagttagttccttactttcaagactttcatactgatatcttgagattaggatgggataagaatgaaagcattgctgttggatttcctgccaaggtttgggatgggtaaaatgagcaaaagaaagtgccctgggtatagatggtgcttaataataggactgctgcagaggaaagcaagaatccagatcaagactgccccccaaaattaacttatttgtgtgtctaagaatgacttaaaataggctcctattgcaaaagaatgtaggaagtgcggtggtgcaatcacggctcactgtaacctcgacctcccaggttcaagcgatcctcccatcttagactcccaggttcattcatttttgtcctcagagtggaacacttaattggccacaagcacagcaaattcccacaggtgtgcaccaccacgaccgcctaattttttttattggtagcgacagggtctctctgtgttgttcaggctgatctccaagtcctggactcaagctgtccttctgcctcggcctcccaaagtgttgggattacaagcatgagccactgcgcccagctgcttctgagtggctcctaagcaatgaactgatgaacaactaaacagatgacattgtagctattgccacatttcatagcatggcgactaccttgagcctgtcagtgctcattagctgcaggaggtaacgcttgtttgtttttcatagagttaaaggtatgaaagcatgttttttggaactttctgcaaggcccatgttattgacgtccttaagatccaaattattttgcattaacttaggtttttttctctttcttggtgaagttagtagacccttgcttattgattggtatatgaaattggatcattttattgttgtgagaggttcagttttattaaatatcagagtatcacctttcatacattttttggagctaattttgagtgtttttcttgtattttatgaaatactatctatagtcatctaacgaaacaatgctgtttttctgttacaaagctttctgttcacgtgtctacatttgaagttactgcattcagaatgaaagccatacatctgacctcacaatgtaaggatattcagttttcttcctgatagcctagaagaaggaaaagaatcacaaggttgtagcattgccctgtttctgttagacaagagaagtcctctaatggcaaacccttgatggtgtgcagtttccaaagtctggtccccgttggagcctctcacctcccatagagttaaagagagatttgcctcagcaactggaccatagccatcaatgtctattgaaactccaagaataagtttaaattaaaccaaacatgcagaagatgagaaaataagtcttatttctaaaaataggaggcttccccccccccaccccccaatggctgtagacctgagggcttttagtaagtaataatgaacttttacagtaactgtaatttgagtcagatagtttttctctg

SEQ ID NO: 127547 - DNA, 1021 bp, Homo sapiens
ccaccatcttgaaccgtgaggttgaggtcacacatgggtggactgccatgctaaccttcctgggcacttccctgagaaggaaacttctcttgtttaagccactgatattttgggtctcctgccaccctgagccaaacctaattctaattaatgtaggttccaatctgctaggcaagttcagcttgatgttacttaaaacttaaccatcctgtgagctgggtatttctgttttcctttaatggcttacgggactgggattaaagaaaaattaagtaacttgcctcagtacttcccagccagctaggacagcatttgaatccctgtctgacctttctgaattccagtctccaaaagtttaatccttgctgtagtgattaacatgaaactgaaggagggcatgtgacacatggttttgcaacattcacgttttggcagagccccaattttgtggaattttttttttttttttttataaagacgttgggtttttcagagaaattcatttgtggctttttgaaagtgacaaacatgttaactgtatttcagtcaataatacttatcagaaaagctttttttttgtttcaaagaatcccacgtggttcctctaatttctagtattaattgtagttcgctaattaggagagttctgtgaaaagaaaatagttggaagagagactgtggttcattttctttagttatatctacattggagaacatttcaagacaattaggaatttttttttttttttttttagaattctctatgcaataattccaaaatgttaccaatatttattacatgattatgtagaaattaggatgatagtggaattaaggccataaattgttcggattgtgacatgggagcagccactgcagccagtgtttctgcaaagtttagtcagaggagaacagagacctaggatggccccgtgctgtgctgctggggcctgggaggctgggtgttggggaaggaagctggcagcggatgcctggaaggccagtggggcccagcaggtct

SEQ ID NO: 127548 - DNA, 1031 bp, Homo sapiens
acactctagcctgggtgacaggatgaggctgtctctaaaaataaattaataaataaaagaaattccctattcgcccacttcttcgtgcccatccaccttgccacaaaaatttattccccacctgtacctacattaagacctgtagtctgctgtttcctttacttggtgccttatccatcagtttcttcccacttttatttcccttcttttttttgagacaggatctcactctgtctcacaggcaagagtctatagccttgacctttcaagctaagcgatcctcccacttcagtctcctgggtagctgggattacagacacgtgccaccatgcccggctaattttttttttcttggtatttcctgtagaggcagggttttgctgtgttgcccaagctgctcctgaaccgctgggctcaagtgatctgtctgcctcggcctcccgaagtgctgggattacagccgtgagctactgcacccggcctattttctttcttatacaacctagaatccagggtctggactgtaaatcactctctagacaaagccccccatttcctgatcatttgattcttttgctcatacctgggctgccaagcactgtgggagaaaatcatacacctgggcagattggtaccggtgcatgtcaatttcaggcaatcactttggcactatgcagtaattgtatatgttactctggttagctgtcactcttaggtttcatagtgactgttacaagccaagcccactctcttcagacttgttcctgcttctcttccccgcttcctcttcacagatgatccaattttccacttcatagagcctagcgaggctgtcacacaggagataccgcacctccttgccaccgcacttcaaaacttaaaatatccccctctgccctcatcctcactcagcagcctgtttcttctctcctttgcatgcagacttggtgaagggtttctgcaggtcatcttcttccttgccttcccatgcactgcactcctgcagtaggtccctccatcccacctgccac

SEQ ID NO: 127549 - DNA, 1266 bp, Homo sapiens
atttgcagacattttatttcatcctcagttgcaggcattccattaaggtggactgattaaagtgtcttttcagaacattagaacttcgtgtttcctcttcatggggttactgtcaacttatttaagaagaacagtagaacttcgtgttccctcttcttggtgttactgttaacttattttaaaaagtttgagtatgttacagtattttgtctttaagccagtcttgggatctagcaccaagggaaaaagttcaaaaaatgcattttaacaagtcttctcacttcatggtcacttggtatgacgactcaaaacaagaataatgttcttaatcaaccacaggggaaatcctttcttcggcccttcaattctacttttagtcagtcaaacaattcttaatttcatgcgggggattcccacacgttctgtaagtttcttttaaagttttcagatatgtgtagaatgtaggatatgattgcattcgtctcatatctcagtggtgtgaggtctgttgagtgtgccgctactttgttttaatattactcattcttttttctaagtatggatgtataagaatgagcatgataaaatgaaatctaaaaattaattgatttgttctcaggttaaaggcctattaaatataagatctttggatatattctgagtctttttattttttatgcagcaagtaaagaaaattttacagagctttggacacaaggctcctccttacctgccttttactgaactcaccatgtcttccctggttagctgtaggctctcccgtgctccaggctcagcagtcagggtgtatttttattgctcagatctgacaagtatgcttcctgcagttactgttgaggccagtttctaaggctttgaaatgaccttcaaaaagatgataaatgttgagtcccttttggaaaaatatactgagataaagaactgtgataaatcaaattataaggtagatcatcttgtaattagcacactataggaaagttagttatgccaggcgtggtggctcacgcctataatcccagcactttgggaggccgaggtgggcggatcacttgagaggtcaggagttcgagaccagcctgaccaacatggagaaaccccatctctactaaaaatacaaaaaaaaattagccaggtgtggtggcacgtgcctgtaatcccagctacttgggaggctgaggcaggagaatctcttgaacccgggaggcggaggttgcggtgagctgagattgcgccactgcactccag

SEQ ID NO: 127550 - DNA, 1078 bp, Homo sapiens
cagcctgggcgacagagcgagactccgtctcaaaaaaaaaaaaaaaaaaaaaaaaaaaaaaaaaaaaaaaaagatatttcttcatcaacaatttaatgactacatgaccatccattatttagctagtcagtagtttacaccctgttaacatttaaattaacatatttcacaatgattgtttcgaactcacatatttcccatcatgaaattatatgtaaatattcacctgttttattctagtagtgctaggagttgtatataattaagtatttgagatgtatttgagtgtaaaatgtgagaaaaatatctttttccccacacagatagccagttattgaatacttcatcctttggtctgacgttgactttttggttttgccatcaagtaaccatccacagtgcccgtacatagcaggcactcaataaatgtttgaataaatgaatttgagtatttattttgttttcagatgttttcttattttccgtggacacgtctgtctattctagttctactgccatgctgttttaattatcagagctgtataataaatgtttgtatgtggttgaacatcattattgttattgttttttcggaatttttctgggctacttctgcatcacttttctctcggataaatgaaaataatttggtcaactttcttgtaaaactatgataattttgactgatactgtattaatttattttccttccttccttccttccttccttccttccttccttccttccttccttccttcttttctttcttttccttcttttcctttttcttcttcttcttcttttccttccttccttccttgcttccttccttccttccttccttccttccttccttcttttccttcttttccttcgagatggagtcttgctctgtcacccacactggagtgcagcagcctgatcttggctcaccacaacctctgcctcccgggtccaagccattctcctgcctacccagtagctaggattacaggcacccagtaccacgcctggctaattttttatttttagtagagatggggttttaccatgttggccaggctggtcttgaacttc

SEQ ID NO: 127551 - DNA, 1017 bp, Homo sapiens
attatggtacatgttttaaaacacgatatacattgtatctgttgcaagtcaggttccaagggaaatggaactcagaagattaaggctgggggccaccagtgcctcatgcctgtaatcagcactgtgggaggccgaggcgggcagatcacttgaggtcaggagtttcagaccagcatggccaacatagtggaacctcatctctactgaaatacaaaaaattagccaggtgtggtggtgtgcacctgtaatcccagctactcaggaggctgaggcagaagaatcacttgaacctgggaggtggaggatgcagtgagccgagatcaagccactgcactccaggctgggtgacaaagcaaaactccgtatccaaaaagaaaagaaaagaaaagaagattaacatgtaggaagtttgttaaggagattttaggattcacacttgtggaataggaggaagcacaattgggccaagggagaaattgggctgtggtgtccgatcacaagataggcctcagctgatcccaaaggggatgctgaaggtggggtagcccttgaggatggtaccacgttggggtgaggggccaggccttggtagcttcacattgaccagttatgggaagaaggctacccctgaagaagggatgagaccttggtgaggtgactctttcaactgagggctgttaacttgcaacacccctagaaactgggggataagctcttcagtcctaaagagagacctgagcagccacctcagtattcactacagtctatattgtgtacattgtctgagcctgccctttttgctgtatattatgtttttggagtttacttatattaatatctgtagctctagttcatttattttaattgttttatggtattcagttcttcaaaatatgtcacaattttaaaatatattttcctattgagagacttttaagtttttacaatttttcactattaaaaaatgttgctatatgaattcatttatatttctccttagtgcacacaccagagttc

SEQ ID NO: 127552 - DNA, 1033 bp, Homo sapiens
tgggattacaagcactgagccagtgtacccagccttttttctattttgttcttgtcttgtatattttacattttatagcttttcatgtttctgaaaccacttaccacatttaggccaaaaggcaaaataataaaaaataaaaccaacctcacctaaaaaaaagtttaaggattaagtatttccatataccagtgttgaacagatttgaacaatatatttgattttatgctctccagttgctaaagtgaggaaaagaaacagaattatattgttttcatgtgctgacagccggaagcatgtaaacatctgcagaaaccaaacgtttcctggaactaagcttgagcagaaatctatcacgtggacctttgtttaaagaaccttgtgaaaaaccacagttatgtaaaagatccaggagcgcagttcatgtggattagattctctaggaggcagagagtctaaggagatcaaagaaaacaacgacttgggaagtgcatgtgctgagcgctggagccaaactagcagaaaggagttttagaggcactgaatccaggcctctggtttttggggactgtagtaaagaaaggagttgaggcctggtgcagtggctcatacctttggtcccattactttgggaggctgaggctggaggatggtttgaggctggaagttcaagaccagcctgggcaacaaagcaagaccccttttctaaaaaaaaaaattaaaaaaaaatggatgtgatggtgtgtgcctgtagtcctagctactcaggaggctgaggcagtagggtcaggaggcagaggccggagttgaaggctgcagtgagctatgcgggtaccactgcactccagtcgggtgacagagcaagaccctgactaaacaaaaaataacaacaaaaaaggaggcaggggtttagaaaataccatgattgttaacaggaccatcagatttcattttttctaaaatattagatattgtcagtgtggtttttatataggtgctgattctgttctgttcgtcttcaagtaacaaatgc

SEQ ID NO: 127553 - DNA, 2022 bp, Homo sapiens
attttgtttgaagaaccttttgttagaatttttaaaaacttcaacatagtaacacatttatcagtcttttactttataatttctacttttgtatgttattttaaaaatcattacctaaagagcatttttttcctaaaaattgtcaaaattttatttttacatttaagcctatagcttgaaaatgtgtctctatgatgtgagataatgattttattttcttatagttaacttatgtctcaggataactgttgttcaatagtctgtcctttccccgctgatttgcagtgctactgccatcatatatcaaatttctgaacatacgtgagtctttttctgggtgctctattgtttttcatttatctttactgttttgcttatcattgtttcatataacttaaagttttagagagtggctgcctgttttcttcaaatttgtcaagactgttcttggcccttttttcttatgaattttaggatcagcttaccatggtccatgaaagaccctgtagggattttgattgtaatcatgttgtatttcagttcagtttagggatatttattaagtcttccatccacaaatataatgtatttctcaacttacttggctttataatgttctctataaagctcttgaagatttttttgttagactaattattagaaagcttatagctttagttgctgctttaaatgataggtagcttttcttattgaaattacaatgtgatgttttggcttataggaattatattaattttgtatcttgatcttttaacaatactgatgaacttattttttattagttttaatggttttccttcataattctctatatagataatgattacttggagatgaagacagttttgttacatcatttaaatttttatatttcctttgtcttttttattaatgttgactaagtcctctattatgttattaagtaaaagtgatgattgtagtcatccttcttgcatttcgtagcttttgaaggaaatactcccattatttaaccattaagtgtgattttgttgtagggttttgtttttgtttttaagttaagcaagttcttttctattcctgatatgtgggattcttttttttttttttttttaatcatgaaggttgctaaagaattaacgaaagtgaccgggcgcggtggctcatgcctgtaatcccagcactttcggaggccgagacgggtggatcacgaggtcagagatcaagaccattctggctaacacagtgaaacctcatctctactaaaaatacaaaaacttagccgggcgtggtggcaggtgcctgtagtcccagctactcgggaggctgaggcaggagaatggcgtgaacccgggaggcggagccttgcagtgagccaagatcgcgccactgcactccagcctgggggacagagcaagactctgtctcaaaaaaaaaaagagttaacaaaccatttttcatttttttaaggacaaatctgaccttagattaactctctactcagttctcctgaacccctggtaaaagggaaatgttcaccatgttaccaggcaacattgttgtggtgaaagtgacctctgtttggtaaacatatctggactgggaggaactgtaagtgaactctaaattcctgattagaagctgtagcttccccagaagtactgacttttcagaaatgggtatgtcctttgtgggaaccttggacgccgtgactagcaccgttatatgatatttggtttctgcttggggcacaaagtttctaagccagcatgtctgtgcaccacccttgtgattttattttatattattttgttttatttgagacagagtcttgctctgttgcccaggctggagtgcgatggtgcaatgttggctcactgcaacccccacctcgcgggttcaagcgattctcttccctcggcctcccgagtagctgggattacagatgcccgccaccccacacctggctaatttttgtatttttagtagagacagggttgtaccatgttggctaagctgatc

SEQ ID NO: 127554 - DNA, 1037 bp, Homo sapiens
agtggactgtatttttctgtttgctttgatgttttgtttgtattactttgttttttgtttttgtttttgagactgagtctcgctctgtcgcacaggctggagtgcagtggtgtgatcttggctcgttgcaacctccacttcccgggttcaagcgattctcctgcctcagtccccctagtagctgggattacacacactgccaccgtgcccggctaatttttggagatggggtttcaccacattggctaggatggtctcgaattgttgacctcaagtgatccgcccgcctcagcctcccaaagtgctgggacgcctggcctgtttgtattactttgtggtaactctgccattaggggagttgaatcagactcatctgatatgaagatgacttaatcattaattattttagtacacaattattgagtctgtttttgcacccattatgggttccagcactagatctagtttattagcactgaaagtaaattaaagactaagccatattggtggttggctcacagacttaggagtttggctggctgttaaggatcggagtctgtaatattagaaagttttcaggcaaaatgaaagaaacaaccagataataatttggtaaataataaaggagtggtgaagttggatttccttagctgactcttttgctcagacattgtggtctcaacttacttatctctaaatatttaaatagattactgactggcctgggatgtggtttgttctttaaaaaaaaatgttatgtaatatttgacccatacaaaaggttatataattctgtacaattaataggacgttattaacacactgaagctaccgtgtgaggaggtgcctcactcatgtactgcattattatagcttgctaaacataccttggttaataaggaactatttcttgaatgtcacttccttgtctcctgccacgcatctggtggtgggcccggagcccttgttgaccaataggctcaatatttgtgagggagacctggacagcagagtagaggtgtgttaggacacgctgg

SEQ ID NO: 127555 - DNA, 2200 bp, Homo sapiens
tttaaactaaacagtttctattctaatcacaaataggaaaggaagaaactttttaaaatgaaaaatatataaccactcatttttgaggatctcacaaaaacaaagtattatgcaagtaatctgaagccaaaagccacaggctgagatttgccatgctgaaggtttttttttttttttttttaatctacaaatgtttctttgaattcttgaatgctctatcctgtgccagtgaaagatgtttttctttaaagatcttagcagtgactgacatatcactgtttgagcagatgatcctgagaaagtaaccaaagccatttacagaacaggcgtttctgtaacttgggccctttacggaagtaagccagtgggcttgcgtgttgtttgaagactgggcttatctttgttcagtgttttgctttgagagcacgactgactttgagtttcatctgcactctgtgaccaattgtgagacagacccaaagtctgaagtttgtgttgactttagaaagtcattctctgaagcctttttttggaatgagtttaaagaaggaagagtaccaaaagccaggtccagtcttgtagtggatgttttggaaagaaaggatcatggttctctgggaccatcagagtggatcagattacattctaatgtaatgatgaaaacaaagaacaataaatcagagggactctaaaacatcctaaaatcttccctcaggcaaataataccaaatcttcgagggtggataattgttttctctccattttcttttttctttttccttgcagattgacagaattaaaaatttgacaagccccatcagtggttcatttaagtgttttggtatacaggtgattagaaactataaaatctcttctgctttattttaaagctattgtcttgctcagactgcgtaatttaaaggcaactgtgttaatgtctgtggtgaaaaatttctgatcctaaaagtcatggacaaaaagggggcatttgcctacctagtgtcaaggagcttaaactgtaatcagaagtccatgcattattgttttattcaaatgtaaagggaagatgaatgctcaagataccgcaaaggatcttcttaaaatatgcaatttgtgtgactcttgctgagtcagatgagtgggtgatgctgggcagagctgtagaagaaaactgactttcagcaaggaataagaatccatgctaaacagtacagaagtgaggctgagaatatgctcaaggagagtgcggtggttggaatgtttgtcccttccaaaactcacgttcacatttaatccccagtgtggcagtattgagaggtagaatctttaagaggtgattgggtcatgagggctttgccctcatgaattgattaatccactcatggattaatggattaacgggttagtggattaatgggttgtcatgggagtggggcttgtggctctgtaagaagagaaagagagagcaacactcagccccctcgccatgtgatgccctgcactgcctcggagtttgcagagactcacgaccagcaagaaggctctcaccagataccgtctctcaaccttggacttcccagtatccagaactgtaagaaataaatttcatttctttataagttatccagtttcaggtattctataagcaacagaaaatggactaaaacagagagggaagcctctggaagggggaagcctgagtggttaagtggtgagtccagcagctgaggagaaaacttttgacctgaaaggactagatctgggacccagatggaaaacgacttcctctttttaccttggggtttgagagagtgctcagcctgggtctaggagtggaggtagaccagcctaacagaaaggactgagtccaaggaattgctagccagagggaaaataaaataaaatcatggaaggcttgggagatgccttttgatactttaaaccaagcttgtccaacctgtggcctgcaggccacatgtggccctggacagctttgaatgcggcccaacacaaattagtaaactgtcttaaaacattatgagattttttttttgtatgattttttgttgttgttgttagctaatcgctatcattagtgttagtatattttatgtatggcccaagacaatttttcttccagtatggtcccgggaagccagaagattggatacccctgctttaaacctaccatgataattgg

SEQ ID NO: 127556 - DNA, 1097 bp, Homo sapiens
gtgtctgtttgtgtgtttgttttcgcttctctgagggaggagccaagtctcatccgtgtagctccacgtgtaataaatgtgagtcgagtgaacgaatgaaagatttccccaagccttgtagtggacgtgcttggaccatggtggtccatcagtgtggcagtggagtccctgagcattgaggattgggagacgtgtgactagagaggtagaccacacaagccatgaagcatctaggggtgactgcaaactgagtgaggcaggtcttctggtcctgtgctgctccacacagaaggtttcagggatgacttggaagcaagaaacaggtaaatgcagtgctgcgtgctaagcgttgcaacctcctgcacaaactgctctgggcgcttcaattaatttggactgtgggggttggtctgggaagactggcgttttgagttgagtcttcaagagcgtgcagttgcccaccaaatggagaagaacaaggagcatgtttcagaagcagcatgtaccacgctgtagaggtgggaattgtcattttcttgagaagttgtaatggagcttaaggttcaggggcgttgggaagtgggaaagcagcaggaaatgagattggagagggccatgtgtgtaatgctgaatgactggcctttgccccattggctgtagggaaccactggaagttttaaaatcaggggaatggcggagattcacattttagaaaaatgcctggcagcagtgtggaagatggactggaaggggaagactaaagagaatggacgagttaggagactgctgcaaagtccaggtgagcacggggaagggcctggattaggccttgacagcggcgatgtggcagagaagactaagttgcatgtgattttgggaggcggaatttgcgtgacataccagagctgcagataacagttgtgggagggatggaagaatagagaaggaagctttttttaacctatagccattgaatgggagagtagaaaggaaacattgagtttggttctggacattttagaatggggcacccaaatggagagaaccagcagacggaaacatattcacatgtgtgtgaatgggtgagattatataag

SEQ ID NO: 127557 - DNA, 1650 bp, Homo sapiens
aatcaacatttattatctctaacaatttttgtacgtcagagatttgggatcacattaacagtgttcaggcttggggtctcttgcagtgaagtcaagatgttagtcagggctgggcatggaggctcatgcctctagttccagcactttgggaggctgaggcaggaggattgctcgagcctaggagtttgagaccagcttgggcaacatagcgagaccccatctctattaaaaaaataaataataatttttaaatagatgttagccagtcttcagtcatcttaaggctttactggggctggaggatcctcttccaagatggtgtactcaaatggctggcaagttggtgttggttgttggtgggaggcctcaattcctcctctatgtgggactcttcacagggttgagtgtccttatgacatggcagctgcactccccagatcgagcgacgcaagaaaacaagacagaagcttcagtgccctttttgaccacgccttggaaatcatcccccatcactctcgccatgttctgttccttagacacaagccagtaaattccgcccacattcaagggaaggggagctaggtttcaccttttaaaaagaggtgtgtcagagaatctgggaacagattttacaaccaccacactgtcctaaagaggagtgatggtgtaattttgaaaaggaaaaaaagtctgggatccagacaaagattaatctggtagtaatgtcaaagatgaatggaagaaagggagaaacagaggtggatcgtagtgctgcgatctagcagtcaagtgatggatttagttgggggcagtgagagggcagaggtaggacacatggaagggaggcagcagaatcccttccctgtgatggttgaggtttcaatgactgagtatgtagagaaaatcagagcagtgactttggggaaagccatggtttgggatatgattaggaaggggagctggatctgttgcattagagagaaagaagagccagttgagttcctgcaggagcaaaaaaagcagagtgatcaagagcttcagatgttgcagaattcgcagagaatgatgtttgaaatgaatgcatttgcttgcaaggttattataggtgacagcagtttaagtggagtagagcaattttggaaattggattataacatttaattcgatgattaactttttacaaagtgctagaggtgggaggatgaggggctggtataccattcaccactcatattttgagatcttacatctttctgcctcctgatagtacccccaagcctccctggaatggcacttccactcagctcttggattgagggcaatggaggaggattttacctcactcattttcagggattcttttaactgcattggaaatcaacttactttattatttttttactttacatattgcttttaactatcatgtgtgctctcccctagccccactcatttccctccctttcccttcttcctggtcagtaagcatttaagatcatgatccagtacaaagacctattcttctcccttacctcccaacttcaagcatgattctattattcatatgctttgttaactgaacttgcagggatgcaattgatatataagaaatataattaaaattgcaaccagcaaatgtaaatactaaat

SEQ ID NO: 127558 - DNA, 1113 bp, Homo sapiens
taacattgtattaatccattttcatgctgctatgaagacatccccttgactgggtaatttataaagaaaagttgtttaattgactcacagttcagcatggctggggaggcctcaggaaacttaacagtcatggcagaagaggaagcaaacatgtcctttttcccatgacagcatcatggagatgtgccaaacaaatgggagaacagccccttataaaaccatcagatctcatgagaactcactatcacaagaacagtaagagggtaaccacctgcatgattaaattacctcctactgggtccttttcatgacacgtgaggattatgggaactacaattcaagatgagatttgggtggggacacagccaaaccatatcaaacatcatttattaaatagtttttgccttggtgattttagatgccaccttaataatatacaatactaaaacttcatctgcacttggatctgtttttgaactttctgtattattctgttggtttgtctgtctattcatgtgtcagtaagacacttttcatcatggaggctttagactgtgatttaatgtctggaagaactcggccttccctctagtgtgttagtgttttcctggctgttactgcacatttatttttcaatacaaggctcagtatcaattgtatgtctccattaaaaaaacttggtttatttatgaggattacattaaatttctaaatttatgatgaactgacatttttatgttaacttgttctatctgaatataagagatgtctgtggttaaactcttcatttgtgtctttttaagaatgctttaaagttttcctcagatgtgttttatacatttcttttaaaatttattcttaagcactcaattttctttgtgcaacttgctttgtttccatttaatgtatcatatatagctgaacaggtcagtacatgttgatctatttcattttaaaaaatggatccatgataagttatctctgtgtatctattagtatgggggaatgtgagggtagcataagtcataatttctatcttaaataactaaaacatagttttggaaatcagacatgtttatttatgtacattaaaaactataaaaaattcctgtg

SEQ ID NO: 127559 - DNA, 1031 bp, Homo sapiens
gaaattggtgagcagggaatgggaagacaaaaatggaatgttgtaagtttttaaatgtcctgaaacttttaaaagacatattaactatgtcaagatgagtcaatagcacagggttctttgttagaaaataataaatgaataagttttcctttttgtttctggtgaatacttcgcaatatcgccaggtgctattatttgactcatgtcaaatgcctttccaaagttatgcccagaattcatgcaatgcttacatttttagattgctttatgatcgttaccttgtttaaatcaagtttctggaaggcacacatgaccgttattactaggcgtgctttatggattaggaaacaaatcatttgtatagcgcagaccacgaagctgggttgagaccatgagacttctctgcttttcacactaccagttttagttttatcttgaaattgtatattgtctcaccgcttttataagaggattgagccttaaaatcttaagagttgatttggcatacgcgtaattgatttgagctatgtttcatggacccagctttagattttgatcacctctttctctttgaaaagagctacgtgtgatttgctacccagatctgtactcatttcttgactcaaatatgtatctgtgacataatcttcgtagttaaatctgtgaaactttcaaatccttcagacttgacagtgtgaggctggggttggcagtctgcttaacaagatgctgggaccacctctgaattagtgaatcagggagctgctgtgtgatcccctcctccaggctttcttggagtttgtctctgccacttcctcaagccctttaaaaaggctcctgtgctttagagagttaggatgttaatgaccgttcttttttcttgtactttattaagtactagtcttactagactagtgcttaagtggcagtgtctgcctttgccttctcccatctctttatgctcctttcttccaacttctcacgtttctgtttctcgcacggccaggtgtccagcatcccatgctgacttg

SEQ ID NO: 127560 - DNA, 1051 bp, Homo sapiens
gctcagtctgaggaacaggcaggttcccacattaccaagtatcttccatcaccatggtggggcaacactgtcctggactagagtatacatttctatgaagataccttcttacctatatgacacagtgttcatgtactgctgtatttcctctcctgatatataacaaataatctagtgaaaatttcccactaacttacccagggaactataagtaggccaaatgaagcttttagcacactttctggttgctgataaaaatcagcaactataaacccaattgctcctatttccattagagctgctttccagaactaggtctccagttatgtacattaaaagtttgccaacccacttattttcttcctaaatactttattatatgcaggatggcttgggcttcatctacagcaaacaaatatatgtatatatttgccagtgggccatcagaaacatctattgattgtctatgtgtacaagtaactgagtctgcaaaattgccttcaaaggctaagtctcttgtattctgcccttactgagagtctgtactctcctaaggttaattggcttatcatattctgcttttgtgctccctagtttaccatgatgcttggggtttttgcccctacgcttttcactttgtcttcctgtaatttattacaaccaacccttgtgtttttttttttttaacagttttggatctgcattaattttttagtccccagaggaacactatgttcccaaacattatgttctgcactctcatgctcatatcactttgtgtagtgccagacacctcctgggatctcaagaaatgttgtttctttttaaaagatgggtgattactctaggaggctcataaaagatctttctcagttgagttactttcactgtttatgtatcccaagtggcttaggtcaaaatattggttaatagaaagactccaagtctttggagaagctttactagtgtctcctcatctctgtaaaagcaaagatgagtattgaatggtcttacaggagtgttggagagaaatgatgaaaagcattagaaa

SEQ ID NO: 127561 - DNA, 1006 bp, Homo sapiens
acagcaaatctgctggtaatggaaaattagctggccaaggctaagatgaccacggccaacggctattgtcatctgttgagggcaggcgaagttgaaacacttttacttttggaggaaagtattttccatctccgtgaaagttcacagctggctaggtatggtggctcacgcctgtaatcccagcaatttgggaggctaaagcaggaggatcacttgaggccaggcatttgagaccaacttgggcacatagcaagactccatctctacaaaaaattttaaaaattagctggttatggtggggcatgcctgtagtcccggctactcaggaggctgacgtgtgaggatcccttgagcccaggagtttgagactaaagtgagctgtgattgcgccactgccctccaggctgggtgacagagtgtgaccctgtctcttaaaaagaaaaaggaaagttcctttttgctataggcccgaggggttgctgctgaaatgggcaagttcatgaaacctgggacggtggtgcttgttctggctggatgctattctggatgcaaagccatcatcgtgaagaacattgatgatggtaccttagatcgcccctacagccatgctctggtggctggaattgaccgctgtccccacaaagtgacagctgccatgggcaagaagaagatctctaagaggtcaaagatcaagtcttttgtgaaagtttataaccacaatcagctaatgcccacaaggtactctgtggatatccccttggacaaaactgtcatcaataaggatgtcttcagagaccctactcttaaacacaaggcccgatgagaggccaaggtcaagtttgaagagagatacaagacaggcaagaacaagcggttcttccagaagctgcggttttagatgcttcgttttggtcattaaaaattaaacagaaaaaaaaaaggaaagttcacagatggccaaacttttccacagccatggtaccgtcctagtgaagtacatttgaga

SEQ ID NO: 127562 - DNA, 1011 bp, Homo sapiens
cacacattattacaaaggccggtaacagcattgttctatacggactgcggaaatgacatgattgtctcccgacatactgtatctaggccccctgaagagcaggtatttgtgacatggctagacataggtgtagagtatttgagtggcacaatttttcttcaagtaactgacacagaaatcaaacccccagactccgccaattcagacaacgtaaaccaactgaactatctaaaaataattttggttgattacgtatttatatgtaatttgatgactattgtctcaaatgtacttcactaggacggtaccatggctgtggaaaagtttggccatctgtgaactttccttttttttttctgtttaatttttaatgaccaaaacgaagcatctaaaaccgcagcttctggaagaaccgcttgttcttgcctgtcttgtatctctcttcaaacttgaccttggcctctcatcgggccttgtgtttaagagtagggtctctgaagacatccttattgatgacagttttgtccaaggggatatccacagagtaccttgtgggcattagctgattgtggttataaactttcacaaaagacttgatctttgacctcttagagatcttcttcttgcccatggcagctgtcactttgtggggacagcggtcaattccagccaccagagcatggctgtaggggcgatctaaggtaccatcatcaatgttcttcacgatgatggctttgcatccagaatagcatccagccagaacaagcaccaccgtcccaggtttcatgaacttgcccatttcagcagcaacccctcgggcctatagcaaaaaggaactttcctttttctttttaagagacagggtcacactctgtcacccagcctggagggcagtggcgcaatcacagctcactttagtctcaaactcctgggctcaagggatcctcacacgtcagcctcctgagtagccgggactacaggcatgccccaccataaccagctaatttttaa

SEQ ID NO: 127563 - DNA, 1371 bp, Homo sapiens
gtttattgaatgaatccaagttcctaagaagatatcagtcctcagctcttatattttcttaattatcccctgccttttcctttgtggggtgatctgcaagcagtttcatctgcacgtggaatggaggacatgctaaaagtaaatgtagctttgtttttttttcctcccccaaggaattgcctcagtaggaatgggtgtttcagatatatcattctgttacaggtacaaaaaattgtttccaggaagcactgccatcattatctctgagaggcaagtcagtagaaattgttattttccatttacagatggacaaatggaaggtttctttctcatttaccaattacagaatgtccactctgtttaaagtactgtgctaagatttttatgggctacaaagatgtacaagacaaggttcttgtttcgaataagaatgtcataatcttatttggataaaacaatatttatataacaaaagaactacaactcaggagcatatagtttgaggcatatgagtggtcccaaaaggagccccaatgggccaggcacggtggctcacacctgtaatcccagcactttggaaggccaagatgggtggatggcttgaggccaggagtttgagaccagcctgggaaacataacaaggccccatatatacttttaaaaaaattagctggaagtagtggtgcacacctgtggcccagcttcttgggaggctgagatgggaggatcgattgagccctaaagattgaggctgcagtgagccacaatcgtgccattgcactccaatctgggtaacagagtgaaatgaaaccctgtctcaaaacaaaacaaaaagtaccaaagggaatataaaaggcaggcaaaagaatgtccagctaaagtgatcaggtatatcctcctgtcccatctgagatgaacaggttttgtgctggttattctccatctggctcctgtcctggttttctgtgactgccgtaacaaattactacaaactggataggttaaaacaacagaattttattttctcacagttccggaggacagaagtctgaaatcaagtgttggcaaggccacactcctgaaagctctgggggagaatcttctccttgcttcttccagcgtctgggggccccaggccttccttggcttgtggccactcctctgaggtcacattgcctcctccttttatctcttaaagtttctgcttctctcttataaggatacatgtgattgcatttagggcctaccacagtgatctaggataaggtcctcctctcaggataaggtcctcctgaacttaatcacatattttgccatgtaatgtaatattcccaggttccagagattcggctgtgggcatgttttgttggc

SEQ ID NO: 127564 - DNA, 1056 bp, Homo sapiens
tggcggcgagctacactttttttctaaatgggaaaagggttaaatgagatattctattagttttaaaagcaggtaagtgctgaaaatattatatttctctctccaaggagaaaaaaatctagctcatagttagcactccttaaatcctaactgtaattatttttcttataatttcctgtattggccccagattccttttttcatgtagttcattgaccttcaccagaaaaatggttctctgttcaattctgacaacagcagctgacatcaatgtaaaaagagaaacaagctaaaaacagtagttgagtgtatacaccctgaattgaatattcagttgcaaaatcatcatgattattattgtaattacagagaggaggcattgcaataattgttcaagtgtcttcttgaggaaataactaaaacagggccagctgtcacaaaccaccctacaataatgatccctgtgtgtgcatcttcagtattcatagtgaccccataataacaaatttgtgcactcatctaatatcctctttcaaaagttttaattttataaacaatagagacagaatctcgctgttgttgcccaagctggtctcaaactcctggcatgaagcgctcctcctacctcggcctcccaaagtgctaatctgatgcccttaaacaactgaaaaaataacaaacctatgatcagattcagtatttcgcttgatagttgaccctcgtttctaaatggtgtccatgaacagccttagaatactaaactaccaaacaaaaattgctccatcgatttaataacaaactagagtgggtagtccagcattcacctgcaacatgagggcaacaaatctaggtacaagagtagagtggaagccaggcagataggtcagcagacaactaacacacttaggagaaacatctacaaagacaggcgtgttttattgacttgaaaactgtaaacaaacaagatctgtgagaaaagagggaaggccttgttttttgtttacttgtgaaatcagccaaaagtatttgaaattttctcttcccaagatacagctg

SEQ ID NO: 127565 - DNA, 1072 bp, Homo sapiens
acgcgctacacaagtggagctccttttcctccacctaccttcccgagtaagtgccgggccttgagctcgtgctgccccacccttccgcgtcagcacggttgggccaggggtgcaatggagggcagccgagccgagaggcccaggcggggcctgctgagggggacgtgcggcctccggagtcttagttcagctgctgagagcgttgctcggcctcgctcgggaaggggttagggtccggagagcgagcccagggagaaggggcgaggtgtgtggcggatccggggcgcgcacaggagaaccggaagcccagcggttctgcgcttgggatttgggggttgaggttgaggagggcttggggggcggacggctctggggcaggaatcggagttggcggggccctgcccgcgggcaaactaccccgaatgtctgaggtcgtccgaggtggtcggcgtcgggggacagttcagtcgattgctgccgggacaaagtgtaaagccgaggagtgtctattccagagtggggtcattaaaagtgattagctctagagtagtgttaaaagtcacggaaggctgaaaagttgtggaatccatctgaatcctagcaggcggggagaacttgtaggattggcagacgttgtctttaatgcctggaagttctgaaaaagatagggagtgggaaggagggacgttaccgaagaatttcagtattacggctcattagaagatgggtttgtatggacacagacacgtttcccagtccggaaactcaaacatagaaacatctggctttaatgaatttgattttcaacaccggctttgtcttgatccctgatttaggtgttaaaaaaattcagttgcattgttaggtttttgttggtggtgtttttttctctagcaaattccttctgaaatgctgaaaatactcttacatagtatcttatttatctttggcttatctttgaaaggaggagcagatctaactccaattttacatgctagtggaggaactggcttagtaaagggttaagatctgtgcagatcctgaagaaaagtgctagttgtccctctaacca

SEQ ID NO: 127566 - DNA, 1052 bp, Homo sapiens
aatgtataattacttgattaatagctatcttcccaactagaccaaaaactccatagaatgtatggaattttcctccatcatccttgtagtccaagcataatatttattaaatgagtaaatgagtgaattaactagccattttgattaattttctctttttagtgcagttttggtttaggactgtaaggagtcatactggccatattcagaatgtcacattagtgttttaagtccattctgtatttttttcaatgagtttcagcaaaatctgagagtgtcttaagtgaaattggttatatctagggtggaggtattatatttggaaagacttgtaacagtagaaagctttttatttaaatctttgagttttaaaatatttttattatgaagttatttatgattttataggtaatatttttaatgagaccttgaaaaatttatagagtgcagtttattacagaatctgagttgcctaatagtttttaatagtttttgagtatcagtattttgattaattttaagttagggatcatttcctctaattctttgaacataattatttgttggttgatttttttttttaatgtaacagtgtttttgagatgtaatttatgtaccatacggttcttctactttagggtattagattcatggattttttgtacattcacagatgtgaccgtcattgcagtcaattttagaacattttcataatctcaaaaggaaaactgtagcctttggctattatccacttattcttccatccctgagcaaccactaaactacttttggtgtgtatagatttgcctatttaagacattttctataaatggaatcatataatttatggccttttgtgattggcttccatttaggatgttgttttcaaagtttatattgtatcatgtatcagtactacatccttcttattgctggtaagtattctgttgtatcgatataccacattatgtttagccgtttattagtacagtggtccccaacctttttggcaccaaggactgactttgtgcaaggcagtttttccatggatg

SEQ ID NO: 127567 - DNA, 2262 bp, Homo sapiens
caaagttgtattctgtgctacagctatctatattgtgatttgccatatgacatatctcttattaatatatgaagagagcattaaaacagccttgcctatttatcagatatgttctaggtgttaatttatttgtgaattttatgcgaacagatatatatatggaaatgagtttttgaaagtccagcatacaactacagccattaatcaaggacacatgtagaaaataattcatatatatgcagagatgttgggagaagttttattccaaagctaacacaaaacaaggtacacaagtttttatagaggatattatccattgcggtaatatttgatgtataatacttctgaattttttaatagttttaagagttaactatagtcgttgggttttttttttttaaagacagggtcccacaaatgtaatttaaaaatatttgtagatcctctggagtatctctgaggaagagagtttgaaaaatgctttaccatgggacttagggcattggtcaaagatacctattatgggtatgagaggagagttcttattaagtaagcagatttggattagttaatattggtttgacctgtcatccttagtacagtttaaattattgtattatactgtggcaaaagctggatctgatgcaaaggaaaacatgaaagaattgagacagtatggtatagagagaacactgacctaggactgggacttgagttctaatcccagttctaccaccgattaattggtagttttagatcggtcatttaatttctctagccttttatttttttctcatacaaaatgagggatttagattctgaaggtatttttttgatgcaaaatagcaaacagttgatattacagagtaattttttaaagacatgcaccctcccccacatccacatgttatagttcatattaagctacattgttgcccaacaaagatattttaagaacttgatataattagatgataatgattattttagtaaaattaattacatataaatgaagcctttgagagtgcttagaagcagtttgatctcttaaatctatcttttttttttttgagacagagtcttgctctgttgcccaggctggagtacagtggcacgatctcggctcactgcaacctctacctcccaggttcaagcagtcctcttgcctcagcctcctgagtagctgggactacaggtgcgtgccaccacgcccagctaattttttgtatttttagtagagacggggtttcaccatgttgaccaggatggtctctatctgttgaccttgtgatccacctgcctcagcctcccaaagtgctgggatttaggcatgagccgccgcacccggccttaaatctttctaatccctctgtgaatatattgttatattgtctgaggtttgaagaatgtgtgtactaagcagtaaatcattgccagatcatgtccaaatttaatgatctttgcattaggtagaaaagggatagttctttgttttgaaatatattctgaagggtcatttaatttctgaaaagattgataattcaagccttctgagatattcagcaattgaggactatttttatatgagtgtctcagcagatagatttttttgttttggggagacaccaaatcatgttagcgagctttttagtttcatttttgtctagtgagaatttcctattttatcaaacttctgtataggaatgtttgttttattttgttgccattcttttttcctagtggtcgctccattcattcttgtggagtatgttgtaggtatgtgttcccaaagtgttttgaatccttagagataattactacatgcttattttcagttgcttggtagtgataagttgacttgagttttgctttgagtgatggtaactaacgatactacaatggtctgctatttgctaggccattgacattctgtaattttcaacctgtatttgtacccacctctctttcttctggtatattttaaagtaaatataagttatgttattttatttctaaatacttcagtatacatgaagaagaggacattttattagttattttttatttcattttatttaaaatcttttttttttttttggtagagttggggtctcgctatgttgcccaagctagtctcaaactcctgggctcaagcactccttcacctcagcctcccagagttctggaattacaggcatgagccgctgcacctggccttcgttatctattaatccataacaaattgctacaaacttagcagct
